United States Patent Application Publication US 2020/0377945 A1 - sequence listing, part 24

SEQ ID NO: 4431 - DNA, 101541 bp, Unknown
  gut microbiota DNA sequence
ggagagtaggtagtcgccgttttcagaagaagcctccgtgtctgataaggatacggaggctttgttcgtttttggcggtctcataaacttttcttatatttgcgccgaactaattttatatcaacgtttaaagcaaattgaaagtatgaagactaaagttttattagctgccgttgcggtagcgttttctttcgcagtaacatcttgtggcaacaaaaaggctgcagattctaatgcaactgaggcagattcttgctgtgctgcaaaaacagaacaagtatgtgactctgcaaaggcatgttgccaggctgctgattcagtagcgtgtcctaaggctgcatgtgatggtgccaagtgtgacaaaccttgtgagaagaagtaattcagaacttgtattgaactgaagaataaggaaaggcgtaccttgaggtacgcctttttttgtgatatatttcagcgataaatgaatacaaacttataaaatgatattttttatcggaaaaaagtaacgaatttgtttgtgtggtacgaaataatatctacctttgcaacgtcaaaacaaaaaagaagatgattcagaactttacatatattctactgtgtggtattattattctactggcaaagtttagtggaagtgagtgctgtgcgtgaatatatatgtaagatgcaatgatatatgaagcctttctcacttccaagtgtgaaaggctttttttatggaacataaattaaatacaataaagcaatgagtgacaaattatttattttcgacacaacgctccgcgatggcgagcaggttccgggatgccaattgaatacagtggaaaagattcaggtagccagacaactggaagccctgggggtggacgtgattgaagccggatttccgatttcaagtccgggagatttcaattcggtcattgagatatcaaaagctgtgacatggcccaccatctgtgccttgacacgtgccgtacagaaagatattgatgtggcggcagaggctttgcagtttgccaagcataaacgtatccatactggtatcggtacatctgactcgcacattaaatataaatttaattccaatcgcgaggaaataatagagcgtgcagtggctgccgtaaagtatgcacgtaagtatgtggatgatgtagagttctatgccgaagatgcaggccgaacggataatgaatatttggcacgggtggtagaagctgttatcaaggcaggtgcgactgtggtgaatattcccgatacaacggggtattgcttgcctgatgagtatggcgcgaagataagatatctgatggaacatgtcaacggtattcataatgccattatttctactcattgccacaatgacttgggcatggctactgccaatacaatggctggcgtactgaatggtgcccgccaggtggaggtaaccatcaatggtattggtgaacgtgccggcaatacttctcttgaggaagtggcgatgattatcaaatgtcacaaggacatagaaatcgagaccaacatcaatacacagaagatttatccaaccagccgtatggtgtccagtctgatgaacatgccggtgcagcccaacaaggctattgtaggtcgcaatgcttttgcccattcgtcgggtattcaccaggatggtgtgttgaagaatgtacagacttacgaaatcattgacccgcatgatgtgggtattgatgataattccatcgtattgacagcccgtagcggacgtgcagccttgaagaatcgtttgtcgatattgggagtacaactggatcaggagaagttggacaaagtgtatgaagagttcttgaaacttgccgataagaagaaggatatcaacgatgatgatattctggtattggcaggggcaaaccgtacgcagaaccaccgtatcaaactggaatatcttcaggtgaccagtggggtgggggttcgttcggttgccagcttgggattgaacatctctggcgagaagtttgaagccgccgccagtggaaacggtccggtagacgctgctatcaaggctttgaagaagattattgaccgccatatgacattgaaggaattcactatccaggctatcagcaagggtagcgacgatatgggtaaggtacatatgcaggtggaatacgataatcatatttattatgggttcggtgccaatacggatattatcgcggcatcagtggaagcgtacatcgactgtatcaataagttcaagatgtgattttaatcgtaaattgtaaatagctaaattgtacataaagagatgaatacattatttgataaaatctgggatgcccatgtggtacagaaagtggaagacggtcccacacagctttatattgaccggctttattgtcatgaagtaaccagcccgcaagccttttcaggattgcgcgaacgtggaatcaagtgtttccgtccggaaaagattttctgtatgcccgaccataacacgccgacgcatgaccaggacaagccgattgaagacccggtttcaaagactcaggtagatacactggccaagaatgcggaagagtttggattggcccatttcggcatgatggacaagaagaacggaattatccatgtagtaggtccggaacgcgggctgaccctgcctggcatgaccattgtctgcggtgactcgcatacttccacccacggggcgatgggagcagtggctttcggtatcggtacgagtgaggtggaaatggtaatggcctcgcaatgtatccttcagacccgtcctaagacaatgcgcatcactgtcgacggcaaacttggcaagagagtgacggcaaaagatgtagcattgtatatgatgtcgaagatgacgaccagcggcgctacgggatatttcgtggaatatgccggagaagctgtgcgtggtctgactatggaaggccgtctgaccttgtgcaatctgagtatagagatgggtgcccgcggcggtatggttgctccggatgagaccactttcgagtacatcaaaggacgcgaatatgctccgaagggtgaggcatgggacaaggcattggcctattggaaaacattgaagagtgatgaggatgcagtgttcgacaaggaagtccgttttgctgccgaagatattgaaccgatgattacatacggtaccaacccgggcatgggtatgggtatcacacaacatattcctactaccgaaggcatgggagaagctgcccggacctctttcatgaagtctattagctatatgggtttccaaccgggagaacctttgctgggtaagaaggttgactatgtgtttttgggtgcctgcaccaatggacgcattgaggatttccgtgcatttgcctccattgtgaaaggccgtcggaaagccgagaatgtagtggcatggctggttccgggctcctggatggtagatgcacagattcgcgaagagggactggacaagattttggaagaggccggttttgccattcgccaaccgggttgttctgcttgcctggcaatgaacgacgataaggtgcctgccggaaagtatgcagtgtctaccagtaaccgtaattttgaaggacgccagggaccgggttcccgaacactgcttgccagcccgcttgtagctgcagcagcggcagtgactggagtaattactgacccgagaacgctgatttgatgtacgattggacgatttacgattaaaattacttcgtaaatcaaacatcgttcaacaaaggtaaatcaagagtattttcaatcgtaaattgtaaatcgtaaatacaaagatgaagacaaaatttgatataataaccagtacttgtgtgcctcttccattagagaatgtggatacagaccagataatccctgcacgttttctgaaagctactacccgtgaggaaaagttcttcggagataatttattccgcgattggcgctatcatccggacggttctctgaacaaggactttgttttgaacaatcccacttacggtggacagattctggtggcgggaaagaacttcggttccggttccagccgtgagcatgctgcatgggccattgccggttacggtttccgcgtggtggtatcgagtttctttgccgatatacacaagaacaatgaactgaacaactttgtgcttccggtggtggtaagtgagccgttcctgaaagagttgttcgactctatctctgccaatccgaagatggaagtggaagtgaatctgcccgaacagaccatcaccaacaaagctacgggcaagatcgaacattttgaaatcaatgcctacaagaaacattgcctgatgaatggcttggatgacatcgattttctggttgagaataaagataagatagaagcttgggagaataaaaatgaagcataatcatccgaagatagaaatcatggacactacgctccgcgacggtgaacagaccagcggagtctcctttgtgccccatgagaagctgatgattgcccgtttgttactggaggaattgaaggtagaccgggtggaggtggcttctgcgcgggtatccgaaggagagtttgatgccgtaaaaatgatttgtgactgggcggcacgccgtaatctgttgccaagagtagaagtgcttggctttgtagatggccacacgtcggtggactggatacatgcgaccggttgccgtgtcatcaatctgctgtgcaaaggctcgctgaagcattgcacctaccagttgaagaagactcccgaagagcatatcgaggatattctgtccgtagtggattacgccaacgagcaggatatggtagtgaatgtctatctggaagactggagcaacggcatgaaagattctccggaatatgtgttccgtctgatggacgccttggagcagaccaatatccgccgctatatgttgcctgacacgttgggcgtattgaacccgctgcaggtcatcgagttcatgcgcaagatggtgaaacgctatccgcatgcccattttgacttccatgcccacaatgactatgaccttgccgtgagcaatgtgcttgccgccgtacttagcggttgcaagggactgcatactaccattaacggcctgggcgaacgcgccggcaatgctccgcttgccagtgtgcaggctatcctgaaagaccacttcaatgccattaccaacattgacgaaagccgcctgaacgacgtaagccgtgtggtggagtcctactcgggcatcgtcattcccgccaataaaccgattgttggcgagaatgtatttacccaagtggcaggcgtccatgccgacggtgacaataaaagtaacctctactgcaacgacctcctgcccgaacgctttggtcgcaagcgagagtatgccctgggcaagaacagcggtaaagccaatatccggaagaatctggaggacttggggttacaactggatgaagatgccatgcgcaaagtgaccgaacgcatcattgagttgggcgacaagaaagagctggtgacgcaagaagacctgccctatatcgtttcggacgtactgaagcacggaatggcagaagaacgcgtcagccttaagagctatattgtgaatctggcgtatggattgaagccgatggctacgttgaagatagaaattaacggaaaggaatatgaggaaagttccagtggagatggccagtatgatgcttttgtgcgcgccttgcgcaagatatataaagtgacactgggtcgtaagttcccgatgctgacgaactatgccgtgaccattcctcccggtgggcgtaccgatgcctttgtgcagacggttattacctggagttttgaagatacgatattccgtacacgcggattggacgcagaccagacggaagcggccatcaaggcgacggtgaagatgctgaatatcatagaagacgaatacgaatcataaaaaatggatctcatggagaaaaagaaatcgttttttgagaggcgtccttatgtatgctatgcgttgtatgcaggcttgctttttgctttcaacctctttctgcgttggtggagcggcgagttggatgcggacgagtatcttatgtcagccatcaatacccttatattgacagcaggttttgtgtggggtgatcggtatcgccgcaagaatcttgcaaacaaaaagaagatagatgaacttttaaataataaagaaaacaatggattttaaaattgcagtgttggccggtgacggtatcggccccgaaatctctaccgtaggcgtggatgtgatgactgccgtgtgtgagaagttcggacataaagtgaactatgaatatgccatctgcggtgcagacgcgatagacaaggtgggtgacccgtttcccgaagccacttatgaggcttgtaaaaatgcggatgctgtattgttctctgccgtaggtgacccgaaattcgacaatgaccctactgccaaagtgcgtcccgagcagggcttgctggctatgcgcaagaaactgggactatttgccaacatccgtcccgtgcagaccttcaaatgtctgctccataagtctccccttcgtgcggaactggtggatggtgccgatttcctttgcatccgcgaactgaccggtggcatgtacttcggtgagaaataccaggacaatgacaaggcgtatgatacgaacatgtatacccgtcctgagattgagcgtatcctgaaagtcggatttgaatatgccatgaaacgcagtaaacatcttacggtggtggataaagccaatgtgcttgcctcttcccgtctttggagacagattgcccaggagatggcaccgcagtaccccgaggtgacaaccgactatatgtttgtggacaacgccgccatgaagatgattcaagagccgaaattctttgacgtaatggttacggaaaatacgtttggtgatattttgacggacgagggttcctgcatcagtggctctatgggattgctgccttctgcttctacgggagagagcacgccggtattcgaacctatccatggttcctggccgcaggcgaaaggcttgaatatagccaatccgctggcgcaaattttgtctgtagccatgcttttcgaatacttcgacctgaaagaggagggggcgttgattcgtaaggcagttgatgcttcactcgatgcgaatgtacgtacaccggagattcaagtagaaggtggcgacaaatacggtaccaaggaagtgggcgcgtggattgtagactatcttaagaagtcttgataacagtgtctcattaccgttctgttcatcagtaacttctcactgcaaagttctgcaaaccttttgcagtgtcactgcaaagctgttacagttgcgctgcaaagcagttgcagtaccactgcaaacctatttgcagtaacgctgcagctcgtttgcagtactactgcaaaaagcatgcaccatctttgcagtgggaagtcgctgattgtcagatatggttcttcctcctcatcctgccttcttcaatcgtttcatatcctttcatcctctttattcgtgttaagctttgatagatggcagtataatctttcctttcccgcacggtttatttcttggaatttccatatctttgtcagcatatccatgttacataagtgtgtacgggaagaatgtattagacagtgagattatggcgaaaattgcaaagaacctgacggagttgattgggcatactcctttgatggaattggctgaatacagccgtaaatacggattgaaaagaaatattgtggctaagctggaatcttttaatccggcgggaagcgtgaaggaccgtgtggcatttgccatgattgaggatgccgaggcacgtggggctttgaaacccggagccacgattattgaacctaccagtggcaataccggcgtgggactggcgatggtggcaaccatcaagggatatcatttgatattgaccatgccggagaccatgagtgtggaacgccgtaatctgttgaaagccttgggtgcggagattgtactgaccgacgggctgacaggtatggccggctccattgccaaagcgaaagaactgcgggatgcgatacccggtgcggttattctgcagcagtttgagaatccctccaatgccaaggctcatgaacatactacgggggaagaaatctggacggacacggatggtaaagtgactgtttttgttgccggtgtgggtacgggcggtacggtctgtggagtggcgcgtgccttgaagaaacataatccggatgtctatgttgtggctgtagaaccggcctcctctccggttctggaaggaggggaagacgcaccgcaccgcatccaggggattggggccaattttattccttccatttatgatgcttctgtagtagacgagattattccggtgcccgatgacgaggccattcgtggaggacgagagctggcttctacggaaggcttgctggcgggcatctcatccggtgcggcggtatatgcggcacggttgctggccgaacgccctgaatttgcggataaaatgattgttgccctactgcccgatacgggggaacgctatttgtcaacagaactgttcgctttcgatacctatcctttggaataaatactgaactattatatgaagaaacttattttttctttcttcttgtgtggagccacgatgttccctgccttttcacaaacctatcaggaactgagcgaacgtgcggttgcagccacggagcaagacagcttgtcattggccgaaaaatacattgaacaagctttgaaaatggagcccgccaatcctcataacgctttgctgttctccaacttgggtacgatacaacgtcggcagcaccggtatgagcaggctcttgactcgtatacgctggcattgaacattgctccgcgtgccatacccgccctgatgaatcgtgccgctctttatctagagttgggaaaggatgacttggcccggatagactattctttggtgctggatatagagagcgataatcaggaagccttgctgatgcgtgcctatatctatatgcggcagcgcaactataattttgcaaagtctgattatgaacgtctgctgaaacttgccccccagagttacaatggccgtctggggttggctacactggagcagaaggagggcaaatatgaagcggcgctttcgatattgaatgccatgattgcagaaaaaggaggagaagctacccggctgactacccagcaatatgccgtactttacgtagcacgtgcgggtgtagagcaggatatgaaacatgtggacctggccatgatggacttggaagaagccatcaagctggatgcttcgcagacagaagcctacttgatacgggggcaaatttacctttctcaaaagaaaaaggagttggcaaaacgtgacttcgaaaaggccatttcacttggtgtgccgcaaggcgacctcagggatttgctgttgcagtgtaaataatatttaactgtatttccgtatcagttccacaaactcttttccgtatttcttctttttatattcaccgataccgctgatattaccaaattcttctatggtagtggggcgggaggcgctgagtaggtggagcactttgtcggacagtacgatataggcaggaagtgcttcctggtcggcaaggcgtttgcggagagtgcggagagcttcgaaaagttccccactttctgtattgggcaatcccaatggcaattctttggttggaactgtagccttgcgtttacggcctcttgtagcttgtactgcttcctcgcggcggatggtgacaagcagggcgcgtgctctgccaaacaagacatctgttccgctttgagtaattttcagatggttgttttcattgtaggctatttcgaaatagccgagttgcaacatttgcagcaggtagtcatgccaatctctggcaggtacttcacgcccggctccaaaggtcttaaggcgatggtatcccctttctgtaacttcagaactcatgtttcctcggaggatgtccactaaaataccggttcctatctgttgctcggaacgcgcgattgcactaagtgccttttgtacgattattgtaccatcgaaacgttcggggggatttttgcatacatcacagtttccacagtcgcaggtcgtattttcaccgaaatagcttaacagaatgcggcggcggcagatatctgcttccgcatattgctgcatgcgttgcagtttttccaggttgatgctttgttgtccgctgtccgttgcgaatttagtgagcagaatgaggtcggccagtgaatagaacaaaagggtgtcactgggcattccgtctcgtccggcacgtcctatttcttgatagaaactttcaatgcttttgggcaaattgtaatgaattacccagcgcacattgcttttgtcaattcccattccaaaggcaatggtggcgcataccacttgcacgcgatcattgatgaagtcgtcttgtgcttcatctcttcgtgccgacgacagtccggcatgatagactgctgactttatcccttgtttttgaagcatttgtgccactgtttcagtcttgctgcggctcatgcaataaatgatgccgctctctcccggatggcgggcgatgaagtcgaggatggctttgcttttttccttctgctggtaacctctttttacggtgagactcaggttgggacggtcgaaagatgaaatgaaaattctcggttggttgaggtgtagctgtttaataatatcttcacgggttattttatcggctgtggcagtaagtgcaatgatgggaacctggggaaacagttggtgaaggatgtccatctgtgtatattccggacggaaatcgtgtccccattgtgagatgcagtgagcttcatcaatggcgaaaagggaaatatgcatatcccttaacagatagttggcttccgccaataatttttcaggagaaatatatagcagtttcagcttgccttccatgcatgcacgtcgtagggaagcattctctgtttcatcattattgctgttcagtgcaccggccgcgataccgtttgcacagagcgtttccacttggtccttcatcaaggaaatgagcggagaaaccactaccgccgtgccttcactcaatagggcgggaagttggtagcagatggattttccacctcccgtaggcatcagtaccaatgcgtctttacggtccatcagatggcgtatgatgtcttcttgtaaggggcggaaactgtcgtaaccgaaatatgtcttgagcgtttgtagcataatctggcagtatggatttcttccggcaaaggtacactaattattgcatatactacaaatggaaagtcatcaagattttgtatcatatgagtttctgcaaaaggttaaagtttcttattaatggctgaattgacctacttttcaacctttttcgttgtttatttatcaaaaatatatacgggaaaagttgtgtattaaaaaaaaatgtctgacttttgtaaagtctaaggggctaaccctttggcttttccgattttaaacaaccctaaccagttaattcaatgagtgatttagaaaacaatgcccaggaaaaaggaacgaagaaacgtccttacaacctgcgcgaaaagaaagaaaaggatgctgcctaccgttctttgataaggccggaattggcagatgagttgtatgacaagatattgaatatcgttgttgtacaaaagaagtacagagatgctgattattccgctaaggatttggcgaaagaattgcagaccaatactcgctatttgtctgcagtggtgaattcacgcttcggcatgaactattcttgcctgctgaatgaatatagagtaaaagaagcgcagcatttgttgacagacaaaagatatgctgacaagaatgtagaggagatcagtacgatggtcggctttgcaaaccgtcagtctttttatgctgctttctataaaaatgtaggtgagactcctaatggatatcgtaaaagacacgcagaaaaagaagctaagaagaaataattctgtatgactgaatgaataaaaaggaaatattccggaacagttgtttcgggatacttccttttcttcttttttaataccaatctatatactcccgacacatgaagaaacaactaatttctatggtgactgccctttctctattgacggcttgtggcggaaatccgaaaacaactgctgaggcagaaaaaattgactatacagtggaacaatttgcagatttacagattttacgttaccgcgtaccaggttttgaggatttgtccctcaaacaaaaagaattggtttattatttgacggaagcggctttgcagggcagagacattcttttcgaccagaatggcaagtataacctgacgattcgccggatgctggaagctgtctataccggctataagggagataagaatactcctgatttcaaggctatggaagtgtacctcaagcgggtatggttctctaacggcattcatcatcactatggtagcgaaaagttcgttccgggatttactcccgaattcttcaggcaggctgtacagagtgtggatgcagctacgttgccgcttgccgaaggacagactgtggaacaactgtgcgaggaagtgttccccgttattttcgaccccacggtgatgcccaaacgggtgaaccaagctgccggtgaagatttggttttgacttccgcatgcaattattacgatggcgtgacgcagcaggaggccgaagatttctataatgccttgaagaatccgcaggatgaaactcccgtttcctatggtttgaatagccgtttggtgaaagaggatggcaagattcaggagaaagtatggaaagtggggggcttgtatggacaggcacttgaaaagattgtctactggctgaagaaggcggaaggagttgccgagactcccgagcagaaggcggtgatagccaaactgatggaattctatgaaaccggcgatttgaagacattcgatgaatatgccattttgtgggtgaaggatttgaactcacgcattgactttgtgaacggttttaccgaaagttatggtgacccgctcggcatgaaggcaagctgggaatctctggtgaattttaaagatttggaagctacccagcgtacagagttgataagcggcaatgcacagtggtttgaggaccattcgccggtagacggacaattcaagaaggagaaagtgaaaggggtgtctgccaaggtaatcacggcggctattctggccggtgacttgtatcctgcaactgctatcggcatcaacctgcccaatgccaactggatacgtagccatcatggttcgaaatccgttacaatcggtaacattacagatgcttataataaggcagctcatggcaacgggttcaatgaggagtttgtgtacagtgatgcagagcttcaactgattgataagtacgcagatgtgacagatgaactgcatactgacctgcatgaatgtttgggacatggttccggtaaattgctcccgggtgtggacccggatgcgttgaaggcatatggttctactatcgaagaagcgcgcgccgacttgttcggactctactacgtggccgacccgaagctggtggaactggggcttactccaagtgcggatgcttataaggctcaatactacacctatctgatgaatggtttgatgacacagcttgtacgtatcgagccgggtaacaatgtagaagaagcccatatgcgcaaccgtcagctcatagcccgctgggtgtacgagaaaggtgcggcggagaaggttgtggaattggtaaagaaggatgggaagacgtacgtcgtgataaacgattatgagaaagtgcgtgacttgtttggccggttgcttgccgagatacagcgtatcaagtccaccggtgactatgccggtgcccatgatttggtggaagcctatgccgtgaaagtcgatcccgctttgcatgccgaagtgctggaacgctacaagaagctgaatcttgcgccgtataaggggttcgtcaatcccaagtatgaagtggtgacggatgccgacggtactataacagatgtgacagtgacttatgatgaaggttatgcggaacagatgttgcgttatagcaaagactattctacattgtcttctgtcaataaatgatgaactatgatagatactaaagagcagctgcatcagcggctgaaagatataaagacacagctccgtctctcaatgaacggggctgtgtcccaaagtatgcgtgagaaagggctggtatataagctgaactttggcgtggagttgccccgtatcaagggtattgctgccggttacgagaaggaccactctctggctcaggctttgtggaaagaagatatcagagagtgcaaaatattggcgggacttttacagccggtagagagtttcctgcccgagatagccgatatctgggtggaagatatccgtaatatcgagattgcagaacttacctgcatgaatttattccaacatcttccttatgcgcctgccaagtccttccattggattgcaagcgaggacgaatacacgcaggtttgcggcttcctcaccatagcccgtctattgatgaagaaaggggatatgaacgaacgggttgaaaatgagttcctcgaccaggcaataacggcttttttgtcgggctcctatcatgtacgcaatgcagccatgactgctatccgccgctttatgcagcaaaatgaggaaaattcttttcaagtttgccgcagagtggagggtatggacaattcttcttctgatgtagaacaattactatacaatcttgtaaaagaggaggtttgttagattagttctatggttatagagactgatgcggtaagggaatatttcccttatcgcaatttttatctctttctcgtttgctttccacaaaaaaggattaactttgttggctgtaaaactgcgccgtcaaatggaaagtcagaatgtgaaagatacagttaggcagatattcactgaatatctgaatgcgaacgggcatcggaagactcccgaacgttatgctatacttgacaccatttactccatagacggtcattttgatatcgacacgctctattcactgatggccgaccaggagaacttccgcgtcagccgtgcaacgctttacaataccatcattttgcttataaatgctcgtctggtcatcaagcatcagttcggcaactcttcccaatacgaaaaatcttataatcgcgatacgcaccatcaccagatatgcacccagtgcggaaaggtgaccgagtttcagaacgaggagttgcaacatgccattgagaataccaaactgagccgttttaatcttacgcactattccttatatatgtatgggttgtgcagcaagtgtgaccgggccaataaacggaagaaaaagaataataaccataaaaaagaaaaatgaaagtagacgtattattaggattacaatggggcgacgaaggcaaaggcaaagtcgttgatgtgttaactccgagatacgatgtcgtagctcgtttccagggtggaccgaatgccggacatacactcgagtttgaagggcagaagtatgtgctccgttccattccgtctggaatattccagggagacaaggtgaatatcatcggtaacggagtggtgcttgacccggctctcttcaaagcggaagccgaatcattggaagcgtccggccataacttgaaggaacgcttgcacatttccaagaaagcacacctcattctgccgactcaccgcatactggatgctgcatacgaagcagccaaaggcgatgcaaaggtaggaacgaccggaaaaggcatcggaccgacttacacggataaaatcagccgtaacggtgtgcgtgtaggcgacattctgcatgactttgacaagaagtatgcagcggccaaggcccgtcatgaacaaatcttgaaaggcttgaactatgagtatgacattaccgaaatggagaaggcatggttcgaaggtatcgaatacttgaaacaattccagttggtggatagcgaacacgagatgaacaatctgctggctgccggcaagtctgtattgtgcgaaggtgcgcaggggacaatgctggacattgatttcggttcttatccgtttgtaacgtcttccaatacggtttgtgcaggtgcttgtaccggtctgggtattgctcccaacaagattggtgaggtatatgggattttcaaagcctattgtacgcgcgtaggtgccggtccgttcccgacggaattattcgacaagaccggtgaccagatttgcacactgggtcatgagttcggttctgtgacaggacgtaagcgccgttgtggctggattgacctggtggcattgaaatatgccattatggtagacggggttaccaaactgattatgatgaagagcgatgtgctcgattcttttgaaaccattaaggcttgtgtagcttacaagatggatgaggaagagattgattacttcccgttcgatatcaatgagactgttgaaccggtttatgtagagctacccggttggcagacggatatgaccaagatgcagagtgaagatgagttcccggaagaattcaatgcatatttgtcattcctggaagaacagcttggtgtgcccatcaagattgtttctctgggaccggaccgtgagcagaccatcgaacggtatacagaggaataataaaacaaacagataaccttagacacggattacacggatttcgcggcttcatctgaagaaccgtgggtgtccggataatccgtgccttttttatttattgccatgaaaacacgtcttttgtcttttttactgttgtttcttcttgtgtgctccgcacagtcgcagacttaccagccgacggaggagaacctgaaatcccgtcaggagtttcgggacaatcgcttcggtatcttcctgcattgggggatatacagtatgctggctaccggagaatggaccatgacgaacaagaaccttaattataaggagtatgccaaactggcgggaggtttctatcctgccaaattcgatgctgccagatgggtgtcagccattaaggcgtccggggcaaagtatatctgctttacatcccggcatcacgatggcttttctatgttccacacacgcttttccgattacaatattgtggatgctaccccttttaagcgggatattctgaaagaattggcagacgagtgccacaagcaaggtattcgtctgcatctctactattcgcacatcgactggtatcgcgaggatgctccgtggggacgcaccggacgtggaacgggacgaccgaatccgaagggcgactggaacagctactataaattcatgaacaaccagctgaccgagttgctcaccaattatggaaaaataggtgccatttggtttgatggctggtgggaccaggaccagaatccggattttgactggcaactgcccgggcaatatgccatgatacaccgcctgcaaccggcttgcttggttgggaacaaccatcatcaagcaccgtttgccggcgaggacatccagatattcgagcgcgacctgccgggagagaaccgtgccggtctttccgggcaggatatcagcgccttgccccttgaaacctgcgagacgatgaatggaatgtggggatataagattacggaccaggattataaatccaccaaaacgctgatacattacctggtgaaggctgcgggtaaagatgccaatctgctgatgaatatcggtcctcagccggacggtgagctgcctgctgttgcattggagcgtctggcagaagtaggggaatggatgaaggtatacggtgaaaccatctacggaacccgtggcggctgcattgctccgcatccttggggagtcactacacaaagagaaaataaattatacgtgcatattctcgaattgcaggataaggctctcttcctgccgttggaaggcaagaaagtgaggaaggcagtggggtatgccgaccgtcttccagtgaagttccgtaagtgtgaaggaggggtgatgctctacttgccggaggttccgacggatattgataaagtgatagaggtggagattgaaaaataaattataaatcagaaatctttaattcttcctaaaagataaaggaaacgctggcattgctcaccgtttccttttatttttggcagactatttgttatacaataagaaacgactgatttattcacaatttaaagaaagaaaattatgggaacaggaatgatatggattatttttatcggtattgccgccgttagctggctggtacagatgaatcttcagaacaagttcaagaagtactctaaaatccctaccggcaacggaatgacgggagcggacgttgctttgaagatgctgcacgacaatggcatttacgatgtgaccgtgacgcatactcccggacatctgaccgaccattataatcctgccaataagacagtaaacctgagtgagagtgtttatagcagtaacagcatcatggctgctgccgttgcagcccacgaatgtggtcacgccgtgcagcatgcacgcgcatacgctccgttgacaatgcgcagcaaactggtgccggtagtctcttttgcctcacagtggatgacgtggttgctgctggcaggtatcttgctgctgaactcctttccgcaactgttgctggcgggcattatactgtttgcattgacaactttattcagcttcatcaccttgccggtggaaatcaatgcaagtaagcgtgcgctggtatggcttagcaattccggcattacgaattcatataatcatgcgcaagcggaagatgcactccgctcggctgcctatacttatgtagtggctgctctcggttcgcttgctacgctgatttattatatcatgatattcctgggacgcagagattaaacgcatgatgcagacataaaaaacagaccatctgttcacccgaaacagatggtctgtttgctttaaacagatgatgtgtttctgccggatacatcatctgttttttttattcctgatagggcgactgccagaaccaggcatcgtcattgaccacgtacttggcttggaagaagttttccgcattagggtctgaggggcaaagcagtacatcgtctgcttttatgctatagagattcttggccatatagctgtctaaataatattctttggtaatcttctgttggttgttccagttggcttcttcatttagggtcaccggacgaccgtctcgcaggcgttcgcgcacttcttgtacgcttagcatgatgccgttttcatccatcacccaggcattgttggtggggtctacccatatccatttatccaaggtattggaataaactacgttaatggaatggcattcgccgatgtatttttggggtaatccgctgatgtggcgtgccttaaatcccatggacagataacaatccttcagtacatgggcaagacctccgcaatgcagacctcgcgcaccgcctttgcaagcttctgcccatttgatgatgttgctgcctgccggactttcatggtttccgtcatgttttatggtattgtgtatataagtcagtatgttctttatttttgataattcgtcgcttgcgcctgccacactgtccaacttgaagtattggcgtacctctactaaatacttgttgttgggattgatgtattcgaagcgggggagtgtatcagggcgctcattgtgggtgtatcccggtgctttttgaagtatgtcgaggtagtcacccactttcttcactttggcaagcactgccttgaagcgtttatcgctgcgcaggttgtctaagtcggtatcattcatcatgtggttgtaatcttgaaatccattgtcgtaggccagttctaaatttttgatggcttcaccttttttctttaacaaggattggaagcaggctaaattgtagtaataggactgtataatccagctatactttttctgagtgttctcgtcttgttctttgaacagagttatcaaagccttaccgttcttttcggcttctttatagtttttctcgttaacggcttgttgcagcttttgtgcgatggcttcttctttttgctcgaagtctttggcgttgtcggattgtgcccggctaacaccgatgccacatagcaacaacatgcagaataaaatcagtctctctttcataaatgtgtaagtttaaagtttgttttggtcgtttttatgcgacggtaatgatacaaaggtaaacattctcttttcttaatcaataaaatactgtaactttgtcgcccgatttttaaagtaattgaactgattatggcagcaaaacccagtattccgaaaggaacccgtgacttctcgcccgtagaaatggcgaagcgtaactatatattcaatacgattcgtgaggtgtatcatctctatggttttcagcagatagaaacgccctcgatggaaatgctttctaccttgatggggaagtatggtgaggaaggcgacaagcttttgttcaagatacagaactccggtgattacttttccggactgacagatgaagaactgttgagccgtaatgctccgagacttgcctgcaagttttgcgagaaaggtttgcgctatgacctcacagtaccttttgcccgctacgtggtgatgcaccgcgatgaaataacttttcctttcaaacgttatcagatacagcccgtgtggcgcgccgaccgtccgcaaaaaggacgctatcgtgagttctatcagtgcgatgccgatgtggtaggcagtgattccttgctgaatgaggtggagctgatgcaaattgtcgatacggtatttacccgcttcggcatccgtgtttgtatcaagattaacaaccgtaaggtattgagtggcattgccgaaatcatcggtgagtctgacaagattgttgatattactgtggccattgataagttggataagataggtctggacaatgtcaatgccgagttgaaagagaaaggcatcagtgacgaggctatcgccaaactgcaacctatcattttgttgagcggaagtaatgaagagaaacttgcaactctgaaggaagttcttgctgtcagcgagaccggactgaagggcgtggaggaaagtgaatttatcctttccaccttaaagaaccttggcttgaagaacgaaatcgagctggatttgacattggcccgtggcttgaattactataccggtgccatcttcgaagtaaaggcgctggatgtgcaaatcggcagtattactggtggaggacgctatgacaacttgacgggtgtattcggtatgtccggtgtcagtggtgtcggtatctcgttcggtgcagaccgtatctttgatgtgctgaaccagcttgacctttatccgaaagaagcggtgaacggtactcagttactgtttatcaactttggtgagaaagaggccgcattctcaatgaatgtattgactgaagtgcgtgcggcaggcatccgtgccgagattttccccgatgcaagcaagatgaagaaacagatggggtatgcgaactccaaaggcatcccgtttgtggccctggtgggtgagaatgaaatgaatgaaggtaaggtaacattgaaaaacatggagaccggagagcagaaaatggtcactccccaagagctggttagcgaactgaaataataaaaactgaaatacatttaaaaaggagcacaaagttgctcctttttttgtatatttatggcacaaatataggtatttgtaatagtggcgtaggagaaatgaaacatcctgcatttatctttgtactgacaaaaaaggaggttcttatggtttctgttgagcttaagcaagaaaaacacaatgccctcgtcagtttcctgatgattgtcatagcggcattgttcctgctctatatgggcagttcattggtacattctacaaaagcgttctgggaaaattattccatagaagagctgctggaatagaaggaattcaagtcaaatcactacctttgtcggcaaaacatattgccgatgatactttattttaccgcaaccggaaactcacgctggattgcagaattgcttgcagaggctatgcatgatactgccgtcagcattgttgattgccttaagcaaggctcgatacccgcagggctgtcgacagctgacagactaggtattgtttttccggtacactcatggtatgcaccccgtgtcttgattgattttttgtcgcagctccggttgccggactgctgttaccgttatgccgtgtgtacatgcggggacgatatgggaaagggaatgaaccgcctggcggaacattttccgttggatgctgcctggtctgttgcaatgcccaatacctacgtaccgatgttcaatttggacgatggggcgctttgccgtaagaagatagagaacgcacggcatgctgtcgcttcgattgccgaagatgtcattgcacggaagagggtctggaatgtgcatgagggcagtgctgcctggctgaaaacgtatgtcgtgaatcctttgtttgtccgttttgtcattggtacaaggagtttccatgtagatgaaggctgtatctcttgcggaatatgcggcaaatcttgtccggtaggtaatatccggttggtggatgggcatccggtgtggggaaagcagtgcattcattgtatggcttgtttgcatttttgcccccggaaagtgatacagtatggaaaagcgacacagaagaaggggagataccggttggaagattatctttgccgcttcaccactcccacataaatcagcggaataacattcattaccagtgcgtagataatggcaggtattgcaataatgtcattgttgaatacaaacggactactggcaacagcaattgcttgtgcggcattctgcataccgatttctataatgagtgtacgttgttctttccggttgaggcgcatggacttcgatagcactacgccgcctcccatagccagcaggataagaatggagatgcagagccccagtttgccgaattggccggtgatggtagcatggtgctgtatgaagaagatggttgccagcaggataagtgcgggaaaggctgtcttggacaatatcttatgaatcctttctgccatttgcggacggtagcgcttcgtgaatatgccggctacaatgggaagaagcatcagaaccaggttctgcatgataaggctgcctacggggagatggatatctatgtccagattgctgtctacaaagtgtgtggcgaattccataatcacggggatagtgaacagcgtaataatgctgctgcatgccgtcagtgacacggacaatgctacgtctcctttggctatcatggagaagatgttggatgagctgccgcctggcgagcaggctatgagtatgatgccgataaagaacagaggttcgagctggaagacatgtcctaaagcaaatgccagcatcggcagtaggatgatttggcctgccagcccggcaataatggggcgggggcgtttgcggaacagtttaaagtcttcggtttgtaatgtcagtcccagttcaaacatcaataaggtaagaatggggaggactatccatattgcgttcataagtcaaatcatttttgaggctgcaaagatagcaaatattgttgtatactttgccattttgtcagcctttgtctgccaaacaatcagcttgttcgtttggcacggttttcgtaagttgtttatcgcttgtttaaagcaaaattaccattataacaaatgtataacatataaaacaaaaagattatgaacattaaaccattagcagacagagtgctgatactccctgcacctgcagaagaaaagacaattggcggtatcattattcctgatacagcgaaagagaaacctttgaaaggtgaagttattgcagtaggcaacggaacaaaagacgaagaaatggtgttgaaggttggtgacacagtgctgtatggcaagtatgccggtactgaactggaagttgaaggaaccaagtacctcatcatgcgtcaaagcgatgtgctcgctgttttaggttaatttgtaaattgtaaatcgttaaaatgtaaatatagttatggcaaaagaaatattattcaatatcgatgcccgcgaccaattgaagaaaggtatcgacacactggcaaatgcagtaaaagtaaccctcggccctaaaggtcgtaacgttatcatcgaaaagaaattcggtgctccccacatcacgaaagatggtgtaacggtagctaaagaagtagagttggcagacgcatatcagaatactggcgcacaactggtaaaggaagttgcttccaagaccggcgacgatgcaggtgacggtactacaactgctactgttttggctcaggctatcgtagccgaaggtctgaagaacgtgactgccggtgctagcccgatggatatcaaacgcggtatcgacaaggctgttgccaaagtggttgattctatcaaaggccaggcggaaacagtgggtgacaactatgacaagattgagcaagttgcttccgtttctgccaacaacgaccccgttatcggcaagctgattgcagacgctatgcgcaaagtttccaaagacggtgttatcactatcgaagaggcaaagggtactgatactactatcggtgtggttgaaggtatgcagttcgaccgtggttacctctctgcttacttcgttaccaatacggagaagatggagtgcgaaatggaaaaaccgtacatcctgatttatgataagaagatttccaacctgaaagatttcctgcctatcctcgaaccggcagtacagaccggtcgtcctttgctggttattgcagaagatgtggatagcgaagcgctgacaactttggttgtaaaccgtctgcgttctcagttgaagatttgtgcagtgaaggctccgggcttcggtgaccgtcgcaaggaaatgttggaggatattgcagtgctgaccggtggtgttgtcatcagcgaggaaaaaggtctgaagctggaacaagctactatcgaaatgctgggtactgccgacaaggtaactgtttccaaggataacacgaccatcgtaaacggtgccggtgacaaagagaacatcaaggaacgttgcgaacaaatcaaggctcagattgttgctacgaagtctgattatgataaggaaaaactgcaggaacgtctggccaagttgtctggcggtgtagctgttctttatgtgggtgctgcttctgaggttgaaatgaaggaaaagaaagaccgtgtggacgatgcactccgtgctacccgtgctgctatcgaagaaggtatcgttcctggtggtggtgtagcctatattcgcgcattggatgcattggaaggcttcaagggtgacaatgtggacgaaaccacaggtatcgacatcatcaagcgtgctatcgaagaaccgttgcgtcagattgttgccaacgccggtaaagaaggtgctgttgttgtgcagaaagtacgcgaaggcaaggcagacttcggttacaatgcccgtaccgatgtttatgagaacctgcatgcagccggtgtggtagatcctgccaaggttactcgtgtggctcttgaaaatgccgcttctattgccggtatgttcctgactacagaatgtgtaatcgtagagaagaaagaagataagcctgagatgccgatgggggctcccggaatgggaggcatgggcggaatgatgtaagatcgttttccctgattgcttaatcaaataggagaaccgcagtgtctttttgatagatactgcggtttttttgttctatttaccttcttgattattaataaaaagcgtgtaatattacaaaagtgttacaaaaatgattagttttcatatcttttgttcgtttttgttgttagtaaaataaaaaatcatatctttacccttcgtaaagataacctaatcaacaagaactattaacctttttaattgaagagaaaatgaacaaaagcgaaattggactaaatgctgggaaagtttggcagttgcttagcgattataccagatggagctacggttctttaaagaggaagtccggactgaaggacaaggagttgggagccgcattggggtggcttgcccgtgaggacaagattgaaattcatcaggaagaagatgaactttatgtttcactaggggtaaatgtttatatcggataaaggaaaccgattgaatggattgattgaggagcacagatttcgcagtgcggaagcattttctgccgaggggatgaaatctgtgctcctttgttttttcatgttgcagaatattctttcctttgcacattcttttcaatgaacaaaaacagaatgactatgagaagttttgcttcagacaataattcaggcgtacatccgctggtaatggaggcactgaaccgggccaacagtgaccatgctgtaggttatggagatgacccttggacagaggaggctgtctgtaaaataagagaagcgtttacgccggattgtgaaccgttgttcgtattcaacggtacgggcagtaatgcggtggctttgcagctgtgtacccgcccttataattccattatttgtgcagagactgcacatatctatgtcgatgagtgcggtgcgcctgcccgtatgacaggttgtcagattcgtcctatagctacccctgacggcaagctgacgcccgatttagtccgtccttatttgtgccatttcggcgaacagcatcattcgcagcccggagccatctatatttcgcaatgttcggagctgggcactgtctataagccggacgagttgcgggctttgacggatttggcccatcggcatggcatgtatgtccatatggacggagcccgtctggcaaatgcttgtgcagccttgaatcttggctttagggaactgacagtggattgcgggatagatatcctcagcttcggtggtacgaaaaatggactgatgttgggagaaagcgtggttgtctttaacccagctttgaagaaggaagcttattttgtgcgcaagcagtcggcacagctcgcatccaagctccgctatctgtcctgccagtttactgcctatctgacggacagcctttggttgaaaaatgccgcgcatgccaatcgtatggcaaagattctttacgacggattgaaggaattgccaggtgcgcattttacgcagaaggtggaaagtaaccagcttttccttacgatgccccgtccggtgattgacgagctgttgaaggactatttcttctacttctgggatgaggccatccacgaaatccgttttgtaacctcttttgatactacggaagaagatatcgagcaattgctgcaatcggtaaaaaggcttctctgaaatatataaaagctcctaaccttcacaggctgggagcttacttcgaaactttcccctcttgggggtaggggaaggtttactgaaaacaaaccgattgaatatttaccttaaatacctttgcacgataacctttttaactaaccttttcaataaatctttgttagagtatgcttatataccgacagcctcgcggaccggtacaaaagtgtagccttttcgtttcagcgtcttaatcatcttgtccagatagccattatagaacttgtctgtgcggcggtcgtccgttccgaagtgtatcagcattaggtgtccgttcagaccttctttcttttccacctccataatcttgtcgtagatgaatttgctgctccggtacttctgtcccatgtccggagtggtgtagtcggcattgctcatggtaccaggggtatagttgatgacttgaatacccatattctttgcccaggcggatatttccttgttatagtattcgtaaggaggaatatagacgggagcgtctttgtattcgatacttgccttgcggagggtctcgtagcttttcatcatatcgttctcaaactcttcgcgggtgaccagcagagaatcacggtcttcccaaggcatgtacaacagatgtccgtaactgtggctgcctacaaaatgcccttcgtcgagcaggcgtttcactacatcgggataaagttcatagaactctccggtaaagaagaagccacctttgatgccatgcttcttcaaggtactgatgatggcatcggcaccgtctgctttgtcggcggcagtgaatacgagggtgatttgcttttttgagggatcggtgcggataatgcctccgtccacatatacattcttgtcatttgggataccggcttgcttcattccatccttctgcatggcagagaggtagtacgtgaggcaggcggttccatccatggtaggctcattggtggaatagtcgtggatggcgtcgtgatataccatcaggtctggctggaagcgttcgtagtcttgtccgggagttccgggaattcccgtcatattgacaccacgcaggctttcgaagatggtacgatagacaggaccgtccaccagtccgccagtagtattgcccacgcctgcattcagcagtgaggagtggggttgcgagggatagtctccgtaaaggggaagttccacaatcatgctggttccccaagggttacagccgaacagccagtcgcgcagggaggcttccatttcggcgtatgtgtcatcgccggtggtttcacggtacagccggcattgggttagcatggcggtagtcagattgttggaacaccagatgtagggtataccgtgcaggaaggggctttctaccgctttctcgtacgtgcgttcgatgcccgtacgcatgttgcggatgaattccttgctgatgcggctgttgtccactttggcaagatggtagtggcccatgttcatgaacggataccattggtagtggcgtgcactgtcggcgcccatccagggagtcaccggttcgcgacgtccgtattcaagggcttgggccaggtatttgttgtcgccggtggctctgtacagctccatggctcccagttccatatcgtccacccagttgtcctcttcgtaaatgtagggagacaagacagaggcagtctggcatgctcccggtttctttacgccttcctgataggcggcatcggccttggcttcgatttctgctgcaaattcaggatagtagtctttcagtatcttggcgcctaaagcgaagcaggaggcaaacttgccggcagtgcttgccactccggtcgttgcattcttgaactctccacgtacttgcggttcgccactgcaaaagtaaacggggcgtcctttacccggtccgtagccgtaatccaccaggtctttgttaggtaggcgcattccggcatggtcacggtcgtcggctatctggttgtacagctcgcccggagcaggattcatccggttcagccagtccagtccccacttgatttcgtccacgatgtcgggaatgccgttggctcccggatgtccggctgcatcataggcgtcaccgaatgattccggattttcctgataggcaaacatcatctggtagatggcattggcggaggtggtggtgtattgcagatagtccgtagcatcgtgccagcctccgcggacgtctatatgttgtccggttttggtgggatgatagacgatgtagccgtcgtgcacgtggcagctgtctttcaggaacggattatagccgcagcgttgctgccgcatgtagtgcagcatgtagtctgcagtaccgttgtagacttgtgcattgatggggaaacggggggagaccgctttgcctgctttcagataatacgtgcccggttctgtgaaatcactgaagttcaaccggtaggtactcttcatgcctcccatcttgccggtggccttggttgtgttgaaggtacgcaccacctttccggtgaaagcgtcaatcaatgaataattttctacgtttgttccttcctcgctcatgaatacagcgactttgacggattgcggcaaatagccgagttggttgattctgatccattcgcctgctttgcccggcagggctacgagagcgaatattaccgttaggagccaataattacttttcataatgggggtttttaatctaaggttggggattatatataaaacaaattttccttattacaaataaagcattttctgtcaattttaggaagatttaggatgaataattagacgatattaggtgtcgtttacactattttggtattttatagacgtgaaataagtgtttgattgaaactaaatgtttgtttatcacgtaattattatacttgatgatgctttttaattttcgtttacctattttaataatgcgtaaaacaaattggcgtgttatttgttttatggtatttagacaataaaactaatagactatggcttatattgattactatcaggtccttggagtggacaaaaaggcatctcaggatgacatcaagagagcgttccgcaagctggcgcgcaagtaccatcctgacttgaatccgaacgatgctacggccaaggataagtttcaggctatcaacgaggcgaatgaggtgctgagtgatcctgaaaaaagaaagaaatatgatgaatatggtgaacactggaaacatgccgacgagtttgaagcgcagaagcgggcacagcagcaagccgggggcttcgggggatttggcggtgccggttttggaggttccggtgcgggatttggtacggacggaggcggtacgtattggtattcttccgacggccaggaattttcgggcagtaatgccggtggtttctcagacttcttcgaacagatgttcggtcatcgtacgcgcggcggaggcggtgccaatgccggtttccgcgggcaggattatcatgcggatttgaacctctcgcttcgtgaggctgcgaagacccataaacagatattgacggtgaatggcaagcaagtgcgtattaccattccggccggtgtggccaacggacaggtcatcaaactgaaaggctatggtggcgagggcatcaacggaggtcctgcaggtgacttatacatcacgtttgtgattccggacgactcggtattcaagcgtttgggagatgatttgtatgtggatgtgaccgtcgacctttatacagccctgctgggtggcgaccagttggtggatactttggatggtcaggtgaagctgaaggtgaaacccgaaactcagaacgggactaaggtacgtctgaagggtaagggcttccccgtatataagaaggagggacagtttggcgatctcatcgtgacttattccgtgaagttgccgacaaacctgacggaacagcagaaagagatgttccgtaaaattcagagtatgaactaatgaaaggagaacggattatgcagaacgaatggattgtcatcagcgaatattgtgacaagtgtcatatagagcccacttttattgatatgctgtgcgaaagtggactgatagatgtggagcaggaaggtggagagcgttatctgcctttctccgagttgccggatgtggaacggtacagccgtatgtactacgacctttccatcaatatggaagggattgatgccatccaccatctgctggcaaggatggaagagatgcagcgggagatacactcgctgcgcggcaggctgaggctgcacggagagtattaattttcctttcgtctctttgagaacttttgtccttttaagaaggggcaagcaggaggaagtatttcagaaaaaacaagcgggcaccggagtagctaaactccggtgcccgctatatttgccttgtccaagcaatgcgtttatttgcggtagctttccagctcttctgccttgaacttacggatgaagttaaagtgtttttccacttcagcttctgcgtagttcacatacaccagagccgacttgccgaacagttcgggagcctttgtcgcgtcctgaatgatgaggtgcgacatgatacataccgcagccatctcatagaggcgacgtgccacgaagtccagcaattcctgattctgtgcctctttcaccgcattggtgcaggcttcgaacttgttggtcatctctttgatgcggtccatcaacggttgcatttcttcgctgcacggcacttgctcgtagtcgcgcaaggtggcagagtatgagccgtttgttacatagcggatagcagctacggtctgcaactgagtagtaccttcgtagatagaagtgatacgtgcatcacgatagatacgttggcaagcatactccagcatgaagcccgaaccgccgtgaatctggatgctgtcgtaagcattctgattggcatattcagagttcataccttttgccagcggagtgaaggcgtcggcaagtttggcatacttcttttgttcctggcgttcttccggagtcagtttgcgttcgcgagcaatgtcgtccagcgctttgtagatgtcaacgtagcgggaagtctggtacagcaaggagcgtcctgcatccaacttggctttcataatagccagcatgtcatatacagccgggaattcgatgatagccttgccgaactgcttgcggtctttggcataagccagaccttcgttgtaggcagcttgtgaaaggcctaccgactgtgcggcaatacccagacgggcaccgttcatcaaagccataacgtatttaatcaaaccaagcttgcggtcgccgcaaagttctgcctttgcattcttgtaaaccagctcgcaggtgggagaaccgtggatacccagcttgttctcaatgcggcgcacgtctacaccgccttcattcttatcgtagatgaacatggacaagccacgtccgtctttggtaccctcttctgaacgtgccagtacgaggtggagattggcgtcaccgttagtaataaaacgcttcacgccgttcaggcgccagcagttgttggcctcgtcataggtcgctttcagcattacgctctgcaagtcggaaccggcatccggttctgtcaggtccatagacatggtctctccggcgcagacacgcggtataaaacggctgtgctggtcttcgttaccgaattcgtagagcgtttcgatacagtcttgcagtgaccagatgttaccgaaaccggcatcggcggcggcaacgatttccgcacacatggtgtacggagtaatcgggaagttcaagccaccgaaacggcgcggcatggtcataccgttcaatccggcttttaccatggcgtcgaggttctgcttggtgccgctggcatattccacacggccgttggcacagtggggaccttcttcgtccacgccctcggcattgggagcgataatctctccggtaatctctccggtgatttcaagtaccttgtcaaaagagtccatagcatccgcatagtcttgcggggcatagtcatacttgtctttgtcttggtaaccgcgttctttcagttcgcagatacgttccatcatcgagttgttcagatgatacttcaattcgggaacttcggtataaaaatttgccataatttcttggttatttaggtattctgaagtataggggcattgtgaatttcactcgcttggcctctccgtcctgatagccgggcgaccagcggtagacgtcggcaatggcctcgaaagcacgtatggcttctttatcgatgtcatagcgcacggactggaggatttttggataggtcatcttgccttcttcgtctacaacgaactgcaggattacccttccttctgccttttgcttccaggcgtcttccggatatttggtaacattggccaccagtttcatgaggttctctattcctccggggaaggatggaaatacgaaatacggctgatgtgccatttcagttccgtgcttgtcgaacatctttccatcggtgcactgattctctgaatagtgttcctttctacgaagtttcccatcgggatagtattgcaggagtgttccgtcaagtttcccatcactgtagctccgggccagatgtatggcaccgtcgggataatacaccatggtctgtccctccaggcggttgtctctatatacttctgtcaggctgtccttgccatttgcatagaatgatgtatgcaggccttcccttatccttttgcggggattgcttttgtattcggagaaatgccagacatccttcttttgtccttccaaagcatactcttccaccttgatgcacttcttgtttatcttggaaacaagagcatacctgactgcctggatggagtcgtccgtccattggtaattcttgtccaaccagagcttttcttgagctatagcggaagatatacctgaaagaagaacaaatataagaatcagccctttcatgattacctttattgttatttactgtgtgatttataatattttatcatcttcgggataacctcttccaccgtaccgttgatgacatagtcggcaatcgtattgatgggagcgttctcgtcattgttgatggagatgataataccactttcctgcataccggcaatgtgctggatttgtccgctgatgccgcaagcaatatacagtttggggcggacagtgacaccggtctggccaatctggcggtcatggtcggcataaccggcatcgacggcagcacggctggcgcctacctcagcatggagttctttggcaagctcgaacaacatgtcaaaaccttccttgcttcccatgccgtagcctccggcaatcacgatgggagcgcctttcaggttatgttttgccttttctacgtggcggtcgatgacttttaccacatagtccgtctcgggcacgtacttggcaacgtcgtggttgatgacttcgcccttatagtcggcgtccagaatctctttcttcatcacaccttcgcgaacggttgccatctgcggacggtgctcgggattcacaatcgtggcaacgatgttaccgccgaatgcgggacggatttgatacagcaggttctcgtaaaccttgccttccttcttgtcttcgtggttgccgatttccagtgaggtacagtcggcagtcagtccgctggtcaaagcggaagaaacgcgcggaccgaggtcgcgaccgataacggtggcgcccatcaggcagatttgcggcttttcttctttgaacaaattgatgaggatagaggagtggggaagggaagtataggggaacaagcccggagcgtcgaatacgtggagtttgtctactccgaagggcaatacctgcttttcaatgcctaccagattattgccggcagcaactgcctccagttgacagcccaactgattggctaatttacgacctttggtcaagagttcgagactgacgtcggcaactgttgtgccttctatctctaaatatacaaatacattattcataatcttatcctatcgtatggttagctaacagttcaacaatcaaatcttctacatcctggtcgctgcccgtcagcgtcttgctttctttggcctggaatgaaatgttctgaatggtcttcacctttgtgggcgagccgctcagaccgcattgtgcaaggtcgccgttcacgtcggcaacgctccattccgtgatgttcagatagggatatttctcgtagaggtcggcgtaggcaagcccagcgccttccttggtgatggcagctttttcctgggcaccgagggcgcgtttgtacttctgcaccagtttggcattgcgcgggcggcagggagcggcacttccgtttacggtgatgactatgggcaggggagcctcaacggtttccacacccccgtcgatatgacgtttcacggtaattttcttggcggctttgtccacgttcagaatctcttctgcgtaggtcacttgcgtcagccccagcttttcggcaacctgcgggcctacttgggcggtatcgccgtcgatggcctggcgtccgccgatgatgacgtcatagtcgcctatcttcttgatggctgtggcaagggcatacgaagtggcaagcgtatcggcacctgcaaaggcgcggtcggtcagcagatagccgttgtcggcaccacggtaaagtccttcacgaataacttcggctgcacgtcccggtcccatggtcaggatggtaacggtggagcccggatgttcatctttcagtcggagagcctgctcaagagcgttcaggtcttcggggttgaagatggcagggagtgccgcgcggttgatggttccgtcggctttcatggcatctttcccaacattgcgtgtgtcgggaacttgttttgccaatacaacaattttcaaactcatgctattaattattagtattagtatttctttgtatgtcagtgccgggaataggagtagtagaatcctgctactgaaattggccggttaactcattatcagcctgcaaatttacggaaagagttgggtttgacaagaaaatggggtgaaaaatgcacaagttgagggattttgcgcaaatatcagttggctctatatctgtaaaaaaggtaataaaaccggtaatttatctacctttccgttcctgtttcctctgtacttttgcagcgtccggatgaggcctgcacgacgggcggcatcggataaacaagcatcgctacttaaatgttattatagaatatgtatattgaaaaagtaaattcccctgctgacgtgaaaaagttatcagtcagcgagatgaacggattaggtggagaaatccgccaggtgttgttaaacaagttaagctctcacggaggacacgtaggtcccaacctgggaatggtagaagccaccatagccctgcattacgtgttcgattcaccaacggacaagatagtctatgacgtgtctcaccaaagttatacccataagatattgacaggccgccgggcagcgtttatgaatgcggacgagtatgacgaagtctccggatattccgaaccgtcggaaagtgagcatgactttttcgttatcgggcatacctctacctccgtcagtctggcaagcggacttgccaaggcgcgtgacctgaagggggaggcgggtaatgtgattgccgtcatcggcgatggctcgttgagtggaggtgaagccttcgaaggattgaatgtaggtgccgaactgggcacgaacttcatcgtcattgtcaacgataaccagatgtccattgccgagaatcatggcgggctataccgcaatctgcaacagttacgcgaaacggaggggcaggctccctgcaactattttaaggcaatgggatatgattatctctatgtgaaggatggcaatgacgtggagcaattgatagaggctttccgtgaagtgaaggacaagaagcatccggttgtggtacatatcaataccttgaaaggtaagggatacaaattggcagaagagcaaaaagaacgtttccattacagtgttccgttcgaccttgaaaccggcaatctgaccggtgagtctggagagggtgaagactatgccgaccttaccgccggttatttgttgcaggagatgaagaaagacccgactgtggtgggcatcaccgcaggtacacctacggtatttggctttacaccggagcgccgcaaggaggcagggcggcagttcatcgatatgggcattgccgaagagcaggctgttgccatggcttctgccattgctgccggaggtggaaaaccggtattcggggtctacagcacctttatccagcgcgcctacgaccagttgtcccaggatctttgtatcaacaataatcctgcactgattcttgtcttctggggaagcttatcgagtatgaatgatgttacccatctttgtctttttgatattccggtcatcggtaatattccgaatatggtttatctggcacctacttgtcgtgaggagtatatggcaatgctggagtggggcatccgtcaaacggaacatccggttgccattcgcgtgccggccaatggggttgtccgcaggaatgtagaaccggagaaggattacggcaagacgctgaaccgttatgaggtgtcccatcgtggagagaaggtcgccatattgggactgggctctttctatcagttgggcgaagccgtggctgcccggttgaaggaagagaaaggagtggatgccacgcttgtcaatcctcgctacatcacgggtgtggacgaggctttgctcgatgacctgaagcgcgaccatacactggtcattactcttgaggacggagtgctggacggtggctttggcgagaagattgcccgttattacggtccgtcggatatgaaggtactgaactatggtgtgaagaaagagtttatcgaccgttacgatgtggaggagcagttgaagaagaaccggttgacggttccgcagattgtggaagatatctgtaggatttggtaagaattgaaaaaggagatgcatcaaactgcatctccttcttttatttatttaatacccagtttcttggcaatctccttaggcagtgcatccttgtgcacaatgatgttcattgttttatagcgcacgaaagctttggaagcataccacagtcctttgtactttccggcttcaccccaagagttctttaccatatagtattcgttgccttcctggtctttggctataccgtaaatcagcataccgtggtcgtcagtagtttcccagttgtcgtatgccagctggcgctcttcttgtgtgcaccacttctgcggttgaggcttgctgttcagtttcttttcttcgggtttcattttcagccagtgtgccatgtccgaaccgctcagttcttgcaccttttctgcatcgggcattacggctataccgtcgcgtgtgaagccttgttcgcttacgtcactaccccatgcaatggtgtaacccttattgatagcgttgtcaaacacttccatcaactcgtcgataggcaagttgtaggaagaagcccaacgccagttgtcttgtatttccaggacgaacggctggtagaagggatggtgggtataggaagtcagtgagatatagtcatctgcattcagtccggtagattcatagaaagacttcggagtatattccttgcctttgtaggtgaacttctcgggacgttcgcccagatagatgtcgtggatggcagtgatggccttcttccaaagcgggttattttccttgtctgcttgcaggctgcggtgtcttcccttggcaatggctgccactacggcatcagatacggctgtcaattcggtgtggttgctcagcgtgtcgccatacataacgcccggacgcatttcctcttcgggcaccagaccgaaagttttcataccataaattacatcgtagaacgaaccgccttgtgagaacgaaacgtcaccatgtgtacgcactgccttgtcggcacggtccagataggtgttgtgtacgataaacatttcagaaaagtcgtattcgcctttgcccatgcggagcagttcggattcgatgaatgccagtccggaatagcaccagcatgtaccggcacggttttggttcttaacagaagtgataggattttcttttacggttgtaaaaatgaaaccttcctctttcggagtgtcttgtgctattgtgtttaaacttaataaacccaatgcagccatcagtattgatttcttcatcataattaaaatgttatagatttatagttgcaactgcaaatataggcagaatatcgtaaacaaaagctatctttgaagcgttaattctgacacttatggagaaaataatacgtatcgacgaccatagcggtcttgttttggagggcggcggtatgcgcggcgtcttcacttgcggtgtgctcgacagctttatggatcgtggcattcgctttccctataccatcggtgtcagtgccggagcctgcaacggactttcttatatgtccggtcagcgcgggcgtgccaagtacagcaatatcgacttgctggaaaaatacaattacatcggattgaagtatctgttgaagaagcggaatatcatggatttcgacttgttgttccaggagtttccggaacacatacttccctacgactacgaggcatactttcattgtcccgaacgttatgtgatggtaactaccaactgcgagacgggcgaagcgaactattttgaggagaagcggagtaaagagcgcgtcattgatattgtgcgtgcttcgagcagtctgccgtttgtctgtcccattacctacgtggacaacatcccgatgctggatggaggtattgtggacagtatccctttgatgcgtgcccgtcaggatggatttaccaataatgtggtggtgttgacgcgcaatcatgggtaccgtaaggaaattcagggaacgaaggttccaccttttatatataagaaatatccgctattgcgtgaagccatcaaccgccgcagtattgtctataatcaacagttggagcaggtggaacggatggaagccgccggggaaatcgttgtgatccgtccacagaagccggtagtggtagaccgcatcgagcgtgacatcaagaagctgacggagctttatgaagaaggataccggtgtgcggaacattttgcttttcgtttttgattctgagagagtatactatgagagctggtgcaattagcatctgctcccatattgttttcattcttttctattaatttgctgctaaagctaaagtttatttagcaaaaaacacgcgtagaatacctttagaaaggggatgtatcaaaaataccacctttcgtaacatttgttataggtgcaaatcctggtttcgcttaattttgctgacacaaaactcaattgcagaattggtttattattaactttaaattaatagatatgttgaaaagcattagtctcaggctttgcacactaattgtgcttctctttgcgggcatctattcctttgcccagcaagtccaggtaaaaggtactgtcgttgaaaaatcgagtggtgaatccattatcggtgcttctgtcatggaagtaggttccaacagtaatggaacaattacggatattgacggaaatttcactctgtctgtagcttccggtgccacattgtctgtatcctatataggatataaagccgttacagtaaaggcacagcccactttacgcattgagttgacggaagattcccagttgattgatgaagtagtagtgaccggctatatgtccgagaagaaggccagtttgactggttcggtggctgtggtcaagatgaaggatgtagcagatattcctacgggaaatgtgttgtcgagcttgcagggacgtgttgccggtatgaacattacgactgacggcacaccgggcggtggaaatacttctacattggtccgtggtaagtcatctttccgaaatgatgccaattccccgctttatgtcattgacggtgtgatgacccgtgagaacatctcgtctatcctttcttccaatgatgtagaatccattcaggtattgaaggatgccgcttccgcttctatttatggtgcacaggctgccaatggtgtgattatcattactaccaaacgtgccaagaaaggggagacccgtgtggattttgatatgtcgttgactttgcagacctatcaatgtggctttgatatgttgaatgcagatgagtggggccaggtttattggtcggcttataagtatgccaataatggagctacgccaagcagcgaaatatatggtaatggtgcaactccccaacttcaagactatatcggcctgaatggagctaaagtacatgccgttgatacggattggcgcgatgtggtttatcgcactgccttgatgcagaattatagtgcgacactttcaaagggctctgacaatggtgccttctcgttagcgttgaactatctcgaccatgacggtctggtagagaatacgaatttccagcgtatcaatacccgcatcagttctaactatcattatcttgacaatcgcttgcgcatcggcgagaacgttgccatcaatcgttggacacagaccctcagtccggccggtgtagatgagaatgccatcaaacagcatcctgccaagacggtttatgatgagaatggcaattataacgatgccatcaatgatgttttgggtgatgcccccaatatggcacgtttgttggagaatgaaaaacagaacaaacatgattactggcgtgtctttggtaatgcattccttgaaattgaaccgattaagaacctggtgctgaaaaccaatttcggtatgaattattatgatgaaaccaacaaaacttttgagccggcatgggcacgcgatgaggtcaataagctgactcaatcatccaacaaaagactggattgggtatggaccaataccgtgacttatagcaaagcttttggaaagaacaatctgactgcacttcttggtacagaagccaagaagaaccattcggaatccatgttcggttatggtacgggactggctgtagaagatgaagattatatttatctcgacggtgtgactgccggtaagaatgtaggtgccggtgcttccaattatggcatggtgtcttactttggtaaagtgaactatgattatgaaggacggtatttggcctctgttacggtgcgccgtgatgcttcttcccgcttggcaaagggtaataatgtggattacttcccttcagtgtcggcaggctggcgcatttcaagtgagaagtttatggaagcgaccagggattggttggctgatttgaaactacgtgcttcatggggtgtcaatggtaacgatattattgataatgaggctccctatacaaaatacttgattagtctgaaggatgcaagctacaacatgaacggtgatggaacgactttggctcccggtggttacaaagtgaggtctaccaatcccgatttgaagtgggagagtacaagacagctcaatatcggtgtggacgccgctttcctgaacggacgtctgagtgcttctctcgattattttgataagaagacaagtgatatgcttgtggagaaaccgtatatcgctgtcattggcgagggtggttactgctggtataatggtggtacgatgaacaataaaggtttcgagatggcactgacctggaatgataaggtaaaggatttccagtataatgtagcattcaacctttcatattacaaaaatgaagtgacagagctgacggaagaaatttactatacttatggtggcggtaatggggttgacaagactttggttggccaaccgttcggttcatggatgggcttcaagacagatggagtgttccgtacccagcaggaggtggatgagtataaatccaaatataatgtacagtttggcgctcccggagtaggacgtatcaaatacgtggatgctgatggtaacggtacgattgatacgaacgaccgtgtatggttgggttctgacaatccgaaagtgattgcaggtctgaatcttggggcatcttggaaaggctttgacctcagcatgttcttcaacggtatgattcgtgatgcctataacaactccaaatattatacggatttattccaatgctggaccggtaatcactctacccgcctgctcgatgccatgcatgcttacgagaactttgaaaagacgggtgtttacaatagcagtgtacctgctttaaccacccttaacagcaacaatgagcacgaagtttctgagttctatattgaaaatggttcgtatatcaagctgaaaagcctgacattgggttatacgcttcctaaagcagctctcgacaagatgaagatgcgtcatgcgcgcatttatttccaggctcagaatttgtttacgattaccggttatacgggtgccgaccctgaaggtctgggctatccttatccgttgccccgtacgttctctttgggattatcatttggtttctaaactttaaaactatactattatgaaattgaaacatttatatatgcttggcgcagtagcgctgatgactgcaagctgtaatgaagaccgtttcctggatttgaagccccagggtagcttgaacgaagatattatgacttctacagaaggtgccgaccttttagtgaatgccgcgtatgcagctttgggtggtcccgagggacagagttggagtgtatggtgtcatcctacttccaattggacttatggtgaggtgcgttcggataatgcctataaaggcggtggtggtgtcggtgaccttaatgaagtgcaccgtatggagacatttgatatggatgcaaccaatggattcttggacagcaagtggtatcatctatattgcagtgtacagcgttgtaactctgcattgcgcgtactgaatgctgcaacagatgagcaggtaaacggacgtgtatcccgcattgcggagatgaaagtgcttcgtgcccattattattttgaattaagccgccttttcaacaagataccttattttgatgagaacgttgagatttcccaatatccggatattccgaacaatgagtttacccgtgacgagattctgagtatgctggccaaggagatgcttgatgccgccgaacagcttcctgcatcacagccggaggtagggcgtattcataaatacatagcactggcctatgcggctaaaatcaagctgtaccaggcgtatcagcaagatgagattacgcatgccgtaacttccatcaataaagagctgctgagggaagtcgtttcgctttgcgaccaagtgactgccagcaaccgttacggtttgcttgacgatttccagggattggatttagtaactaatgaaaacggtaaagaatctgtttttgccattcaatattccatgaatgacggtaccgaaagtgccggccgcatcaactggagcaatctgttgaattctccgggtggaggcagcccttacggaggtgacggtttcttcctgcccagtcaagatctgataaatgcttaccagacagatgcaaacggtctgcccgattttaattatcagtcaaagtctgattatagttgggcggtattgaacaatggggtttatactttacaaaacacgactcccaatgtagacccgcgtctcgattttgttgtgggccgtcctactataacttggaaaacttatccggacaagccgtgtgagggatgggtgcgtgataaggatacttatggctataattgcgcgaagcgcttctgggtttctccggaaagtagtgatatgtttaatggctggccttggggggcttcacagttgaactggcagattatacgttacgcggatattcttctttggaaagctgaggctcttattgaactcaatgaaggcaatggactcgaaactgcccgtgatttgattaatcagatacgcaatcgtgcccggaacagcgcctatgtaaaggatttcaacgaccattccaaatatgcggccaactaccttgtcaatccttatcctgctgatgtctggaatcaggattatgcccgtcaggccctccgttgggaaacacgtctggagaaggctttggaaggtgaacgtttcttcgacctagtccgttggggcatagtggaaacaaccatgaacaactacattaccgcggagtcggacaatcgcatttattatgccaatgcgcactttacgggtggaaaggatgagtattatccggttccgaacaatcaatacggattttctggaggcaagtatgtacagaatcccggttatgctccgttcaactaattatattttgaaataaaaacgtaagggaggggaaacgtttgtttccctcttttcctttaaacaatcttttattatgaaaaactttgcctattctatattaggctgtctattgctttctttgaatgcagcttttgctcaaaaaacatggtcgtttgacgggcaggaccccttactttcctgtgacggtaagtcattgttgaatttgtacactataaaggaaataccagaatttgttaccggagtcgaaggtaaagcccttcgtacagacgggtattccacttggatggatacaaccacggaaggagatgtttcgtcgttgtccggatggtttgctctggaatcttatccgacggatactgctgcctttatgggaatcagagacatggcaggaacatctgtagcggtatgtgtagaccgttatggtgagctgctgttgggaatggggcagaatggctcatactcttactgttcattaaagacaaaagtcgaccgtttcaagtggctgcatgtggtccttgatttgagtaatgaatcggtttgcctgaatggacagaggatgagtgcagaggtatggccccggaacttgcaggatggtgaaatgatgtttcgggtaggtaaggatttcagggaaaagaaggtttggatgtacgatgttacggctataaacgggttgattgacgggataagcctcactcccttttccgatgattcgtctgcatggagagacgagattgccttaggattgaagaagactccggttttggctattccggaaacccgttttgcgaaggacttcaaccgtcctcgctatcatctgttgccggctgccaactggacgaatgagacgcatggtttacttctttataaaggtaaatatcatatattcaatcagaagaatgcttctgcaatcttcctgggacagataaattggggacatttcagcagtcccgatatgcttcattggacggaggaaaagccggctttgactcctgatgctgcttatgacaagaatggaatatggtccgggcatgctgttatcaatgatgacggtatcccccagctgatatacacagccggtggagacaagatgggagtgggtattgcttttccaaaagatactgcgttgatagaatgggagaaatatgcgggtaatccggttattgccgagaagcctgccggatatacccgtacggacatgcgtgaccagtatgtttggaaagagggtgatatctggtatatgattatcggtttcggcattgagcagaccgatacaccccacggggctttgctgctttataaatcggcggacttgaagagatgggattttgtacatttgctgtttgagggcaatccggaagtggatgactccggtattttctgggaaatgccggtctttaagaagatgggcggcaaatatgttcttttggtgaatagggttcctcataaaggcatacctgcgcgttgccagtattggataggagatttcaagaatgaaaagtttataccggacaacccagtccctcaaaatctggaggtcatcaatcgcttgctgtccccctctgttgttgagactccggaaggggatgttgctgccattgccattatacccgatgaaataggaggggaggccacttatgaacaaggatgggcacatctctacagtatgcccagaagatggcagctgaaagatgggaaactatgccaaacaccccatcccgtgatgaaacaattgcgtgaacaaccgacggtttattccagacaggcattgactgctgcgaaaccgtgcattgtgagcagaagggaacatcagcttgaagtcaaggcgactttttatcccggtgacgcaaaacggtttggatttacattgtgtaagaatccggataatagcgaatatagcctgatttattatgatgtggagaaggaggaacttattgtggaccagacgcattcttccttgcgtgcacacattcctttgaagattcgtaaggatcattatcggttggatactgctaaaccggtggagattcgtttgtttattgacggttctgtagtggaaggatttattaataacgaagatgcgttcactacaagaatcttccctttgaaagaaaatagtacgctattggagctattctctgatggaaaaacaacggaagttgctgccgaagtttggaaactgaaagatgtaaaggtaaagatgaacttttaatgaaaatacagaaaatgaagataccagctatattgggtgcacttttattggcaggaacattgtctgccggtgcacaaatgaattcagacagtttatacaaagagccgtatcgtcctcagtatcatttcagtccggagaagggatggattggtgatccctcgggattcatgtactatcagggtaaatatcatatgtactggtggggcaaagtcgaatctacagatttggtacattaccaacagataaccccttatgccatgaccggaacggatgacaatatcagttacttcactggttctgcggtcatagacaagaacaacacggccggcttcggcaagggggcttatgtggcggcttacaccgtttttgagaaggactccaagaaacaggcgcagggcatctctttcagtcatgacggaaagacatttcattattatgaaggtaacccggttctggacctttggagtacggaattcagggaccctaccgtcttctggcacgagccgacccaaaaatgggtgatggttgtagccaaggccctggagaagaaaataaagttttatacctctcctgatttgaagagctggacttggaccagtgattttggccctgccggtgacagtgaaaagtcttgggagtgcccggatttattccagttgccggttgacggggattctgacaagaaaaggtgggtgatggtcgtatctgtaaactgggcgcaagaacaatattttataggagacttcgacggcacttcttttaagctgatggagaaccatcctgcagagcctctatatgtggacaaagggctggacttttatgcatcccgcacatttcaggattttgacggaacgttggattccaaaatttcgatgggctgggttgcaacctgggactatgcaccggtagctccatcgaagtatgggaagggcttctggtccattccccgtaatctggaactgaagacatacaaggaaggcgtgaggctggtgcagaaaccggtggaacagttgcaaacacttcgccataagcctgcatcggtgaaacgtgctttatcggtgggaacacagaggttacccggctttgttcccgatgagaatgtctacgaactcgatgcttcgttttctactgacgtatccaacacctttggcttgaatttgtgtgtgggtgaagggcgcaaagtggtggtcagctatgatacggattcacataatctggtgattgaccgcacccattgctccgatgtgcagattcctaaattcagccgtatggcatatgccagggtggaaccggtagataataagatacgtttgcatatatttgtagacaaatcgagtattgaaatctttgccaatgacgggaaggatgtattcacattattaacctatccgggcgaggctcaaaccggtatcgaactttttgcgcagaagaaggggacgaagatggagttggatgcctggatgcttaaatcaatatggagatgaggaatttattgtttgcattgctgcttttgcctttgatggcctcttgtgtgaaggatacggcacaagtgactttggactctttgctggatgaaatgatatctgtagaagaatccgcacgttatccgctggtgccatatcgttgtctgcaagtcagcagttatgaccgctcctccgtgtctcccgattcgccgggatggtttgccaacaatgatggctatggcattgtctgtacggatacggttgatgggagagtggaacgtgtgatgttcgatgaaaagggccctggagctattacccgtatctggataaccacagttgacaagcgtgggacttggagattttattttgatggcgaaagtactcccggatggatagttcctgcctatgatttgatgcgtttcggaatacccaggttgggtaggggactgcttcaaccccacaccagctatactccggacgggaaaggcggcaatactcttttcctgcccatcccttttgcccggagttgtaaaattacatttgaagacgaaccgggcattgcgcctactcccaaatactatcacatcaattatcgcaagtatcccgaaggaacttctgtggaaaccttctctgcggcatccgtagcccgcgtcggtaaaaagatttcagaggtagatgatgccttgctgcatcctgcatcccgttccggtttgcaggtggacaagaagcggcaggtgctccagccgggcgattctttgtggattgacctgccgcaaggggaaaatgcggtttatgaaatcagtttccagctcgcgaatgcagattctacggcttatgcccaactgatgcgcaatcttatatttaaggctgattttgacggccggtctacggtttgggttcctctttcggattattcgggagggggtatgggtgctccggctgttgatagctggttcttgtctgcagacggacaaggcaaggtggtgagccgctggctgatgccctacaagacagaaggcagactattgttacaaaatatctccgcacacactgcagacgtgagtatggaagtgggaacggcacctttgccatggggagggcgttccctctatttccatgcttcctggcgccagcagaccggacttccggtttatgagcgtccggatgatgatgcaaattgccgggagtggaactttgccacattgaccggacgaggcatatacaaaggggatgtcctgactctgtataaccattcgcgtgcctggtacggagaaggggatgaaaagatatgggtagatgatgatgtttttccatcgcatttcggtaccggaacagaagattactacaatagttcgtgggctccggttgtaatattccaaacgccttttggtggcgcaccccgtgccgaccaggcgagttctcacggttataatacattcttccgtacaaggaatttggacggtataccgttttcttcattattgcgtttcgacattgaattgttgagttgggtaaggggaactgtagattatgcaactaccgtttactggtatggagatatgggagcgaaagctgttgatacttcaggacttgaggaagcagcccaagacttgctacccgttcccggcgatttatctaaatatcgaagagaaaatagcatagaatttgaggaaacaactccaatagcctcttctccatccattcattttgacaagcagagtatgcttggtttcgttgacgggcaatggagtggaggaacccaactcttgtgtattggtggaaaaccgggtgattctgtagagtttgagttcaatcaattggaagactgtccttatcaactggtggtgtatgccacgaaagctcctgattatggcatagtttctttttccgtaaatggacaagatacacatataaagtgggatggatatgatacaaaagttactctttctgaccctatttctttaggatgctatagtccggtgcgtggagcattgactttgaaaatatctttgtcaggagctaacccaaaagctgttgaggagaagaatttgtttggattagatgctatacaacttatgaaaaaacaatgatattatgaaagagaggatactgatacttttactactggctactgtttgtagtatgcaggcacaaaatattcacatggcactacgtccggatgatttactgatagataattttgaaggagatacttttggaaactggatattggaaggaaatgcttttggcaattcaccagtttctatggaacgtttgtcaatatggggggataataggtttgaaggaaatcggatggcttctagctttgtcaatggagatgccggtaccggtgtattgaagtcacctcttttcaggatagaacgcagatatgttaattttctgataggtgggggtgttgattatcagcgggagtatgtagccctttggattgatggaaaggaggtgaaaagaagtacggggtataatagacgtgtcatggaatatgagtcttgggatgttgctgaatatatgggaaaaaatgcccggattgttttagtggaccaatcaaaagagggctggggatttatcaatgccgactgtttctaccagtctgataccaaattggaaaaagaaatttttgcgaaaagaatgttggtaactcaccgttatttgaatattccggtaaagatgggagcggttatagaacagatggatatatggattggtgataaaatggtacgtaatatggaagtggagcttggcggcgatgaacctgattattgggttacattggaggtcaaggattggattgggcaagaattacggatagaggcgagtaagagtcctaatgtagagcaagctttgaatcaatgcttttgttctgaaactcctaaggaagagaacttgttttataaagaaccgttacgtcctaaagtacattttacttctcgccggggatggctgaatgatccgaatggtctggtttggcatgaaggggagtggcatctgttttatcagcataatccctatggctgtatttggggtaatatgacatgggggcatgctgtgagccgggatttggcacattggactgagttgggggatgtattacatccggactcgttgggacctattttttccggttcggtagttgttgataaaaagaatacgctggggtgtcaacaaaatggagatacagtattggttgctgtttatacttcggcaggtggattcgggtatcacacccggcatttgcaacattcacaaagtataggatatagtttggataaggggcgtaattgggttactttttccggtaatccggtacttcccacgttggtcaggtacaatcgtgatcctaaggtgacgtggcatacgccgactggcagatggattatggtattgtacttggataagcaggagtatgctatcttttcatctcccaatttgatggattggactgaaacggaccgttttaaattagagggggcggatgagtgtcccgacttttttgaaatgtccgtaaccaatgaacctactgtccggaaatgggtctttaccggggcgaacagtacctatttggttgggagttttgatggatatcgttttcggcctgagacgaaacctgtaaaaatggatagtggtacaaactattatgcggttcaaacatatagtaatgcaccagatgaccgaagaatacaaatagcatggatgaacggaagtaatttcccggatatgcctttcaatcaacaaatgtcctttccgcgtgaattaacattacatcgggttgataaaggatatgtcttaaaaagtatgccggtaaatgaactcgctttattatatgggagaaagtacatctggaagagtctggtagttgaagaaaagaattgtttcacgacaaagttgaatactcctgccttctatctgaaaacgggttttgctgtagatagtgttgatgcgcagatattggcttttgatattaatggtttgaatttgatttacgattctgtcaaacagatactcactgttaagaaagagaatggggaaaccttgaagcagatggtgctaaagcccaatgaaggaagaattgaattggatatattgtcggatattgcttctgtagaaatcttcgtcaatcaaggagcactgtctgctgctttctatcatctgattgaaaaaaacactccttctgtcaccatatcagttgaaggcggacaaacaaagttgaaacagttgacaattcatgaattgaattctatgtatgttccccagtgacatacagatacctttttaaggatggaatgtaacatttgtagtatgctttgaaacaaaaaagatagtctcctgctgcttggtggcgtatctttgcatgctagaaaaacataattaatttaataccaacagaaacatgattcatttaaaagacttttggcggacaatcagaaggacgcttaccgtatttatattaggaactaccgtggctgtcttcacatgccaggccataaatcctcctttcgtgattaaacatctgggtgacggacagagtatcgtccaaattgacgagcagaagaagtttttgctgctgccggtggaagaggcttctccggaggcaaaattgtatatgatagcggacaatgatgttgtacgcagtatgaacgtgcgattggcagtcaataaggttgactattttgttccggtcgatttgaccggcttcgataataaacatctctctttcaacttccagcttattccggattcggccttatgctgggaagaaatgaaactgtcggatgaattcgatgtttcgaaccgggagaagtaccgtccggtgtatcatttcagcccggcttacggttggatgaatgatcctaacggaatgttctacaaagacggggtctaccatttgttctaccagcataatccctacggctccatgtgggggaacatgcattggggacatgccaccagtacggacctcgtcacttgggaacatcacggagatgctatttcgcccgatgcgctgggaacaattttcagtggctcttgtgttgtcgacaaggataatacggccgggttcggtgccggtgccgtcattgctttctatacatcggcaagcgaccgccaagtgcagagcatggcctatagccttgacaacggaaagaccttcaagaagtatgcgcgaaatcccatcctgacttccacgcagcgcgacttccgtgaccctaaagtcatctggcacgaagataccaagaaatggatcatggttcttgccgtagggcaggaaatggagatatactcttctgccgacctgaagagctggacgctggagagcaaattcggtgaaggacaaggtgctcacggcggagtctgggagtgtcccgacctgcttgaactgccggttgaaggtacggaactgaagaagtgggtactcgtctgtaacctcaatccgggtggaccgttcggtggctctgccacacaatatttcgtggggacatttgacggaaagagattcgtgaacgagtctcccgcagtgacgaaatggatggactggggaaaagaccattatgcaactgtcacttggagcaatgctcctgcaggacgtgccatcgcattggcatggatgagcaactggcaatatgccaacgatgtgcccacccgtcaataccgcagtgccaactccgtgccgcgcgacctttcgctctatacctcggagggtgaaacctatgtaaaggtaaccccgtctcccgaattgctgaaactgagggataaaggcagcaagaagcgtgctttcaaggtagaccgcacgtataatctggacaaactgctgaatgacaattccggaacgtatgaaatcgaaatgaccataaagaacaaggatgcggatgtgataggattccagctctttaactcgaaaggcgaggaggtggagatgtactataacctggcggaaaagacgttcaccatggaccgtatcaagagtggtgaggtgtcgttcagcaaggacttccctgcagtgaccgtggctcctgtcgagggtggcaatgaaatgaaactccgcttgttcgtagacaagtcgagcattgaagcgtttggcaacgacggacgttttgccatgacaaatcttgtattcccgtcggaaccttacaaccgcatcagtttctatgctaaaggtggaagctgcaatgtcacctcgtttactgtgtacaaactcggattaaaataacagataataatcttcagcatggaaaatactaagaattcttctttggcaaagctctttccggtcatgctttgcttcttcgccatgggctttgtggatttggtgggcatcgcctccaactacgtgaaggccgacttgaacctgaccgactcgcaagctaacatattcccgtctctggtgttcttctggttcctcatcttctccgtacctacgggtatgctgatgaaccgcatcggacgtaagaagacggtgcttctcagtcttgtcatcacgtttgcctctttgcttctcccggttttcggagacggttacgtgctgatgctgctctcgttctcattgctgggcatcggtaatgcgctgatgcaaacgtcgctcaacccgttgctttccaacatcgtaagcggcgagcggttggcaagttcgctcaccttcggacagtttgtaaaagccattgcttcgtttctggctccatacatcgccatgtggggagctacgcaggccattccgtctctgggcatgggctggagggtgctgttcccggtctatatggtcattgcggtgattgccattctctggctgagcggtacttccatccgcgaggaaaaggaagagggacgcccttccaccttcggggagtgcctcgccctgctgggcaagccgtttatctttctctgcttcctgggcatcatgtgtcatgtgggcattgatgtaggtacgaataccacagcgcccaaaatcctgatggagcgtctgggcatgacgctggccgatgccggctttgccaccagcctttacttcatcttccgcacggcgggttgctttctcggcgccttcattcttcagaagatggctccccgaaccttcttcggcatcagcgtgttatgtatgttggctgcgatggtagggttgttcgttttccatgaaaagacaatgatatacatttgcattgcccttatcggtttcggcaattcgaacatctttccggttatcttctctcaggcgttgcttgctatgccacaaaagaagaacgaggtttccggcttgatgatcatggggctcttcggcggtacggtatttccgatagcaatgggcttggcaagtgatgctgtaggacaaagcggtgccgtggctgtgatgacggtaggggtagtgtacttgttcttctatatgctgcgtatgaagcggtaatctttgttcgcaggctgcggacacatatcccaaggctgcggatatctgtcccaaggttgcggatgtctatcccaagccttgggatagagataatccttagttcttagagactttttaatagataattggcaacttttcattctatagttaggaacttttttattaggtttgcagcgggtaggacattgagtttgccgtgaataaaatatatcattcattaaacaatataatattatgaataagataatagtaggtatgggcgaggctctgtgggactgcctccccgaaggaaagaagataggcggtgctccggcaaactttgcttaccatgcatcgcagtttggtttcgacagccgtgtggtcagtgccgtaggtgccgatgcggatggggacgagattctggatgtgttcgcccggaaggggctgcgcacgcagattgagcgcgtgccttaccccacgggaacggtgcaggtgacgctcgatgccgtgggcgtgccgtgctatgagataaaagaaggcgtggcctgggacaacattccctttaccgacgaactgaagcgtctggcactgaacacgcgtgccgtatgtttcggctctttggcgcaacgcagtgaaacaagccgcatcaccatcaaccgctttctcgacacgatgcccgatgcggagggacaactgaagatattcgacatcaatctccgccaagggttctataccaaagagatactctgcgaatccatgcgccgctgcaacatcctcaagataaacgatgaggagctggtgaccatcagccgtattttcggctacccgggcatcgacttgcaggacaaatgctggattctgctggccaagtataacctgaagatgcttatcttgacttgtggaacgaacggcagctatgtgttcactccgggagtggtttccttccaggagacgcccaaggtaccggtggcggacaccgttggagccggtgactcgttcacggcagccttcaccgctgccattctcagcgggaagcaggtgcccgatgcccataaactggcggtggaagtctctgcctatgtatgtacccagagcggtgccatgccggaattgccggacgccttgaaagaaaggctggcatagatttttcttattcttttcacatttttcgctatctttgctcatctgcaatcttaaatcagaggaaagtgaagatgagacagcataaccttcggattttattctttttgctcgtgctttggggagtggcggttgcctgctcccggcgcgaggcacgtttccgtatcggcgtttcccaatgtagcgaggatgaatggcggcgccagatgaacagtgagatactccgtgaagcccatttctacgaggatgtggaggtggacatccgtactgctgtcgacgataatgaccgtcaggcaaaagacattcgtgagctgatagccgaaggggtggatctgctgattgtggcccctaatgaagccactccgataactccggttgtggaggaggcatacaaccggggcattccggtgattgtagtggaccgtaaaatcctttcggacaaatacacggcctacgttggtgcagacaactacgagatagggaaagctgtgggagagtatgtggccaatgtgctgcacgagcagggagatgtggtggaaatctcgggtttggtgggctccacacctgccgtagaccgccatcagggatttgtgaaggctatatccgcttatcccggtatccggttgctggccgttgaagacggtgcctggttgcaactcaaggccggagagaaaatggataccctgctgagccgctttccgcatatcgacctggtgtatgctcagaatgaccgtatggcggccggagcctatgctgccgctgcccgagaggggcgggaaaaggatatgcggttcatcggcatagacgccctgtccggcaaagactatggagtggagaaagtgcttgccggcgaactggatgccacgtttatatatcctaccggtggcgaccgcgtgatgcagattgccatggatatcctgaacaagcgtgatttcccccgtgaaactatcctgggcacttccgtcgtcgaccgcgacaatgctctcatcatgaagatgcagaccgcccacatcggcaccctggatggaaagatagaaaccctgaacggaaagataaaccagtatttggccagttatgccacgcagcaggttgtcttgtacggcagtctgtctgccctattgttgctggtcggtttgttggtggctgtctacctctccttgcgtgccaagaaccggttgaaccgtgagctgtccatgcagaaaaagaaactggaagaacagaaaactcagttgatacagcagaaggaactgttggaagtgcagaagtcgcagttggaacagctttcccatgaactggaggaggctacgcacgccaagctggtgttcttcacgaatatttcacacgatttccgtactccgctgacgctgatagccgatcccatagagcagcttcttgccaaccgcaccctcgacggacagccgcgccagctcctcgagctgatgaaaaagaatgtgcatatcctgcttcgcctggtcaaccagatacttgatttccggaaggtggagaacgggcgcatggagctccatctcgaaccttttgatttgctcgacagcttccggggctggaacgactctttccgcatggcgttgctgaagaaacatattgctttcagctttgaggcatcttccgatacggacttccggatgatggcagatgcggagaagatggagcgcatttacttcaatctcttctccaatgccgtgaagtatacgccggagaacgggaaaatcaccgtacggttgttaaagtcggaacagaactacagtctgtccgtcttcaattccggcagctacatttcttcgaccgatgtggaagccatcttcgagcgcttctatcaagtggacgggcatcaagccggtaccggtatcggactggcgctggtacgtgcctttgtagagatgcatggcggtaacattacggcacgcagtgacgagaaaggcactactttcatcgttactttcccgcagcaggatgtttcgcagtaccatcccaccatagtgacgttgcctgccgaagagaaggacgtgtcgtccaccctgatagatacggaagtgaaggcatgcgaagaggtggttgaggctgattgtcctactgtgctggtaattgacgataatgcggatattcgcaactatgtgaagtctcttctgtcgaacgagttccgtgtattggatgctgcggacgggacagagggtatccggctggccatgaagtatgtgccggatgtgattatctccgatgtaatgatgcccggtatggatggtgtggaatgctgccgccgcttgaagggggagttacagacatgccatatcccggtgattctgctgacggcctgctcgctggacgaacagcgtatccagggctatgatggcggtgccgattcttatatttccaaaccattcaattcgcagttgctcttgtctcgtgtccgcaatctcattgcaaaccgccgtcagttgaggcagttcttcggagataaccagactattgagaaggaaaccatcagtgatttggataagggtttcgtctcccgcttcaaatcgcttgtcgaggagagaatgaaagatgcggaactcaatgtggaggatttgggacggaatatgggtatgagccgtgtgcagctttaccgtaagctgaaatcgctgaccaactattcgccgaatgagctgctgcgccagatgaggttgaaaaaggctgcctcactgcttgcctcctctgacatgacggtagcggagattgcctatgaagtgggcttttcgtcaccttcctatttcacgaaatgctataaggaacagtttggggagagtcccaccgagtttctgaaaagaaggggatagctgttgtctatcccccttgttcttaatacacgtctgtttacttctgtaaatgatactggaacttatttcagtatttgaggcaggttttcccttccccagaagtaataaacacagattccaatccagcttgtgagcaggatgataattgcaactaatagtttcttcacgccgtctaccggccacttcatgatttcaagtacggctttgacacacagaaccacaccgataatccaaatgataaatccaatcataacctgtgatatttagtattgttaattaaaaacaaatagagactacgccttattcaggagcagcctctattctttatttagtaatcggaattactctgtaacttcagcgccccaattttctttggaaagacgcttgtagctgttgtaacgccatttagcgttttcttcagcagccttgaacagctcgtcggcctcctgcggatattgcttcattacggatgcgtaacgaacttcacccttcaggaagtcttggaatccgctccaatccggttccttgctatccagcgtgaacggattcttgccttcagcctccagagccgggttgtaacgccacaagtgccagtaaccgcacttaacggccttttcttcctctgcctggctcttgcccatacctgccttcagaccgtggttgatacacggagcgtaagcgatgatgagtgacggaccgggatatgcttctgcttcacggatagccttcagggtctgagcctggtcggcacccatagcgatttgggcaacgtatacgtaaccgtaagtagtagccatcagaccgaggtctttcttgcgtacacgcttaccggcagcggcaaacttggcgatagcgcctaccggagtagccttggaagactgaccgcctgtgttggagtaaacctcagtatccagtacgaggatgttgacatccttaccgcttgcgattacatggtcgagaccaccgtaaccgatgtcgtaagaggcaccgtcgccaccgataatccactggctgcgttttaccaggtattgagacagactggcgatagtcttgcagctgtcgcacttgtctttggcagcttctaccatcggaatgattttttcagccagttccttgctcttgtctgcatcgtacatgttttcaatccaagcctggaatacttctttgtattcggccggagttccttctgctgcgatggcatcttccatagccttcacgatacgtgcgcgcatcttttcgttggcaagctccatacccagaccgaattcgcagaagtcctcgaacaatgagtttgcccaagcaggaccgtggcctttttcgttcttggtataaggagtagaaggtactgaaccggagtagatggaagaacatcctgttgcgttggctaccatttcgcggtcaccgaacaactgggaaatcagtttaacgtacggagtttcaccacaaccggagcaagcgcctgagaactcgaacaacggagtagcgaactgagagttcttcacgttggccttgatgtcaaccaaatgttgtttgctcttcacgttttcagcacagtaagtccagttggcagcttccggcaattggctttcgaggtgcttcatagtcagagccttgccacccttcttcgggttgcccggacagacatcggcacagttgccacaacccagacagtcgagaacgtctacctgaatacggaatgtcataccgtcgaatgctttacctacagccttcagttgagtgaagttggcacccttctgctcttcagcatcgagtacgaacggacggatggaagcgtgaggacaaacgtatgcacacttgttacactggatacagttttcagcgttccattcgggaacgaatgcagctacaccacgtttctcatatttggcagtaccttgttcccaagtaccgtcttcgatacccttgaatgcagataccggcaataagtcaccgtcttgtgcgttgataggacgaaccacttcgttgatgaatgcagggtcgttgttttcagccttggcgtcgtctgccagattggcccaagccgggtcaacggtcagctgcttgtattcgccgccacggtcaacagctgcatagttcttgttgacaacatcttcacccttcttgccgtaagacttaacgatgaacttcttcatctgctctacagccaggtcaaccggaataacgccggtgatacggaagaatgcggattgcaggatggtgttggtacggttgcccaaaccgatttcctgtgcaatctgggttgcattgatatagtaaacagtgatattgttttgtgcaaagtacttcttcaccttgttaggcaggttcttggccagctcttcgccttcccagatggtgttcagcaagaaagagccgttcttacgcaagccgcgggttacgtcgtacatgtgcaggtaagcctgaacgtggcaagccacgaaattaggcgtatttaccaggtatgtagagcggataggagtgtcaccgaaacgcaggtgcgagcaagtgaaaccgcctgatttcttggagtcgtaagagaaataggcctggcagtgcttgtcggtgttgtcaccgataatctttacggagttcttgttggcacctactgtaccgtcagcgcccaagccgtaaaatttggcttcgaacatgccttcgccgcccaatgcgatttcttcttcctggggcagagaagtgaaggtaacgtcgtccacgataccgatagtgaagtggttcttcggcatcggcatagccagattcttgtaaacggcgaggatttgagcgggagtagtatccttggaacccaaaccataacggccgcctacgataaccggagcattctctgcaccgtagaagcagtcttttacgtcgaggtacaacggttcgccgttagcacccggttctttcgtacggtccagtacggcaatcttcttggcagtcttgggaacggcggcaaggaagtgcttggcagagaacggacgatacaagtgaacggcaaccaaaccaaccttttcgccattggcaacgaggtggtcgatagcttcgcgggcagcttccgttacagaacccatggcgatgataacgcgttctgcatcttctgcaccgtagtaatcgaacaaaccgtacttgcggcctgtgattttggaaatctcgttcatgtattcctcaacgatagccggaactgcttcatagtagttgttgcaagattcacggtgttggaagaagtggtcaggattttctgccataccacgtgccaccgggttcatcgggttcaatgcacgtgcgcggaattcagccaaagcttcctggtcgataagcggagcgaggtcttcgttctccaacatttcaatcttctggatttcgtgagaagtacggaagccgtcgaagaagttcataaacggaacacgggccttgatggtggctaggtgggcaacacctgccaagtccataacttcttgtacagaaccttcggccaacatggcaaaaccagtctggcgtgcagacataacgtcctggtggtcaccgaagatacacagtgcatggcttgccaatgtacgtgctgatacgtggaatacacaaggcaggaattcaccggcaatcttgtacatgttcgggatcatcagcaacagaccttgtgaagctgtgtaagtagtagtcagcgcaccggcttgcagagagccgtgaacggcacctgcagcaccgccttctgactgcatttcctgtaccaatactgtttcgccgaagatgttcttgcgacctgcggcagcccattcgtctacgtattcagccatcgtagaagagggggtgatggggtagatggcagctacttcggagaacatatacgagatatgtgcagcagcctggttaccatcacaagtaatgaatttcttctgtttagtcataactaaattgaattatttatttaagtaaaaaaatctctctcttaatacaagaaaccgaataaccagagaggtatttggttgcctcggcctatttctgccttatgcagtacataagtaactcccggattattctttatctttgttccttccggacaaatcttgaaaggcatcacctcatctaccatgaacgagatgttcttgtcgcccttgttcaccttgtggtccttccacattgtgttggcaaagaaagtgtccagtacgtcttgctcttccaccttgacgggatagatggaatacatcagatttgaattgtgcatcattatcttcgacggcttcttggggaattcttctcccttcggatagaccatattgatgagtcgtgcgtctgccagatacttgatgtaattcattactgtggcgcgggaggtctgtatgtcgtttgccagttggctgacattcggcgctttcggcccgtccacggccaacaaatatagtaatttctttatcttcgaaaggtattttagctcaatttgtttgatgagcaggatatccacttccaccatcatattcattgtcttgagcagattctccgaaaagttacgcttttcaaggaagaaagggtagaagccgtggtgcatatagtcttgtatgtagtccaatggacgtactttggagaggatgcctttggctatctgttcgtggttgctcaggatttcttccaacggataggcgtggaacttcatgcccgtctgcaggttcaggtattcgcggaaggagaagccgcgcaggttgtagctcttcacgatgtcgcgcaactccatattctcctctttcaggcgcatcacggacgagccggtgaacacgattttcaggttggggaagcggtcgtagcacatacgcagttccttgctccattccgggtacttgaatacctggtctatcaacagcacttttcctccgcgacgctggaattcggcggcgaactccacgatgccatgtccggagaagtagaagttgttcatgttgatgaagaggcaggagcggtctgtgccgaatttctctttggcatattgcagcaagaaagtagtcttacctacgcctcttgtgcctttgataccgataagacggtcattccagtctatttcgtccattaggtcgcggcgtacgggggcattggtatgctctacgagataagcgtgtgtacggtaaaatgcttccatgctttaaattcggtttatcgggcgacaaatatacggcttttttatagatttgcaaagtagagatggcaaaatattatataactttgcactctcatacaaaacgtgagtaattggttaacatttgaaagatgaaactttatgtgttcaatcctgatgcagatatggcattgggaaataatgaagaaaattatatggcgcccgctaccatccgccgtatggctgaagacttggctttgttgccgatttggtatgcccagccgggtagtggggtactggcctcttccgcctataatgcagattatctgaaacagatgcaacagttgttccggctggatgtgcatttggtgacagagccggagctgcccgattatgctgatgtgcgggtaatgccttggggatggaaccccgctatccgtaaacggatgttgaaaggcggtgttctggaaaaaaatcttcctacgccggatgctttggataaatatcgtatgaaggctgcccgtagtaacgctttggcttttcgcgcacttttctatttcaataaaatagattatacttgtggtgacggttgttgcttggtggaggctgatggtagaatgacggatatctctccggatattgttgatcgttacaaggagggatgtgtgttcaaatcactttggtcgggaagtggaaagggattgtgttggtgccgtcatggctttacgaaaaatgtttccgattggtgtagtagggcgctgaaagaaaatagaggttttgtgatggagcctatatttgataaggtggaagactttgccatggaattttattcggatggtcggggaaagcttctttttgtcggctattcccgttttgttacggatgacaaaggggcatatcgtggtaatatccttacttcggatgagcaagtggaggaatggattcagcaatatgtaccctttgaagcatttgtacgcatacgcaatatgatgcagaaagcattggaaacgagttatgctacatcttatatgggtttcttgggtgtggacatgatggtctgccgtcagaaggaagggcatccgtatgccatcaacccccatgtcgaaataaatctacggatgaatatgggaatcgtttcccatgtgcttagtgatcatttcattgtccccggtggggagggacgtttctccattgattgttttccgacccatgaagctttgatggagcggcatgagcaggatatgcaaagctatccgctggtggtgaaggacggcagggttgtttccggctatctgcctctggtaccggtcactccgaagagccgttaccgggcttttgtctgtgtcactgctgctgaatagcttcgctttcgtttccgcaacggtctatggctgtcacggcaaaatattttcgggcagtccacgggcggatgggggcataggtatattccgtgccttgtactcgttgtgccaggatattctccggattggaggtatctacgggataggtgtccgaaccgtagattacatacatcggagcattccgcttgtcattgtccgtggcgggttgccagcttagtttccaatagccgttttccggtgtttccaccgtgagtccggagggaggtgtaggagctacattgtctatccacggcatggcgggttgcagggccggggcggtatagaagtcttcttccagcgcatcataaagcccttgcgtattgtccatcagatacttcacgcggtagtgtgcctcgcccgccagaccgtgggcgcggataaagtgcatctgccgttcaatctcgtccagcgtccagttcccttcgctggggtcgaggaagtagatgcccagaccgggaatgatttggcgtccgttactttgttcctgccagtcgagggcaaagggatagaaatgattgccacggaaatagagcatcggataaatctggtcctggatgccctcgcccagccaaccctgcacgtcttgatagacggtgtggaaggcattccagccacgggaggggtagcgggaagtgtctttgtattttcctaccgggcaggtgctgacctttacccagggtttcatggcttttacacctttatatatatagcgtactatttccgtcaggttgtctctgcgccattgggcaaggctgcgtcctttgctgtatttgcggtagtcgtagctgtcgggaaaacggggggcgttttccggatagcgcaggtagtcgaagtgtatcccgtctacatcgtagcgttccaccacttcgcggacaaggctcatcaggtactctttggtttgcggatgtccgggattcaggaagtattcgcgtttgtagggtacgcagatggcgcgtttctttttggtgacggactctttaccgagggcggctacatgcttgcggttgcccagagggatggtcaccatccaggcgtggcactccataccgcgcttgtggcattcggctatggcaaaagccagcggatcgtagccggggtcgccgcccacctttccggtcagtatggagttgtagggctcgatggctgatttgtagaggacatctccccgtgtacgggtctggaacagtactgtgttgaaattggcggctttcagtctgtccaatatttcaatcagttcggcctgttgcttgcggatgccttcgggcgaagtggtgcgtgtctgcggccagtccaggccatagacggcagttatccaggcggcacgcacttcatgcttgggcggttgcgcagccagtggcagcaagacggccatatatagtaaaatggaaataattcgtttcatttttctcttttcttctttatttctgtcatatttctcggcgaagataagcaaaacacccgattattttgtgctgtttacttggaaactgttacatttgcatacattaaagatattaacacgccatgattacatttacgctttgcctgctggcgttgatagccggctattttatctacggacgcttcatagaacgcgtctttggtcccgatgaccgcaaaacacccgcccttaccaaagccgatggtgtggattacattccactgcctacttggaaaatctttatgatacagtttctcaatattgccgggttgggacctatcttcggtgccatcatgggagctaagttcggtacggcatcctatctgtggattgtacttggcagtatctttgccggtgcagtgcacgactatcttgccggtatgctctccttgcggcatgacggggaaagcctgccggaaatcatcggacgctatctggggctgaccaccaagcaggtgatgcgcggctttaccgtcatcctgatgatattggtgggagctgtctttgtggcagggccggccggactgcttgccaagttgacccccgacagcttggataccaccttctggattattgttgttttcgcttattatatctttgccactttgctgccggtagataagattatcggtaagatatacccgctgttcgccgttgccctgctgttcatggcggtcggtattctggtaatgctttacgtcaaccatcctgcattgccggagatatgggacggattgcagaacacgcatcccgatgcggttgcattgcccatcttccccatcatgttcgtcagcattgcctgcggtgccatcagtggcttccatgccacgcagagtccgctgatggcacgttgcatgacaagcgagcgccacggacgccccgttttctatggggcaatgataaccgaaggcattgtagctctgatatgggctgccgccgccacttatttcttccacgagaacgggatgggggagacgaatgcctctatcattgtagacgccattacaaaagactggctgggtgccgtaggtggcgtattggccattctgggtgttattgccgcgcctattaccagtggcgacacggctttccgttcagcgcgcctcattgtggcggatttcttgggaatggaacaaaaatccatgcgtcgccgtttatatatatgcatcccgatgttcctggtagccattagcttgttgctttacagcctgcgggacaaggatggatttgatatgatttggcgttattttgcctgggccaatcagactctgtccgtctttacgttgtgggccattacggtctatctggtacgcgagaagaaaggacgttattattacgtcacctatttcccggcattattcatgacggctgtgtgtaccacttacatctgcattgctcccgaaggtttcgggctcggtccgaattatgcgctgggcatagccttgatagctgttgtgctggctgctatttggtttaatatttggtattttaagacgactaaaaaactttggtaatgaagaaaatcaagaaatctaccgggctcacgttggccctgcttatttacgtttctgctactgccgcttatttccttccccgcaatacggaaatcagcgatactgagaagtatgtcaccgtagctgcttcgtacctcattgtatttgtgctgtggctggtgcttcgcaagaaggaggcgctgcaacgcaagcgattcgaagaagacaataaacaacattgattatttactcaaaaaacagaacaagatgaaaaaactggcattattcgtttgcttgcttgttgtcacagtggcagctcaggcacagtttgaaaaaggtaagtggattttgaacccgtccatcaccggtttggaattttctcatgacacgggaaccgacaagacaagttttggccttgaagccaagggaggtgctttcctgctcgacaacatcgccttgctggtgcatgccggggctgcttggaataccggagggtctgacctcgatgtctatacgctgggtgtaggtggacgttattatttcgacaagattggcgtgtatctgggtgccgatgtcaatgtggaccgttgggattggggacatgatttggatgataccaagttctctttcggtctggaagccggttatgcgttcttcctgacccgcacggtgaccatcgaacctgcagcttactggaacgtcaatagcgaccgttctaaattcggtctgaaggtaggtttcggattctatttctaatcttattttcctgctactgcaagtttttttgcagtgccgctgtaaatgtgttgcagtggcactgcataaatgtttgcagcagtactgcaaaagatatgcagtggttttgcagtaacgttttgcttagagcaatgctgcatattttctaacttgtttcaagcgctccatgagtgtttggtcactttcagccaattgcatgttatagtctagctgcattcgcatcagcaagccggcactgattcccaaggctgcttcaaagagcaatgctgtagatgttgtgaggggacgtcgacagttcaagatgtcgtttagtaccttatatgagatgccggtttgtgcagcaagcttagtttggggtaattttctatttcccacctcttctttgagtaattcacccggatgtatagggcgttgacatttataatttcccatattcataatcatttatagtggttcgataattccaggatattacatattgtcactacggtttcagatgtactctgctttactgtgaattctatgcggtattggtcatttactctaatggaagaaatacctgctttatctcctttcaatacttcgtaatgaaacgaccgaatggcgtaaagctcttcgatattttgaacgtattccaaggtctttatgcgcaactgatatcgtttcaccatttgaggctgaaagcgatatttcttatcctttgtttttccttcctcatatagttgttgcaagtattccttatcaaagtgtatttccattgtttttagattgttttcattgtgcaaaggtaatgtatatctccaatattccactataaaagtggatatttgttggttgcctggataacgtgaaactttttatatgttaatgaaagtagaggctggttttgaacattatagcaaaaatccttatatttatactcgaagtatgaatcctaaaagcaaaatgccatgaatagagtttgtattaccttattgctttgctgcttgtcatcttgccgaatgaataagacggaacgcatggaaatgtctgaagattccatagatacagtaaggatagaccaaggggtgggaaaaaaaacagtgagcgatagcctcaagatagggattgcggatgatggtgactacttgcaaagacaattgcttgccattcacgaagaactgagaaaaagattgaataatacaccatatacacacattcagaggaatgtgaccggatatggggtggggttgcattgcatcgatatagatttgatggtgaatactcccgagcggcagaaagagttccgggagaagataatggactcccccgttttctgttttcatggtgtagaagtccccgtcatcaacgagagagtaggcaggaatcatattcgtggcatccatatccgtcccgaatatccagtcttttcaacgaaagcgcctcatgcgacattcatcctcagcaatcacagtggcggagatttgacctgcggcgagcattactacctgacgttcgaagacgaaaaaggtacctggcgggaattgccgataaacgctgccttttgggacatcgcctatgtgctgcgggatggggaggaaagggttatgaaagcctctctttatccggatgtgcatcccaacaagccgggacgctaccgttacttttatgagataaccatcaagaggaaacctgtcttgatgatggctgagttcagattgacggacaatgaggaagaatggagaacggcggaaaagacatctcttcccccttatatttcggatgcagggaagggcggaagcccacaattgataacggaagagccaatggaagaaccggtctataaagtagtggaagtgatgcccgagtttccgggaggtatgaaagccttaatggattttattcaaaagaatatccgttatccggaagaagtccgtaagaatggcattcaaggaagagttgctgtcagcgtggtgattgacgagaatggtcgtgtgacggaccccgttattatgcgcagcaggtatcctgccctggatgaggaagcattacggattgtagaattgatgccacaatggaaaccggggatgcagcagggtaaagccgtgaaggtggaatttacttttccggttacttttaaattggagtagtagcacccggtaagattaagcacaaagacacggaggcatagagttttattctttttccttgaatttaatatctctgtgtctccgtgcctctgtgttctatttaaggaagcgaggggtgtaatttctcttgcaagaattgtcccgtataacttgccgcacacttcgccacttcctccggtgtaccggtagctacgatgtttcctcctttgtcccctccttcgggccccaggtctatcacatggtccgcacacttcaccacatccagattatgttcgatgatgacaatgctgtgcccgcggcgtattagggcatcgaaggcttcgagcagtttcttgatgtcatggaagtgtagtccggtggtcggttcatcgaagatgaacatggtcgggtctgctttctcctggctgaggtagaaggcgagtttcacgcgctggttctctccaccggagagggtggaggaggcttgccccagtttgatatatcccaaacctacatcctgcaagggttgcagcttcttcacaatctttttctgtccgtgttgcgtaaagaattcgatggcttggtttacggtcatctccaatacgtcgtagatattcatgtcgtggaacttcacttccagcgtgtccgccttgaagcgtttgccgtggcaggattcgcattccagtacaaggtctgccatgaattgcatctccaccgtgatggtgccttcacccttgcattcctcgcaacggccgccttcgctgttgaagctgaagtatccggcactgtatcccatctgcttggcaagcggttggtccgcccatagtttacggatttcatcgtaggccttgatgtaggtcacggggttacttctcgatgacttcccgataggattctggtcaacaaactctacattgcgcaggttctgcaagtctcctccaatggaagtgaactcgcctggacgttcgttgcattcatccaactctcgtttcagggcgcggtagaagatgtcgcgtaccagcgtactcttgcccgaaccgctgacaccggtgactacggtcattacattcagcgggaaccgtgcctctacacccttcaggttgttttcgcgcgcgccttttatttctatgtagttgttccacgggcggcggtgttccggcagggggatggtttcttcgcccagcagatagcgcacggtatagctgtcactgtctttctgaaggtctttcatatctccttggtagacgaccttccctcccaggcggcctgcccggggaccgatgtcgatgatatagtcggcagcacggataatctcttcatcgtgttccactaccactaccgtattgcccaactgttgcagctggcggagcacgtgtatcagtttgtccgtatcgcggctatgcaggccgatgctcggttcgtcaagaatatacaggctgcccactaagctgctacccagtgaagtggcaaggttgattcgctggctttcaccgccggagagcgagttgctgaggcggttcagcgtgaggtatcccagaccgacatccaataggaactggatgcggctgttgatttctgtcaggatgcggcgggctatgtcggcgtcatgcgggtccatttgcaggttgtcgaagaagagcttcaactcagtgatgggcaaatctaccagttcggagatgttgcgtcctcccacgcgtacgtagtttgcttcgggtttcaggcgggtaccgtggcatttggggcagagcgtctttccgcggtagcgtgccagcatcacacggtattgtatcttgtactgattttcctgcaccatcttgaagaaggcgttgatgccctcaaagtagggtgtcccttcccacagcatccggcgttgctcgtcggtcagttcataatagggagtgaagatggggaagccggctttctcggctccgtgtatcaccatatccctccattcgcccatcttttcgccccgccagcatacaacggctccatcatagacggacaaggagcggtcgggtatcacgagatgctcgtcgatgccgatgactttcccgaatccctcgcatacggggcatgcaccgatgggagagttgaaggagaacatctggtcgttcggttcttcgaaggtgatgccgtctgcctcgaacttggtgctgaaacgatagaggcaggtactcccgtcgggctggtagaaacgcagcaggcaggcaccgtctccttcatacatggctgtttcggccgagtcggtgaggcggctgacggaatccttttctgaagaggctgtcatacggtcaatcaacagaaaaactgtgtctccggctttcggcttgtattcgtcgatgcgcatcatttcaccgttcacttccagacgggtgaaaccttgcttcatgtctatctccagttgttgttgcagcgtgcggtcttcgcgcagcaatatcggggcgagcacggtatacttggttccttccggatattccagcatgcacttcacgatatcttctgccgagtgtttcttcacttcttgtccgctgaccgggctgaaggtcttaccgacacgtgcgtagagcaaccgcagatattcgtatatttcagtggaggtacccacggtggaccgtgggttacggctgcttactttctgctcaatggcaatggcaggtggaatccctttgatgaaatcgcattcaggcttgctcatacgtcccaaaaactggcgggcataactgctcaagctctccacgtagcggcgctgcccctcggcatataatgtatcgaaagcaagtgaggattttccggaaccggacagtccggtgatgactacgagtttgttacggggaatctctacgtcaatgttcttgaggttattgacacgggctccctttatgataatcgatgtattttctgccatataaaagtcacttatgtgatttaggatttgcaaagataatgcaaaccggggtagaataaaacgaacctgctggaaaaatcgtatcagataggcaaggttaagatttgttatactttaggatgactgctaatttacattaaataaaagcactaaattcgcatccgactccttttaatgtccgaacatggtaaagcgtaatataaaatggcttcttgttgtgctggtgttaggtttatgcccctcaatcctgcatgccgaagacccttatggagagatgaaagctctggcagatagtgcgcagaaagtgttgggacaagaccgattgccttccatcaatgcccggtggataaaacttgcccgcgaactgaacgatacggtacagattagtgatgcccataacaacttgatttctcattattatcagttgggggacattgaccaattgaaagccgcaacctatgaatatatggactggtgccggaaataccaacggacacgagaccggtatatggcgtggcggcagtacattcagcgtatgacggagaaaggtatgcaggaggaggcgatggctgaaaccgtcaggctccatcaggatgccgagcaagcccgggacaaatacggattggcatgtggcgaaatgtgcatcgggtataaccatcgggtctttggaaacaacgtaaaactgtgtatagagaattacaacaatgcactgaaacttttcgaggaaggcagctattatcgtgacgcatacgtggtgttgcttaatattatccagacttatctttcacgcagtgagtatgcagaagccggcgagtatctgagtaaattgtcgcaactggaggacaaactggaccgtaaacaagtcagcatagacccttccctgcacctgcgtttctgtgaattcagggttataggcttattggccaatgaaggtagaaaggctactgagccttatattgaggagaccgaccgcttctaccgtcaacatccggagagctcgacgcccgaagcatggtttggctataagataatgtgttgccgtatcctcggtgatttgaaaggtaacattgcttacgtggattcactcatggattatcagcattcactggggctttgctatccttataaccattatatgaaaggagaactgcaggaacagttgggcgattatcgtgcggcttgccgcagttatgccagatatgccgccgtgagtgactccgtgcgtacggcagaaatggatgacaagctaagcaaatatacggcacagtttgaggtggaccggttgaagatggagaagctggagctgagtgccagattgaacaaggaacgactgatgatagccttggctgttggcggactggtattgttgcttttgctgctcattacttatctgtatatccgcaccctctccatgaaccgcaagttggaagctgcacgcagggcggtggaaaaaatgagccaggtcaaaagttcctttatacagcatatcacccatgaaatccgtactccgttgaattccatcgtcggcttttctaccttgctggctcaagagaagctggatgatgtggagaaacgcgagtatgttgaacaagtggagggcaacaatacatatctgttgagtctgatggagaacatactcaatattgcggatatggattcgcgagtgtgggagatgccgcgggaggagatagaagtggatgcgtgttgcaaggaatgtattgagggcttccgtccggaactgaagccgggagttgaactggaatatgtgcctgcttccggcattatggccttttatgcagcccggcaatggctgaaaatggtgctggtgtctttgttggataatgcggtgaagtttacggaagaaggtcatatacgcgtttcctgcgaggaagataagtcccgacatgtattgcgcttcgtgatagaggataccggtataggcatcaggccggacgaatcggaccgtattttcgaacgtttttataaagtggacacgtttaccaaagggtccggattggggcttgccatagccaatgagataatggagttggtgggaggccggatttatctggatgacacctattgcggaggatgccgctttattgtggaatggccgatgaaggacaaaccttaattataaactattttaagtattaaaaagctgtaattagagaatgagagtaaaatcccttttatgtgtattcttcttgctgctaatggcgggaggagtatttgcgcaagtgcagaccgggtctgcctatcctaaacgtgaatttcgtgcagcatggatacagtcagtaaacggacagttccgtggaatgccgaccgaaaaactgaagcagaatctgatcgggcagttgaattccttgcagaaggcgggaatcaacgccataattttccaggtacgtcccgaagcggatgctctgtatgcttccagactggaaccgtggagtcgtttccttaccggagtgcagggtaaagcgcccgaaccctattgggaccctatgcagtttatgattgatgaatgccataagcgtggtatggagtttcatgcatggattaatccgtatcgcacgaagacgaccttgaagagtgagttggctcccaatcatgtgtacaatatccatccggaatggtttgtcacttatggcgaccagttgtattttgacccggcactgcctgagagccgccggcacatctgcatggtggtgagcgacatcgtttcccgctatgatgtggatgccattcatatggacgattacttttatccttatcccattaagggaaaggatttccctgacgatgcaagttttgcacgttttggcggaggtttcagcaataaaggagactggcgccggagcaacgtgaatgtgctgattaagaaactgcatgaaacaattcgtgaaatcaagccgtgggtgaagttcggggtttctccgtttggcatttaccggaatgaaagcagtgacccgcttggcagtaagaccaaaggcctgcaaaactacgatgacctttatgcggacgtgttgctgtgggcccgtgaaggttggatagactataatattccgcagatttattggcatataggacatccggttgccgactatgagacactggtgaagtggtgggccaggaatacggaaaaccgccccttgtttatcggccagtccgtgatgaacaccgtgcagaatgccgaccccaagaacccgtcgataaatcagcttcctcgcaaaatggccttgcaacgggcctatcagaccatcggtggcagttgccagtggcctgccagtgcggttgtagagaatgcaggcaagtatcgcgatgccctgattgccgaatatcataagtatccggcgctacctcccgttttcgatttcatggataacgaagccccggcaaaggtacgtaagatgaaaccggtgtggacggaagacggatatattcttttctggacagctcccaagtataaagaggaaatgaaccgtgccgtccaatatgtggtctatcgctttaatgacaaagagaaagtgaatatagatgacccttcccatattgtagccatcacgcgcgataatttctataaacttccttacgaagacggaaagacaaagtaccgctatgtggtgacagccttggaccgtctgcataatgaatcgaaatccgttggaaagaagattaaactttaaaaattagggattaaggattagggattaatcattaacgtttaatccttaatccttaataaagtatcaatcctgctattccacaagctacaatcattcctatcgggttcagtttatatttctttgtgcctataaatgccacgaggaagatgaggcagctgatgacgaaggaatatatgtcttctttgggagaactgaagttttccgaattcatcaataccagcgcggctgaggctagcagaccgaccactgccgggcggagcccactgaataccgcttccacggaaggatgtttctggtatttcagaaagaatttgctgatggtcagcatcagtaggaaagaaggaagcaccacggcaaacgtagcaataatagaacctaaaataccatagcttgtaccgtagcaatcagctatcgtagtataacccacataagttgccgaattgattcctatcggaccgggtgtcatctggctgattgccacaatatcagtaaattcctgcgctgtaagccaaccgtaacgggtaactacttcaccttgtatcatagacaacatggcatatccgccaccaaagccgaaaagcccaatcttaaagaatgtatagaataactgtaagaaaaccatgattagtaattaatgataaatggttagtgattaatgattaatgttgctatcctttttaatttttaattctttaatttttaattcttcggacgttgaaaacgtccgaagcagtatcctcctacacctgccgcaatgataatccagatgggagagaagcccaacagccagatgagcagtgctgaaaccaccggtatccatatgttgtatcggtttatccgggccgatttagccatgctgaatgtaggggctgcaatcaatgcaaccactgccgggcgaatacctttgaatatacgttccacaatgatgttgtccttgaagttgtgaaagaacaacgctatggcgaggatgatgagaaacgaaggaagtatggttcccaatgcagtgattatgctccctcgtattccccgtagccggtaccctataaaaatggatatattgacggcaaggatgcccggagcggactgtgatatagcaagcaggtcaatgaaatcttctttggctatccagtttcgtttggttacgatttcgttttctatcagcggtaccatagcataaccgccgccgatggtaaaggctcctatcttaaagaaaatggagaatgcttcaagatatatattcatattcaaaatgttgtaatttactttatttctttatcatctttcccttccttccctctcttggcatactggcttgggctcatattgaaatgtttcttgaatacttcacggaaatatttcgcatcactgaaaccggtcagctctgaaatctcggtgatggtatgcttttgttctttcagaagttgggcagcatgtttcagtcgaatcagccggatgtagtcagccggagcttggtcggtcagtgcctttatcttattgtagaagctggtcctactcatattcagcaggttgcagagcacgtcgacgttgaagcttgggttgtccatattgtcttcgacgctctttttgacggttgcaatgaatttccagtccaagtcgttggagcagttgatgcaatccgtattgttcttctcgtcgttcaggtccaggctggcatatttgtggcgcaacagtgcccggttagtcagcaggttggcaatgtttgcccgcaatataccgatattgaagggtttcacaatatattcatccgctccgctttgcagtccctcgatgatattcttgtcggtattcagtgctgtgagcaggatgatggggatatgtgatgtctcgatgtcgttcttcaggatatgacacaattcgtctcctctcatttccggcatcatgatgtctgaaatgacgaggttgggcatatactccttgacaatggtcagtgcttcttttccattggagcatacttgtatgttgtattgttcagacaatgttctacgcagatattcccttaattcgtcattgtcctctacaataagaattttctggtggttactgttgttttgtgactgttgttgcgtcttgtcgtagattccactggaagcaggggatgatgtagtagaggcattgataggcactccggaggccgaataaacaatccgttcgtttttgggttgagggcgttggattgctttgcggaaatgcttgttccctttggggaacgtgattttgatgcaagagcctttcccttccatgctgctgaagttgagctttcctttatgtaagcgtacaagtttccctaccagaagtagtccgatgccgctgccgataactttggaattgatagcattactgccacggaaatgcatcttgaacagctttttctgttctgaagccggaattccgataccggtatctttcacctcaatactccaggtatcttctgtctcggaagtaaagacatgtacattgccgccgtccggtgtatatttcagtgcgttggatatgatatttttcaaaatggaatccatcttgtccttatctaaccatacgttcagataacggaagctgctttcgtaggttaggttgatgtgttttatgtttgcgtatgaacggaaagcatcgatcgtctcttccatatatgtgctcagttcgtattcggatacgtatagacttccggaataggtgtctgcgcgttcgaaattaataaggttggtggtcaggcgcaacaaggcatttacgtttcgcagggctgtattgatgttgctctgtccgctggaagtcagttgctcgcgttcggtgatttcttccaagggtgctttgatgagcgtcagtggagtacgtatatcatgcgctgtattgacgaagaagcgtattttctcatcggattctttccgctgttttctcaagactattattcgtagagtgatgcttgcaatggatatgataatcactgcatagagtatcagcgcccagaaactgagccagaggggttgctcgataatgatgtccatactgcgttcctccaggacaatacgacggtcttcgttggagatggcacgtacgcggagggtatagttgcccggacccaggttggtaaaacggatgacgttttcctctcccggacggctccaaccctcatagaagccttccagtttccaggagtacagaattagggaaggatagtcatagttgatgtctgagacctgcaatgagaagatgttctggttgtacttcaaacgcaaggtttttgtctcgtcaatatccagaataagtggagaaccttcatccttgggataaacggtctgatagaatacccgcaggtcactgaataccattttgaacttatagtcgcgaggcaggatcatgtctttgttgaattctatggctccatccgtactgccgaaaatgaaattgccgtttttcctcaaggtgcctgaggctgcgttgaaatggtcagacttcagtccttgttctttggtccagttatggaatgtctcttcgacaggatagaaggtggacagaccgtgttctgtactcagaaagatatttcctttaccatcagacaatagtgtatagatattattggaaatcaaggcgcagttgtctctatgataatgtctgaatgtgtttttggtcgtatcatataccagtaaaccggcattgttggtaccgatatacagcattccgtcggaagcttggcatagggagtagatgtagtaggattctaccggcatctggatataggtatacttaccggttgctttttccaacaggtacaagccggtggaagtgcctatccacatatgtgtggagtctttctctatgatggcagtgataccattcaagcccgggaaatggcgtatattttttctggaataatctatttcttttaagttataataccctccgaaccagatgtttcctgaagaatctttcataatggaacggatatacttgtccggccggatattcagattactgaataaagacggagtaaagaactctgtggacagtagtttcttgttgatctggtagatgccggaactatatcctccggcccagatgatgccgggctccacttcgcacaatgagatgaagatatggtttttactatggcttgcggtgtcgaaactgctgagaaaagaatgccattgtttcgtcttgctataataaaggctgatgccgttattggtggcaaaccataaatcgccgtcatggtcttcaatgatggcatttacctggtcattgatgagtgactgtttattgccgatagagtgttttatccattgataatcggcatatcggttgttgcgtacagttataccaatgggataattagccatccagatgcgttgttcactgtcaatgtagatatcattgatggtatttccgttcattgagttgtaccggttatagtcagcaacaatgtatggtatagattcataggtatcggtattcattttgtagacaccggccccgtctgtagctatgaggatttcattgttattgtaggcacggatacagttaatactaacgtccatcagtccggatgggatatgcatgactttgtgctcattcaggtcataggtaaatattccccgttggaaagtaccgataaaaaccttgtgagacggtttatgatagtatagttcgttgatttgtatcttcaaggtgtccaattggttgcagggactgagggtgagggtgttgttggccagctcagcataatgtatgccgatgtcggtcccgatgaagaagtgggtcgaatcaatctgtgcgatatcagtaattcgttctcctatttcgttttgaatgaatgtcaccttctgggtattgctgtcgtacagatatagggcatcttcattgcaaagccatattacgctgttggcatccacaaaaccgtaactgataggggttggacgtcctttcacttcgctttcgggtagcttgtataccaggacaaaacggtcgtgttttgtatcatagcggaacacgcgtcctttcttgccaatttcccatatggttcctttggaatccacatagagccagttcaggttcatcatggaattcacttcctcatctccatccatcagtttgtacggcttgaattcttttccgttgtatcggtcgatgccgtcgtgggtaagaaaccacatgtaacctttgggtcccttttgaatagcatatacccgtctgttgctcaaaccgtcttccacaccgatgtatttgtatgtttgtgcaatgcctataattggcaataatagtagtatgtagaaaaagaagtactttttcataattgtcgagcggttttttgaatgttgtactgagggagagttgaaaataaacacaaaaataatgcttttgtttgagaaaagcaaaaaaagaaagcgaagaatagaaatgtaacaagcgcgggattattcataacccgcgcttgttacatttctataaaaaaggaagttcagttcattttttattggcttccacccacttgcgtgcattgacaaatgcttctacccaaggagtgatttggtcgctgtttacgcggtctgcggggtagcaaccgttctgccaggggaagatggcacgttccaagtggggcatcatggccagatgacgtccgtcggcacttgccaatccggctatggaataatctgagccgttggggttggaagggtattcgtcgtatgagtatttcagcacgacgttgtatttgtcctcgtcgtatggcaaggagaattttccttcaccgtgagctacccagatacccagtttgcttccactcagtgagccgagcattacgctgcggttggtggggacagtaacaccgaggaatctggattcaaacttgtgtgagtcgttatgaagcatcttgccgtttttcttgtgctcgggattgataagattaagttccatcatgagctggcagccgttgcagacacccagtgaaagcgtatcctcgcgtgcataatatttgtcgagcgcttcttttgctttcggattgaagaggaaagcacctgcccaacccttagcagaaccaagaacgtcggagttggagaaaccaccgcagtaaacaatcatgtttacatcttccaacgtttcgcgaccgctgataaggtcggtcatggtaacgtccttcacatcgaagcctgccagatagagtgagtaggccatttcgcgttcgccgttggttcctttttcacggatgatggcggcgcggataccggaaggtgtgcggcggtccgggtcgatgccgtattgtgagaacttgcctttgaagtccggcatgaaggcgaattccaccggttgcatcttgtagttctcgaaacgcttcttggcacagccgttcatggactgcttacggtcaaggagataagaagtagagtaccatacatcacgcatatagtcgatgccaaactgataagtagcatcgccttttgatacaagaatatggcgttcgtctgtcggtttgccgagcttcacgtaacctacgcctgcatcttccaggatttgctttacagcttccttgtgcttgtcgctcacctggataacgatacccgggttctccgcaaacagaatcttgataaggtcttgctccttgattttatccaggttgatttccataccgccttccacattggcaaagcacatttcaagcagtgtagtgataagaccaccggcggaaatatcatgtccggcaagaatcagtcccttgttgaccagttcctgcacggcaaggaaagcatcgcggaagtattcggcatcctgcacgctgggaacttcgtcacctaccttgcccagggtctgagcaaaggcagaaccgccgagtttcaggttgtcgaaactgaagtctatatgataaatggtagtcttttcattgttaaccagcaccggagatacgactttcttgacgtcggaaacttctccaccggcagaaacaattaccgtgcccggagaaattactttgctgccgtcggggtatttctgtgtcatggaaagagagtctttaccggtcggtacattgatttgcagggaacagcagaagtcactcaaggcctttactgccgtgtacagacgggcatcttcaccttcttgcgaacggcaaggccacatccagttggcagaaagggaaacgctgtccagaccttcggcaagcggtgcccaaaccaagttggtcaatgcttcgctgacggaaagaacggagccggctgccgggtcggcaagtgccgcctggggagcatggcccagagaggttgcgatacccttttcgccgcgatagtccaaagctaccacaccacaatcgctcagaggcaactgcaattcaccctggcactgttggcgggcaatcttgcctgttacagaacggtccaccttgtttgttaaccagtctttacaagccacagcttccagttggagcacattggtgaggtattcgtgtagttgggaaacttcgtattggggcatttcgtagtgacgttccacggtcttgtccaccatataggtcttgggggaagagccgaacatctgttctacggcgaggtcgaacggacgtacaccgtcagcttgctggaaggcaaagcgatggtcgccggtcgtttcaccgactacgtacatcggggcacgctcacgttcggctaccttgcgtacatgttcgatggcctcttcctgaatcagcaagcccatgcgttcctggctttcgttggcaatgatttccttggcagacagagtcgtgtcaccgatgggcaacttgctcatgtcaattaaaccgccgcattcctctaccaattcggacagacagtttacatgtccggcagagccgtggtcgtggatggaaaccaccggattggtctcttcctcacaaagtgcgcgtaccacgttgtaggcgcgtttctgcatttcggcgttggcgcgttgcacggcattcagctcgatgccactgctgtagcgtccggtatctacggaagatacggagccgccgcccaaaccgatgcgataattgtctccaccgatgacaaccactttgttgctggcttccggtgtacctttcaaacagtcacgctgggtaccgtagcctacgcctccggcaagcataatcactttgtcgtaaccatagacttcatctttttccttatgttcgaaagtgagcacggaaccgcagattagcggttggccgaatttgttcccgaaatcactggcaccattggaggctttgattagtatttgttcgggagtttgatacagccatttgcgtaccggcagaatctcttcccagggacgtccttcttccgtacgggggtaggaggtcatgtaaacggctgttccggcaatcggccaagagcccttaccgccgcccatacggtcgcgaatctcaccgcccgtaccggtagacgcaccgttgaacggttctactgttgtgggaaagttatgtgtttccgctttcagggagatgacactcttgatgtcctttacttggaaatagtcgggcttggagtggtctgccggagcaaactgttcgataaccggaccttcggcaaaggctacattgtctttgtaggcagagataattttgttgggattctcttgtgtagttttctttatcatctggaagagtgaagattcctgttccactccatcgatgatgaatgtcccgccgaagattttgtgacggcagtgctcggagttgatttgcgcgaagccgaatacttcggagtctgtcagagggcgcccgaggtctttctctaccttcttgaggtaatccatttcctctttggagagtgccagaccttccttttcattgtatgcctccaggtcttcgatgtgtacaatcggttccggctgccggttggttgtaaatacattctggtccagccccttgtacatacgttgcagcatcggatcgtggtctgcgttctcatcttttacggggaagtactcctcgatgcgtatgatgccgtccagccccatattctgggtgatttctacggcgtttgtactccaaggagtaatcatctcacggcgcgggccgacgaaatgtcctttcaggttgtcttcactttcgggggtggcttctccaaaaagccagcagagtttgtcgctgtctgcctgggggagttcgtgattacattctacggcaatcacactcttggatggggttctgaaaaaaagaatcatagttatatttacgattttacgatttacgattttacgattgaagttacttctttgagtatcttcatcttttcttcttgggggcaaagatacgtaaaatcggtggggaggagaaaaaaaggaaaacaaaaaacgcatgcaattttactcgtatgcgttttttgttctgtttcataaaaaccggatgtgtgttattgtatgacgatttcatccgtaaataagaattgcttcttcccttgtatggcatggaagcgtacatatcgtgcctcagtgggggtgccaatccagccgaaatcacggaatatcacgtcctttccggcctcttcctcgctgcagatatcactgcccagcagggtgaagttcttgccatcaacagatgcccatacttccactttggcagggagaaatacttgtggggtacggatttgcatgaagttggccatgacccgatgtatggcggtcacttcgcccaggtcgataatggcatccaaatcattggggcagaagccctgccatcgtccgtccatgtagcttttgccgccgcgaagtccgtcgaggagaccggcgtcaccgccgcctttgtatacttctttatgctgatagtatctgccgcccggtgcataggttatctttttgcctatgcccttatggtagtcggtgcgcaggtgaaggctttttccgataggcttttctccgtcgaaaaggcgtgcggtcagcaatatggagtcttttacggcaaacggtttcttgtataacttggaagatacagtcggttcggagccgtccgttgtgtagcggatgtcaatcggatgtttttcggaggtgagggacagcatgatttttttcttggcatagtcaacggtctggctggtctgcacttgttccgacaaggtgaacgggttgtaccctttcgtccggatgtatcgtatttcgttgttgatacgtctcttgaaactctccggatgcttgttctccatgggagtccagcctacttctgccagagcgatgatgcgtgggtatatcatatattcggcatgttcgtaagtgggcagatattcagcccatacattgccttgcacgcctaatatgtatttgcagatatcacttcccaatgaatcgggagccgggtcgtaggagtaggtctgtccgatggggatgcaggcgccaaacgccagcggctgtgtctcagggtcatcctggtagtggtccagatagcagtggctctccggtgtcatgatggcgtaatgccccatgcgggcggcggcaatgccaccctccgtaccccgccacgacatgacggttgcgttgggggccaggcctccatccagtatctcgtcccagccgatgatttcacgccctttgtcgttgaggtacttctctatgcggactatcatatagctttgcagctcactttcatctttgagcccttcttccttcatgcgcttctggcatttggggcatgccttccagtggcgtctgctggcttcatcacctccaatatggatataccgggaagggaacagccgtatcacttcatccagcacatcttcgaagaacttgaaggtctcttcgtttccgatacagacttcaccggatgtataaggcttgccggtacaggacagctgtggataggctgccagtacttctcccgagtgtcccggcatttctatttcggggataacggtgacatgcctcaagcgggcatattccagaacctcacgtacatccgcttccgtatagtagcctccataggctccttcttcatccttctcgcagaagtgatggtcatatttcccccaatcctgcagattggcggcttttctccaggctgcgaattctgtcaggcggggatagcccggaatctccagccgccatccggcaccgtcggtcagatgccaatgcaggcggttgattttgtaggtggctaccaggtctatttgtttcttgacatagtccgtgttaaagaagtgtcttgaaacatccaggtgcagcccacgataggggaatctgggttcgtccttgatggtcgtgactggcagttccttcccgttacgggcaagttgtgccagggtttgcagtccatagaaggcacctgctgcggaggaggcctgaatgtttacaccttgtttgctgactgtcaggttgtagccttcggcagcgattggattatccgttgcgtccgttatttctatcgttacaaaagggttcttgtcgacaagcttcatggggatggcaaagtccggcagataggccagcaagtcattcatgtcggatttcgccagattggtcgagaaggttaccgtagatggcagttctactgtttttgacgttgtttgggcatactgcggatatggaaccacaccgagttccttgggggcttcgcatgccgtcagtagtaagacggccatggaaacgagtgttagagttttttttattcgtttcataagggggtattgttaagttcggaggtaaatatacggaataatatgtaaaatggataatctttacttcttaaaatccttttccgtcgaaaaaacgttaacactattcgttcgtctcataaaaaagtccgatatttgcagccatgattcagatagagaccatatttgacatattgtggaaggggttcattatcggcgtcattgtgtccgcgccattgggtcctgtaggagtattgtgtattcagcgtactttgaataaaggacggtggtatggtttcgtaacggggataggagcttcgctaagcgatattgcatatgctttgctgacgggctacgggatgagtttcgtttttgattatgtcaacaagaacatcttttacctgcaacttttcggaagcattcttctgttggcgtttggcgtttatacgttccgcagcaatccggtacagtccatccgtccggtatccatcaacaagggttcctattttcataacttcataacggcgtttgccgtcacgctttccaatcctctgattatattcctttttgtaggccttttcgcccgcttcgcttttgtaagtgagggagtgctggtattcgaggccgttaccggatacttggccatcgcattgggcgctttggcatggtggtttggcattaccttttttgtcaataaagtccgtacacaattcaacttgcgtggcatctggatgctgaaccgtattatcgggagcattgtcattgtggtgtctgtggtgggattggtgtttacgctgatgggtgaatcgctgtattgagtgggaaggtgaaaaatcataattcatacattttatcgtgaagattgcgcaacaactgaaagaaaagaatatagccgaataccttatatatatgtggcaggtggaggatttgctccgtgccaacggctgtgacatagaccggatacgccagaacatcattttgcgctatccggaggaggaacggcctgcgttggaagaatggtatggaaatctggcagatatgatgcgtgcggaaggcgtaacggaaaaaggacatctgcaaatcaaccggaatgtcattctgaacctgacggagctgcatggcgaattgctggcttctacgaaatatccgttctataatgcggcttatttcaaggcactgccttttatcgtggagctgcgccagaagagcggccggaaagaggagcctgaggtagacacttgtttcgaggcactttatggagtgctgctgttgcgcttgcagaagaaggaaatcagtcagggcacggcaaaggctatggaggccatcagcggtttcgtctcgttgcttgccaactattatgacaaggagaagcggggagaattggagttgatggataattgataattatggaggaaaatattgttcatcgtaacattctatatataagtgtaactttattaaatgaatattctgataaccggtgccaacggtcaacttggcaatgaaatgcgagtgttgtcgaaagaaaacggacaacatgcttattttttcactgacgtgcaggaattggacatttgcgacgaacaatctgtgcatgggtttgtgaaggacaaccggatagatgtaatcgtgaattgcgccgcttatacggctgtagacaaggcggaagacaatcaggagctttgcgacaagctgaaccatgtcgctccgggctatctggctgccgctgccgaagcttgcggtgctgcattgatacaagtgtctaccgactatgtttttgacggaaccggacacatcccctatacggaagaggcggctacttgtcccgattcagtatatggttttaccaaactggcgggtgagcaggcggtgatgaagcattgcagccgtgccatgattatccgtacggcgtggctctattccatttatggaaataattttgtgaagacgatgctccgtttgggacgcgagcgcgagacgctgggagttgtattcgaccagataggtacgccgacatacgccaatgatttggcacgcgccatctttgcggctatcagccagggaatcgtgcccggcatctatcacttcagcaacgagggagtctgctcgtggtatgattttacgttggctatccatcgtctggcaggtatcaagagctgcaaggtaagtccgctgcatacggacgaattccctgccaaggcgccgcgtccgcattattccgtgttggacaagacaaagataaagaagacattcggcatcgatataccccattgggaggcgagccttgccgtctgcatgaagaatttggaagagtgattattactgactaattgatatatggccaataacaacgaaatagagagacggagaacgtttgcgattatcgcgcatccggatgccggtaagacatcattgaccgagaagctgttgctttttggtggacaaatccaggtggcgggtgccgtaaagagcaataagataaagaagacggcaacgtcggactggatggatattgaaaaacagcgtggtatttccgttaccacttctgtaatggagttcgactaccatgactacaaggtcaacatccttgatactccgggtcaccaggactttgctgaagatacctaccgcacgctgacggccgtggatagcgttatcatcgtggtggacggtgcgaaaggtgtggaaacgcagacacgcaagctgatggaggtctgccgtatgcgtaatacgccggtgattatcttcatcaacaagatggaccgtgaagccaaagacccgttcgacctgctggacgagctggaggaggaactgcacatccacgtgcgtcccttgacgtggcctatcgagagcggtgtccgtttcaagggtgtctacaatatctacgagcataacctcaacctctaccagcccagcaagcaggtagtgacggagaaggtggaagtggacatccataccgaggagctggacaaccagattggcgcccaactggccgacaagctgcgcggagaattggaactgatagacggtgtttaccccgaattcgataaggaggaatacttgaaaggagagcttgctcccgtattcttcggttcggcactgaataatttcggtgtgcaggaactgttggattgctttgtggagattgctcccagtccccgtcccgtgaaggcggaagaacgtgaggtggagccggaagaacctaaatttaccggattcatctttaagataaccgccaatatcgacccgaatcaccgttcatgtatcgctttctgcaaaatctgctccgggaagtttgtacgcaatgccccgtacttgcatgtacgtcatggcaagacgatgcgtttctcgtcgcctacgcagttcatggcgcagcgcaagacaactgtcgatgaggcttgggcgggagatattatcggcctgccggataacggtacgttcaagattggcgatacgctgaccgaaggcgaggcgcttcacttcaaggggcttccgagtttctcgccggagatgttcaagtacattgagaatgccgacccaatgaagcagaaacagcttgccaagggtatcgaccagttgatggacgaaggtgtggcgcagttgttcgtcaaccagttcaacgggcgtaagattatcggtacggtggggcagttgcagttcgaggtcatccagtatcgtctggagaatgaatacagtgcgaagtgccgttgggagccgctcagtctgtataaagcctgctggattgagagcgatgatgcggctgaactggaagccttcaagaagcgcaaataccagtacatggcgaaagaccgcgagggtagggatgtgttcctggcggacagcggatatgtgttgcagatggcgcagatggacttcaagcatatcaagttccactttacgagcgagttctaagctatacgatttttgctgactcacggctataaatgatgcaagtcgaagaaaaagaggaggtacaaagtaatgaaaaactttgtacctctttatttattgtgggaagaaagtgttacctttgtttctgcaacgattaatatgcattgattatgaaaactgttgaagtaagctcgttccttaccgattttacaccttgcttattataaacacaaaatttcaagatgaaacataccttcctttttctcctgctgattctccttctggggctgacagcctgctcgaaacctgccgatagaactttgatgaactacgaacagtccctttctcatgctgactcgttggtgcaatgcggtgctgtcgacagtgcccgggccgtccgcctgatttccggtttgcaccgtgagtataatcagataaaggagctttccgatggcaggcatgtgcggctgaagccggtcagtggttacgaacgttttttctggggagtgttttctgtgattatgttcagcatttccggtgctatgctgttcagccttatccgtttcaagaaagaacgtagtcaccgtaactatcttgtcaccctgagtgaaaacgaacagcgcttgcgcaacaatgaacgcgagcgcgaggaactggaagaatgcctgaaggagatgtcgctgaccgacgaagagcgcgaagaagtgcatagctcgctgacaaacctcatggaacatggcagccgtctggataaggaaaacgagtcactccgtgcccgtctcaaggagtatgaagacaaccctgtgccccgcgaactggaactgttgaggaaagagggcgagcgtgtccggatgctcgacgggcaggtgcaggcgcttgcttccgccatgatagacgcagacgaagtggtgaagcagttgcgcatccagcccaaattccttgcggacagccagtgggactacttgcagaagcttactgacagagtatacaagggcgcttccaaacgccttgtcctgcgctttccccagcttacgcctgccgacagccagctctgcatgcttatccgcctgcacttcagcaatgcacagattgccacgctcattgccgtgtctcccgcttccgtgtcccagcagaagttccgcctgaagaagcggatgatgcaggcggatgggaggctgtttgccgacggagagacgctggagggagtgattggaagctgctgagaatgatagattcttcaagaatctcgaagtttcaagaagattttagctgcactttcatcgccgaatcaggtataatctcacttggtatttcccaatttccataaactgtttttttgccaacgcttgttccggatgtggttctgtgggtgggaaatctatactgagccctattcagtcgtatacttagataccctcagtcgtatacttagggtacctcagtcgtatagtgagatacccccacttcagaaggtgttttgggagggggatgggctgtggcggcttgatagcttgaagcagatgctttggggggttgaaatgttgttgcaaaatgagatgaaaaactgattggtgacttaaaaaaatgttattccttgttatttcaatagttcgctttccatcggactgctaaagtgttgaattgattacggatgagagcatagaatcaaattgctccataattgaaaatatccctccaaaagaagtgagtttaccggattttatgcttatttttgtcatgcttgttgaagatttcttatgttttttttgcaacactaatttaagtgaatcttctgacatggcaaagtactgggcaatattttattgctcagtactttaaataattgtttttgtaaagtgtcgcggaattaaggtttaataaaaacgaggatggaacatcccaaattaataaacaatataagcgagcgtgtagtggatgacatcaaaggacggttatccaaaggcacttttgtgtctattgctgcggcttcattctccatctatgcctacgaagcattgaaagaagaattggagcaagtggaacaattgcgtttcattttcacgtctcctactttcatcaaggataaatcaaagaaagagaaacgggagtttttcatccctaaacttaaccgggaacgtaatttatatggcacagactttgaacttcgccttcgtaaccaattatcacaaaaagcaattgccaaagagtgtgcagactggattcgtagaaaagtgcagttccgttccaatgcttcgcaagaacagatgggtggatttatgcacgtcaacaacgaaactcaacgggtttacctcccgtttaatgagtttactaccacacaattgggctgtgaacgtggtgctaatgtgtataatgtggtaaatgtattgccttcaccgacagcaaacgcatatctggaaattttcaatgagcaatggaataacgatgagaaatttgaggatgtaacgaagcgtatattggagtacatagacactgtatatcaagaaaatgcaccggagtatgtctattttattgctctttataatatctttaatgagtttttggaagacatcagcgaagatgtgttgcccaatgaacgcacggggttcaaaacgagtattatttggaataaactctataatttccaacgtgatgctgcgctggctatcattaacaagttggaaaaatacaatggttgcatccttgccgattcagtaggtcttggcaagacctttacggcattggcggttatcaagtattacgagaaccgtaataagtcggtgcttgtactttgccctaaaaaactgaatgacaactggcagactttccgtgccaattacaaaaacaaccccgtagctgccgatcggctaaggtatgacatccttttccactccgacctttcacgtgaccgtggtttgagtaatggcctcgacttggagcatgtgaattggggaaactatgacttgattgtgattgacgaaagccacaacttccgcaatggcggtaatgtggacgaagaggatgaagcggattttgatacgctcgtagagacagaccgccacaaggagaaccgttatcagcggttgatgcgacgtgtcatccgtcagggtgtgaagacaaaagtgctcatgctttcagcaactccggtcaataatcggttcggtgatttgaagaaccagttacaactggcatacgaggggcgtgtggagaatatcaacgaagcccttgaacttgaccgtaacattgacgacatattcaagtctgctcagactgcctataatcgttgggctaagttggagccaagcgaacggactacggaacgattgctgtcaagtcttcagtttgacttttttcagatgctcgatgccgtgaccatcgcacgtagtcgtagccatatcatcaagtattacgacacgaaagatattggcgagtttcctaagcggcttgcccccttgtctcgccgtccgcgtttgacggacttgggcgatgccatcaatttcaaggacattgccgaacagctcaatgccctgaatctttccatatacaccccttcgctttatctcttcgattgtgcccgtagcggttacagtatcgactacgatggtgaaggtctgtctattgacgggcgtgagaaaggcttgcgcaaactcatggccaccaacctgttgaaacgtctggagagttcggtcaattctttccgactgacgcttaaccgcatccatgagtacattcggcagacaatggaactgatagatgcatacgacaagaaatattccggtgcaaccattgatgtatcttctttcactgatgatatggattcatccgaaggcgacactgatccgtttgccaccaagaagtcgaagatttcattggctgacatggactatgtgagttggcgacgcgatcttgaagccgattttgaacggttagatctgctcttgttgatgttgaaggacattacgcccgaacatgacagcaagttacagatgcttatcggggatttgaaacataaatttagtaacccgataaacggagaaaacaagaaagtgcttatatttacggcatttgccgacacagccaattatctctatgagcagttatccacgaagataaaggaaacctgcggactcgatacggctctcatcaccggctctaccgatggcagatgcacattgccgaagtttcctatgtcgttcaataatgtgctgacttatttttcacctttgtcgaaagaccgtttagccctctttcccaatgccacggatgagattgatgtacttatagctactgattgtatcagcgaaggccaaaatttacaggattgcgactacctcatcaattatgacattcattggaatcccgtacgcatcatccagcgtttcgggcgtattgaccgtatcggtagccgtaacaaacaaatccagcttgtcaactactggccggatatggaacttgacgactatattcagctcaaaggacgtgtcgaaagtcgaatgaaagctactatccttaccgcagcaggtaccggcaatccgctttctatgggcgaagaagccgatttggaatatcgccttggacaactaaagaagttacagaatgaagtggtggatattgaagatatggacaccggtatcaacatcatggatttgggattgaacgagtttcggcttgacctcttgcaatatgtcaaggaacatccggatattgaacatgcacctttcggattgaatgcggtggtagccggttccgaattggcgaaaccgggcgtgatgtttgtgttgaagaaccgcaacaatgccgttaatattgaccgtaagaatcaactgcatccgttctacatggtctatctggcagacgatggagaggttatttgcgaccatctgcaccctaaacaactgctcgacatcatgcgtgcgctctgtaaaaatcaaaacgattatgaccgtgcgctctgtgctgcggtcaaccgtgaaacgcaagacggccgccgcatgaccaagtacaacacgttgctccaaatggctattgacagcatcgtaagcattaaggaagaaacagacattgagagccttttctctgtgggtgagacaacagccttgcatggagaaattaaaggtttggacgactttgagttgataaccttcttaataattaaagagaaatgaaattatctgatatagaaataggtactatagtcaacttcttaaatgaaggaggttatgtcctggactttagtacagctgattttgatgcttttacctataaaagtataggcgttccactttgtgaaacatatagactttcaaaaggcaaatctctgatagcatatatcaacgatgcaaaatatgaagataaaatgaagctacttagcgatttaatcagatattacgaactttcttcaatgaaggaacatgatgaagaaaatcgtaaaagccgtgcggttgcttacaaaaaatgccgtagcatacttgataaagcaggtggtacaatggttatgaccgctacggctgaaactttaaaagaagcttttgacagcgattacatatcagcccaaattgatttaatgctcaatctgaaggacggaaatccaacagaagcaattggtaaggctaaagaactaattgaaagttgttgtaaaacaatacttgaatttgaaggctgtactgtagataaagattgggaagttccacgtcttgttgatgaaactttcaaacattttcatctgatgcctaaaaatatctctgatgatgttaaaggagctaagtctataaaggctattcttggtaatcttaaagctattgcacaaggcgttgcagaactgagaaatctgtatggtagcggacatggcaagtccagttcatataaagggcttgaatctcgtcatgctagtttagcaattggaagtagtacaactctcgtgcgctttttatgggattcgtatgaacggcatcataataatgaggttaattagatgagacaaaatggacaatatacttaactttcctacctccacgcacgtggacagattggtacccaagacagccttttacaagcatttggagattaacacacgcttaaagacgcgatttgtggaagatgtggaacgcatacaatggctctataagttgactccatccaccatgaatgtggacgagggtaaggcggtgcatgaaattgtggtgttcttggtgacgctcaaagtgaaagatacgccggatgatgtgtttcttgccatcgaccgtctgatgccgcgccatgtggtgtttgtgctgcaatatgtcaatcgtggtagattgttgctcaactacaaggaatggacggatgtggataagacacgattcaatatcttgaaaactttccacacag

SEQ ID NO: 4432 - DNA, 39592 bp, Unknown
  gut microbiota DNA sequence
atacaggagaggttccttatactcaaagcatagttcaagcacctggtactgacgataatgttcctccttccaaagtaggttacaatataatgaaagtgtatggaatagagacaaacggcggtggggtgttggttgattctgacaaaaaagaatatggtatctttaattataccggacatataggcggtgctcattacttttacattaagtcaggcacatacactataaaatctttgagtgctaccaatggaaattatatttatttggagtatggaaatgttagacaaccgctttctgcaggtaggtctttcacagttcctgcgtcattcttctctattgtattttctaaggaggcactttaaaagtaatttggatttatagataagctattcaacccaaagcagttgtcgttacccccgacctcattggtcgcccgtaacatcggataattgtaatgcattaaccgaatagtacaattgtttaatggttaaatcaggaaaaggcgggtcgtgagattcgccttttcgcattcattctctattgcctttccggatgcaattcacattcctttttgtattacccctgatgtcagggcgcagaatgtttctttttatccctgcatctccttcacctcttccttccatcctcctgttcatcggctttcccggtgaaaccgctttccgtcctcaccgccccgcctttgcatcgcgcgacacaccgtagtaccccggcatggcccggtagatgggttgcgtgggcttccccacattcttcagcttgccctcttgctgcaaccgtttcaggtggacgttcgcggtggtgcgcgccatgccgcacagcgcctggaaatcgctgcgaatcagcacgtcgtggtcggcaaagtattctttcagcttcatgtctatctccacttccgaaagcttctgggagtggcgggtgtatttgctgcggatggcactgactcccgtcatcgcttgtttcagcctgacgtcgggacggaagctgatgctcttcagccggagtttcaggtgcttgttcggggtgctgcgggtcactttctgtgtggcttccagggtgggggcgaagtagcccagcccttcgatgtgcacctcgtggccgttgcgcagttcttcgccgcagatttgcgtcaggcagtctatcgcgttcatcacgtcgcccaccgtgagcgagctgcgggcatgcacgcggttgtagagctgccgcatggttactttcccgttgagcaacgggcggggatggaggcctctctcttccggggcttcctcattggtgcccggattctcgtaccagtcatatagtattgccatatcaataggttttagtgcgttcaacgtatttgtttcttccctcggaagtgtcttcctgtaagtgaacgactccggtcggccgaacgaacgacccgggccgttcgattgaacaacctcggtcggtcgattgaacgacccgggtcgttcacttgtaaggaaccgtgcaaatatactgaaaataaagggttccgcagcataaataggtatgtttgtcagcaggaatgatttttgaagaataatcggagaatggcttgcaaaacgccctcggcaggcagtaactttggcgaagaggcgagaggaaagaaaggatgatgcccttccccggaaccgccaaacaatcattttaataaaaatacttatgaagaaaaaactgatgactttgcagcagcaccgactcttgaaggaggcgggccggctgattgccttttcggaaaggctgaaacacgcacaaaaagaaacgaccggccgaaaccgggaggagcgggaagagaagtgccgccggagcgcgaaagccgcaagcgccgtggctgcgctgagcggcgacatcgaggagttcctcgcttcgcgctacgactttcgctacaacctgctgacggacgaaaccgaattccgcgccgccgggcaacgctctgccgccttcacccccgtgggcaagcgcgaactgaacactttctgcatcgaagcccatgccgaaggcataccttgctgggacaaggacctgagccggtacgtctattccacctacatccctgcctaccaccccttccagctctatatggacgaactgcccgactgggacggcaaggaccggctgaccgcgcttgcctgccgcgtctcttcccggccccactgggtgcggggattccatacctggatgctgggacttgcctcgcaatggatgggcgtgtccgggctgcatgccaacagcgtggctcccgtgcttgtcagccgcgaacagggacgacggaaatccagcttctgccgtgccttgatgcccgatgtgctggcacgctactacaccgacaacctgaaactgacctcgcagggacaagccgaaaggatgctggcggaaatggggctgctcaatatggacgagttcgacaagtatgccgaaagcaagatgccgctgctgaaaaacctgatgcagatgtcggtgctcaacatccgcaaggcctatcagcagaacttcaggcaactaccccgtatcgcctcgttcatcggcaccagcaaccgcttcgacctgctgaccgaccccacggggagccggcgtttcctctgcatcgaggtgaagcacgacatcgactgcaccggcatagagcacgaccggattttcgcccaactgaaagcggaactcattgccggacggcgcagctggttcaccaagtcggaggaggaggaactgcaacggcacaacgaggctttctatcgtgtcagccttgccgaggaggcggttcgcagcttgttccgtgccccgcttccggcagagaagagcatcgacctgactgccgccgacatctttgacgagttgcaaaaaacgcatcccgccctgatgcgtggcagcaatcccgtgcagttcggctcggtgctgttgcgggcgggactgaaacgccggcatacgaagtacggcaacgtatacgaggtggtgagaaggaaaaaagaagtttcaccggaaagggttgaacgatagggaaataatgcgaaaggtgaaggggtgaaggaagagaaagccggtttatagtctcattacggattgacatagattcctattaattcaggttgtagatgccgatgggataaatattttcgctcataataactgtatattttatagatttctacaaaagtaacttctttataagaacaaaacaagcgaaagttgcgattttcactactccttgtcagataaaaaacttatctttgcgattgaaacaatctcttgttaatgatatgaaatacacatcatattcttatccttcaggcagggcggaagtggctgcatttgttgtgaccggcggagtgacggaataccatgtgatgatacatgccactgacccgaaacagacctatcgtgaacagatgaatgtcgtgttggatgcgtatgccgctttactgaaaaaagaactgtccggagccgtggcggtttttaaaagatacttcctgagtgatgccgccaaccaagcggaactgttgcttgccgctacggcggaaagctccgattgcgcgctgtctgtggtggaacagcctccgctggatggtaccaagattgctttgtgggcctatctacagaccgatgtgcagacacgagtgctgccgaacggactgtatgaagtgaaacacggtgtttaccgccagctctggatgggaggcagcttcaaccgtgccgccaattcggaataccagatgcgtcttttgctcaacgactatgccatgcaactgatggaggaagggtgtactctggccgacaattgcctgcgtacctggatatttgtgcagaatgtggattgcaattatgccggtgtagtcaaggcacgcaatgagatgttcgtcacccagaacctgacggagaacacgcactatattgccagtaccggtatcggtgggcgtcatgccgacccgaaggcattggtgatgcttgacgcttttgccgtagcgggattaaagcccggacaaatcaaatatctctatgcccgcacacacttgaatcccacttatgagtatggagtcagtttcgaacggggaacggcggtggattacgacgaccgccggcaagtactcatttccggtacggcgagtatcaacaaccggggggaagtgctgtatgccggagatgtacgtcgtcagacagaacggatgtgggagaatgtggaagctctgctgaaggaggctgactgcggctttggagatgtggggcatatcattgtctatctgcgtgatattgcggactatgctgtagtgaaagagatgtttgacaagcgttttcccgatacgccgagagtgattacgctggctcccgtctgtcgcccggggtggctggtggaaatggagtgtatggcggtgaagaaaatctctgattaaaaatattatctttggttaattgaatattaggctgacagttggtaaacgcttacctttgttgaaattctaatgtataaggatgaaaacacgtatcttgtttttctgtatcagttgccttctttgggcaagttgtgaaaattccagacagaattatgtgattgaaggaacgttgccgtcggtgaaatacgacggggaatggatatacctcgtgccgatggagaatgcgccggggcgggtggattctgtaaagataaccaatgcctctttttctttttccggacaaggggaggagatgagggtgttgcgtctgcgccatctgctgcgtatctacatccaggaactgctggtggtgacggagccgggaaccatacatgtgaaggccgactctgtcggctcggtaacgggcactccacaaaatgatgcccttcagaaatggaaagaggggagggaaaagaagcaagaggcttaccattttatccggacgggactacggaatgccaccggaaaagattcactgcatctgatacagatacgtgacagtctgaggatgcaggagcaggaagcgaactttcttttcctgaaagagcagggaaacaatacgttggggacattcatgcggaagatggtgcgtggctccttgacggaagaacaacaaaaactgttggatgaaagcttgcagaaggaaatacattgaatggggagcggcaggaatcggcgctttggcgttgttcctctttttcttccggatattgccctatcatctgttccatcgggagcagacacagctctttctgcttgccaccgaaccattggccgggtatctgcggcatccggcggctctggcacgtctgtcaggagatttcctcactcaattcttttattacgaagggggtggtccggccataatggctgtcgtgctgttgctttggggagtggtggtgtttcgtttgttggttccgtacatgggacgttgggcgtgggttcctacggtgttggcggtggcttgggaggcaggaaggcaatgcggattgagttatccgctttccggcacaatcgctttaaccggtatcgggggtgttttgttgttgtgtcgtagctgcatgcgacgttcgtggaagtcgggcttaccggtaagcatattggcggtattgtccggctattggctgtttggctgtggcgattggtcgtcacgatggtacaatatgcccgatttagggcgggaatatcttttggcgttggattcggaaatgtatttcggccgttcggaaaaagtacggaaactgttggcggagggtgaataccgctctccgttcactgcctattattataatttgctgaatgcacagcagaaccgacttcccgaccggctgatggatggttatcaaccggcttcgcaagggctgtttctgcccgtggctccccattctacctacctcactatttatgcagccaatgaagtctggtttgcgttgggagatatgacgatggctgaacatgctgccattctgggaatgattttttctccgcatcataccggagcaagagctgtcaagcgtttggcggaaatcaacctggtgaacggtgatgaggcggcggctatgaaatatcttcgtctcctgcaaaagacaatgtgttaccgtgattgggcagaacgacgtattcccggaaaacagacggccgaagtctgccaatggctggaacggaagcggttgttgttgcctgcaacggatactttgcgttcttctgccgacattccgctttcacttcgtcatctgttacgtaataatcctgataatacgttggcatgcgattaccttctctgctttgatttgctgaataaggatattggggctttcgccggagattatcgggagtttgctgcaaagaagtttccttccagattgtatgccgaaggtttacttatctatcttgccgggaaaaaggcttcgttggatgaagtggaaaaatggaatataccgcctcaagtattggatgaattcagtgaatatacccggctgtacgaggcaaacgatggtaatggtgcccctttgcaagccaaatacggaaaaacatattggttttatttccactatgctacgatgaaaaaggggaagtgatttatgatgaacatagatatgaaatatatacaagttgttgtgggactgttactgtgctactgcctatatgcttgcagtccccgtccggagtctgtacagcctgcagaccggttattggtgctctatccggaatatcaggatgtaaccattccctacaatgtggctcctttgaatttccttgtgcggaatgaaggggtggatgcggtatgcgtgagtgtaaagggagcatcggacagcttggagataaatgcgcgcgggaacaaggcgatattccccttgaaagcttggcgtgcattgcttgaagcggagaaggaacatactttggaagtagttgttactgcccgtaccgacggccgctggctgcgctatccttcctttgcatggcaggtagtggcggacaagcttgacgcctatgtcagttaccgtctgatagagcccggttatgaggtatggaataccttgcagatacgtgaacgttgtattgagaatttcgaagagcgtattttggcggataacagtcagacagacggcaagtgcatgaactgtcatgtgcacggaggaaatagtggcaacctttcgatgttccatcttcggggtgagggaggggggactgtcctgaaccgtgacggcaagctccgtaagcttgccttgaagaatgaacagatgatatctgcggctgtctacggggatttccatcctgacgggcggtatggtgtgttctcgtctaatgtgattattcccatgttccatacggaaagtaaccgccgtctggaagtttacgataccgtctccgatttggctgtcgccgattttgacggaaaccggatgattctatctccgcttacggcggattccaccgtattggaaacttttcccacattctctgccgatgggaaatggatatattactgctcagctccgactgttccattgccggacagcgtacagcaattacgctattcgctttgccgcattgcgttcgatgccaatcacggcgcatggggtgaccgcgtggataccctttggaatgcccggctggagaaaggctccgtgtgtcatccgaaagcctcaccggacggacgctacctgctttataccgttgctgattatggaacattccccatttggcaccgggagacggaattgcagctgatggatttgcagacgggcgccatcgactccctgccaatggtcaactccagccgttcggacacttatcacagttggtcgtcaggcagccgttggtttgcctttgccagcaagcggggtgacgggcagtacgggcgggtttattttgcctatctggatgccgaagggaaggcgcataagccttttgtgctaccccagtcggaccctgaaaaagacgatttgacattgaaatcctacaatatccccgatttgtcggctactcccgttccttttgatgcttcttccatcaagcggataaaccggcaactgaaggctgaggaattcaaatgacaagacatacagagagtaccaaattgtaaataataaattgtaaatagaaaatgttattatttctgaaaaagacttggaagatagggttgtcgatactttttggcgtagcggtgcttctcttttggggaagcgtatatccggcccatatttcctatcaggagcagttccagcttttcttgttcgatgccgactactggtgggaacggatagtggttcccggtgggttggccgattatatcgcagagtatctgacgcagttctattatcacgtgtgggcgggagcttgtattctggcttttttgtacgtgttgttgcaacggttggtttggaaactggcgaaggagcagggtgcggctgatgtgtattattcgctgagttttctgcccatcattgtcttgtggcatttcatgggtgatgaaaatgcgatgctgtcattggcggtggctctgctgttagcattgtctgcatcctgctggtatgcggatttgaaagggaagtggcagcgtgtggcatacattctgatagtccttccgctgctttactggacagcgggtgcggtacacttcatctttatgggctgggtgattgtacgcgagttccggttgaatcttaaaggtaagaatttctggggtggtgtcggagtgttctggggtgtaggattgtggggtatcggttgtccgctattggcaagcatgtgggtacaattccccatttaccgtctgatgggtggtataggatattaccgtttcccggcagtgattccctggatagagatagggcttgccgtattactggttgttctccccttcctgctgtccgctttgcccgctttgaagaagaagccggtattttatggagttctgcaagtggtggcggtaacattgttcggctattactacgtggcggccggttgcgatatggataaagaggaagcgatggagtatgaccagctggtacgtaataaacaatggcaggagattatagaaaaggcagaagagaagtcaccggtttcacctttcggcgtgacctgcctgaatcttgctttgggaaagacgggacagatgggcgaccgtatgttcgagttttaccagaacgggacggaagggctgctgccggagtttcagcgtgattttacttctccgttgcccaccagtgaggcatactatcatttgggtatggtcaatacggcacagcgtttcacttttgaggcgatggaggccatacctaacttcaacaagagtggccgttgcttcaagcgtctggcagagacgaacctgataaacgggcaatacgaagtggcagccaagtacctgcgtttgttgaggaagacaatcttctacagggattgggcagaggatgccatgacctatctgtataatgaggaaaaaatcaatgcccacaaggagtggggttggttaaggcagatacgctatacggaagacttcttgttcagcagccaggaaacggacatcatgctggggctgctttaccagcacaaccaccggaaccggatggcatttgagtatatgctggcctatgtcctgcagcaacgtgatttggaacgtttcatgaagtactatccgctgggtaagcatgccggctacgaccatattccccgcagctatcaagaggcgttgatatatgtatggacacagacgcacaagaacttccagggtatgccgtggagcatttcgccccaagtggtgcgggatgtaacggaatttgcgcggatatatacctcgcagcagaatgcccggcagatgttggaggcgcgtttcggcagtacatactggaattatttgctactaagaaagtaaaatgaaaaagatgaagaatatagctgtttgcataatggctgcatggtggtttgccgcttgcggcaatccggtgacttccccggaaagggtggatgaatggccggatatctatcccgactatatcggtgtgactattcctgcaaccattgctcctatgaatttcaattgtattggtggagcgtacgaacgtgtggatgtgaccgtgaccggaggaaagtccggagagatgcacgtaaatgataaaatagtatcatttccgcaagatgcatggcaagagcttttggaggagaacaagggtgatagccttctgtttacggtatgtatccggaaagacggcgagtggaaacagtaccgctcttttcccatgtatgtcagtccgtatcctatagattatggggtggtataccgcaagctggctcccggatatgaagtttatagcaagatgggcatttatgagcgtgaccttgcttcgttcgaggagcgtcccttgctggagaataccatggtgccgggcatgtgcctgaattgtcatgctttcaacaaaacaaatccggaccatctgagcctgcatatccgtggaaagaacggagggaccttgatgcagatagacgggaagcgcgaaatgctggatacgaaaacggattccactctctctgcgggggtgtacccttattggcatccaaacggcaaatatattgcctattctgtcaacaatacgcgccagtctttccatgcggtgaaggatgagcgtgtggaagtgctcgacttggaatcggatgtactggtctatcatcccgagacacatgaattactgctctctcccttgcttcagaagaaggaagtcttcgaaacctttccagtattttcaccggacggacgcaaactgtatttctgtactgcggaggccaagccgataccggcggaatataaggaaatacgttatagcttgtgtagtatagatttcaatccggaagacgggacatttggcgaaacgatagatacgctggtcaatgcggcagctatgaagaaaagtatctccttcccgaggccctcgtacgacggcgagtatatcatgtttactttgtcggattacgggaatttctcaatttggcataaagaagccgatttatggctgttggatttgaaggatggcggtatgcgtcccataaaggaggtgaacagcgatgatacggaaagtttccataactggagcagtaactcccgatggtttgtgttcagtagccgcaggggagatgggctttatacccgtctgtatctggcaagtatggatgagaatggggtggtgggcaagcctttcctgcttcctcaggaaaatccttgggagtattacgaccgtctggtctactcgtacaatgttcccgattttacaagcgaaccggtgaagctggaacgccggaaagtggaacggggaattgtctcgcggaagcgcgttccggtgaaagttagatgatacgttttttatattctgttttttaatatagtaaagggataaaattgtatcattttctcttggtgcaatccgctatctttgtgccaggaattagtgttaccaataataataccagattgaaaaacatggatatgagaaaagtaaaatttgctatgatgattctggcggcaagtctgttgaccgcctgcggttcttccaagaaagaacagagtgtgaatgaagagacggctgctgcacgtacgcaggaaacggagaacttactggctaacttgaaaaaaatcccttccaaaggtatcatgctcggccatcatgacgatacggtatatggtatcggctgggaaggtgaggaaggccgttcggatgtgaaaagcgtgtgtggcgactatccggctgtcatcagctttgatttgggagagctggaacttgggaatgccgccaacctggataaggtgcccttcgataaaatcaggaaagagataatcaatcagtatcagcggggtgggatggtttcgctcagttggcatgtgcgcaatcccaagacgggtggtgactcttgggatgtatcggatacgacggtggtgaagtccatcttgcctggtggcgagaatcaccaaaagtttgccggctggttgggaggagtggccgatttccttcattcgttgaagacggtggacggcgtgaagatacccgtacttttccgtccctggcacgaacacagcggcagctggttctggtggggcgaaaaactgtgtacccctgaagagtataagacattgtggcacatgacagtggatactctgcaggccaaaggagtggacaatgcactttatgcttactctccgggcacggaacccaaggacacgacggaatatttgaagaagtatccgggcgatgagttgatagacgttatcggtttcgatacctatcagttcgatcgggatgcctatcttgccgggatggatagggcactttccattatcgacagtatagggaaagcacacaataaggtgattgctgtgaccgaaaccggttacgaaggaattcccgatgccaaatggtggactggtactctgctgcctgcgttggagaaatatccgcttgcctatgtgctggtgtggcgcaatgcccgtgaaaaggtgacccattactatgccccctatccgggacagacatctgcggaggattttgtggagttctataacaatcccaagacgctgtttgcagctgatgtaaatctgtatcaataaacaaacaatcaatataacagacatggaagcttttaaagaaaaggtagagaggctctttcagagacacgaagagttgattacgagaaagaatgtggccgtggaagacggcaatggcatattcacccgctataaatatccggtagtgacggctgctcatacacctgtattctggcggtatgatttggatgagaagtccaacccgtacctgatggaacgtatcggtatgaatgcgaccatgaattcgggggccattaagtggaatggcaagtatctgatggtggtacgtgtagagggcgctgaccgtaagtcgttctttgccgtagccgagagtcccaacggcattgataatttccggttctgggattatcccatcaccatgcccgaagacgcgattccggcaacgaatgtatacgacatgcgcctcacggctcatgaggacggctggatttacggtatcttctgcgccgaacgccacgacgacaatgcgtctgccggtgatttgtcctcggctacggctacagctgccattgcccgcaccaaggatttaaagaactgggaacgcctgcccgacctgaagaccaagagccagcaacgcaacgtagtgctgcacccggagtttgtagatggcaagtatgccctctatacccgtccgcaggatggctttattgatgccggcagcggtggtggtatcggctgggcgctggtggacgacataacccatgccgaggtgaaggaagagaagattatcgaccagcgctactatcacaccatcaaggaggtgaagaatggtgaaggtccgcatcccatcaagactccgaaaggatggttgcatctggctcatggtgtccgcggttgtgccgccggattgcgttatgtgctctatatgtacatgacttccctggaagacccgacgaaactgattgccactcccggtggggcctttatggtacccgagggtgaggagcgtataggtgacgtaagcaatgtacttttcaccaacggctggattgccgacgaagacggaacagtattcatctactacgcttcttccgacacgcggatgcatgtggctacctctaccattgataagctggtggactattgcatgaatacgcctgctgacggcttgtcttcatcagcttcggtagaaacgttgaagaagctgatagacaagaatttgcagataatgaaataataaaaatacaacatactatggcaacactaaaagagaaaatcggttatggtttcggggatatgtcttcctctatgttctggaaaatattctcctattacttaccgttcttctattcgaatatttttggcttgagcttggctgatgcaggattgctgatgctggtgacacgtatttgggatgcagtgtccgatccgatgatgggagtcattgcagaccgtactcatacgcgttggggtaaataccgtccttatttgttgtggattgcagctccttttgccattgccgggattttactttttacaacgcccgacatggggacaacgggtaagctggtatgggcttatgtcacttacatcctgatgatgacggtatatacggcaatcaatgtaccatacggggctatgttgggagtaatgactgatgattcgaacacaaaaacggttttctcttcttaccgtatgttttttgcatacggaggtagttttatcgctttgggagcatgggagccattgtgtaattggtttaaatcaatggactatagcaatgcttccagttggcaatatgccatggtatgcattgccacgctctgctttttgggttttctgttttgctttagcatgacgcgcgagcatgtcaagagtgtggcgtccgaatccatcggtaaggatgtgaagtcactggtgcgcaattcgccttggtggatattgaatggtgcggcgttgttgtcgaatttcttcaatacggtacgcggagctactgccgcctacttcttcaaggactatatcagtgccaatgcattcctcgatttcggggtgttcaatctggtattgtatgccggcttgttcctgatggtgggtgaagtgtgtaatatgattggtgtggcgctggctgtgcctctgtccatgaagtttggaaagaagtccacttatatcatttcgctcgtgtgcctggtagtgttcagtgtgctcttcttctttgtgccgaatgacgggctgggatggtggctgatgatgattttccaggtgcttatctccatctgcaccggtatcgtatctccgttgatttggagcatgtatgcggatgtggcggactatgccgagcaaaaggatggcacatcctctacagggctgatattctcttccggttctatggcgcagaagtttggcggtgcatttgcaggctgggcagtaatggcactgttggcattcttcggttacaataccgcagagaatgccgtgcagactcccgaggcgctggatggcttgaagtatctgatgagctttattcctgctgcgatagccgcactttccatcgttgtcgtattcatctatccattgaataagacgcgtatggcagccatcaatgcagacctgaaagagcgccgtgagaaccttcagcagaataactcataacttataactcataactcaaaaacttgtggatatcaagaagatgaaacaggagatggaggaggagctggtttccaatatcctccccttctggataaatagaatgacggatgaagtgaacggcggtttctacggccgtatcacgggccgggaggaggtgaagcccgaagcagaaaagggggcaatcctgaacgcccgcatcttgtggaccttctcggctgcataccgcttgctgaagaggccggagtatctggaaacggctacgcgtgccaaacgtactcttatcgaccgtttctatgacaatgaatttggtggagtttactggtctctcgactataaaggcaatccgctcgataccaagaagcagatttatgctttggggttcgccatctacgggctgagtgaatatgcccgtgccacgggcgatgatgaagcgctggcatatgccatccgtttgttcgagaccatcgaagagcatagcttcgaccccgtgaaaaacggttattgcgaagccttgacccgcgaatggggagaaatagccgacatgcgcctcagcgccaaggatgagaacgagcgcaagacgatgaatacccatctgcatattctggaaccttataccaatcttttccgcgtgtggaaggatacccgtctggagaggcaactgcgcaatttgataggccttttcacggaacggattctgaatatcaagaccggtcatctggaattgttcttcaatgatgattgggttagtaaataccgcattgtctcctatgggcacgacatcgaagcttcctggttgatacacgaggctgcccttgttctgggcgataaggacctcctggagaaagtggaaccacttgtagaatacatcgctgccgctgccgatgaaggattgacgcctgacggcagcatgatatacgagacttttctggataaaggaaagaccgataccgaccgccactggtgggtgcaggccgagaacgtagtgggacatgccaacctctaccagcactttgatgacgaagtggccatgcagaaggctctccgatgttgggacttcatcaagcagcatctggtagactacaagtacggagaatggcattggagcgtgcgtgctgacggcacggtgaacaccgatgatgacaaggcgggattctggaaatgtccgtatcacaacggacgtatgtgcatggaaattattgaacgtttttcataggttttctatcataagaagatgaatagattgatggttttggggattcttgtctggatggggattgcgctgcacgcgcaatctctttatccggacttcagcaagctgaacttcgggtgcgacggaaacagcattaccgcaggcgaacaatggtctaagactgtagtggataaactcggattcgctacacatcacaacgtggcggtcggttctgccacatgggcatgccatcccgatactcaggattatggcagcgaagcttttgccggcatctccggcggttggcaggttacggaggataagcatgagttacagatgcggcacaacaacgtgtcaaaggtgcatatccagaagttcatagccgaagtggaaagtggcgcttaccctgcgcccgatgtctttgtgttctctatgggaacgaatgaccgtaacttgggtagtgccgaagaggcccttaaagggaagacgctcgatgaagtagatgtcaacaccatggcgggcggtgcccgttggtccattcagaccattctggagcattatccccaatgccgcgtattcgtgtgcacgccgattcagaccggcaaccccgaacacaatgcactgaatctgcagaagattgccatcttgcgtgagttgtgccgggcgctttccgtgcagctgatagactgttactccaactgtggtatcaccgaaaagtttgagcagccttccggtagcgggcgctatctgcgcgacgggttgcatcccgacaaaccggggcaggagctgatgggccgttacatcgcgaaggagatacggaaccatttcttttagttccgttctgcatattccggttggaataacttatcatttagggcttgtaaagccctttttttgtctgtattcttaatgacgaatgccacgtcattattgctgctgccatatgaaatcatccgtagggggatgtcctttagcgcctccataatctttacctcaaacccggcatattcccattgcatgttgcccaccacggagacgatggtcatgcggtcttctaccaatacatgggcatattggcgtagttcggagatgatattcgataaacgagtgcagtcgtctatagccacagatacgtccagattggaggataccagcaggcagaggggggtacggtacttggcaaaaatgtcgaaaatcttgctgatgaacagatagggacacagattatggttcgattcgaactttatgtatatgatgtggtccttggcggctatggccttgatgatattgtcgtcctgcaggttggaaatcaacgtgccttctgccgacggttccatagagttaagcagccggacgggaatattccttaggcgtgccggggcgatacagaagggatgcagtatcttggcaccatagaaggccagttgttcggcttcgttgaagctgaggcgtttcacggggcgggtacctgacacctcgcgcggatcattgttgtgcatgccatctatgtccgtccatatttgtatctcgtctgcttggagggcggtgccaatgagggaagcggtgtaatcactgccgccgcgtttcaggttgtctgtttcgttataggcattcttgcagatgaaaccctgagtgatgaagagattgatgccgggatggcaggcaagctgctctcggagtttctgttctatatattccaagtcgggttcgttgtcggggccgatacgcatgaagtcgaatgcacaaagcagtacattgggaactttcagctcgcgcaggtagaagtgcattagggcggtactgataagttcgccttgtgccagcacttccttctcttcgacagaggtgaaggaatctttggtaaatttccatagttgctggaagcggtcgaggatataatctattgcttcccgtttcagtttctcgtcggtcagcaacccattggcaaattcgatgaattggaattccagccgggtgatacggtcgtgaacttgttctatttcacggttgaacaagttggcggcaatctcctccagatggttggtggtgcctgcggtggcagacagtaccacaatcttgggtgttgcatctttaatgagtgttgctacatgtttcattctctctacggtgccgacggaagttccgccgaatttacaaactttcatttcttgtttcttttttaacagtttcataattgcattcatccggatgttcttccttccggcttttcatttcaggtggcctctttccaaaatggaagggggaggcatgaggggctgtcactgggactaggcctgcataatgccgctgtggcattgttgtggtgggatattcatatcccggttggtggcaggctcttgccccttcacctataaaagttcaaaagatatgccgttggtatttgggaaaagcttatatttgcacaccctgttttttaccgttatcagtttaaaaacttatcgaatagatatgagtaagattctaatcattgatgatgaggtacaaatccgtacccttctgacacggatgatggagttggagggatatgacgtctgtcaggctggtgattgcagggctgccctgaagcaactggaactccaaaatcccgatgtagttttgtgtgatgtgtttctgcccgatggaaatggggtagacctggtgttggctatcaagaaggcggcacccaatgtggaagttattctgctgacagcgcacggcaatattcccgatggggtgcaggccatcaagaacggtgctttcgactatatcaccaagggagacgataataacaagattattcctctgataagccgtgctgtagagaaagcgcgtatgaatgtgcggttggaaaaactggagaagaaggtgggacagacgtactcttttgattctatcctgggagaatccaaagtcctgaaggatgctgtttcattagctcagaaggtgtcagggactgatgttcctgtactgttgactggagaaacgggcacgggtaaggaggtatttgcccaggccatccattacagtagtaagcgtgcacggcagaattttgtagcggttaactgttcttcgttcagcaaggagttgctggaaagtgaaatgttcggtcataaagccggttcgtttaccggcgcattgaaggataagaagggactgttcgaggaagcgaataatgggactatttttttggatgaaatcggtgagatggcgtttgaactgcaagccaagttgctgcgtattcttgaaaccggtgagtatattaagataggtgatacgaaacctacccgtgtcaatgtccgcatcattgccgctacgaaccgcaacttgtctcaggagattgttgccggacgtttccgcgaggatttgttttatagattaagcgtatttcagatacatctgccgccattgcgcgaacgtgcaggtgatatccggctgttggcgaaggcttttataaagagttttgcggaacagctggcgcgtccggtggttgaaatagctcccgcatttcttgaagcattggactcccaaccgtggaagggaaatattcgtgaattacgtaacgtgatagaacgcagtatgattgtttgcgagagcggatatctggacattgctgatttgccgtttgatattcagaatgcccattatgaacactccaatgattcaagtcccggcagttttgaactttcagctatggaacgccggcacattgcccgtgtactggagtatacaaaggggaataagacagaagcagcccggttattgaaaataggtttgacgacgttgtatcggaagattgaggaatacaagatctcagatctataatagggggctcagtatacgactgaggtaccttcgatataggaccgtggcaagattattcttgaaacaggcttagaagcagaaagtgcctatgggctaaaacatatcaaaacaggttgcaccttttcattttgaaagggtgcaacctgtttctttttatacttgtttagtatgtattctgttgataattaatggtgtatggtatatgcgctctttttggcacatatttggcacattcctggcagacaaaaatatgtagtaacattttaaaaggtaaaaacatgggaataacagtatcatttattttttgcctattgagcggtttgttcgccttttggcttttctggaaatgcgtagattggtttgagaagatttaaaagagagaattatgtacacagctttatttgtattaggtattgtaatgttcgggtatctgacttatgtgctgataagacccgaaaagttttaatgaatggagagtggagaaatgaacactgaaattttaggtgtagccttgcagattgttctgctgattgtgatatcctatcctctgggaaagtatattgccaaggtttacaaaggcgaaaagacatggtcggatttcatgaagccggtcgagagattgatttataaagtggccggagtcaatccggaggaagagatgaactggaaacagttcttgaaagccctgctgattctgaatgccttttggtttgtatggggcatggtgctactctgtacacagcagtggttgccgttaaatccggatggaaacgctaaccagacaccggatctggcattcaatacatgtatcagttttatggtgaactgtaatttgcagcattattccggtgaaagcggactgacatattttacacagttgttcgtcattatgttgttccaattcattaccgccgctaccggtatggcagctatggcaggtatcatgaagggtatggctgctaaatcgacgaagactatcggtaacttctggaagttcttggttttgagctgtacacgtgtattattaccactttcgttgattgtgggcttcatcctcattctacaaggtactccgatgggatttgatggtaagctggaagttcagacgatggaaggacaaacccagttggtttcacaaggtcctacggcagcgattgttcctatcaagcaattgggtacgaacggtggcggttactttggatgtaactcttcacatccgttggaaaatcctacttacttgacagatattgcagaatgttggtctatcctaattataccaatgtctatggtgattgcactcggcttttacatcaaacgtaagaagatggcttactctatctatagtgtaatgctttttgcttttcttgtcggtgtttgcatcaatgtttcgcaggagatgggaggtaatccgcgcattgatgagatgggaattgctcaagacaatggagcaatggaaggtaaagaagtccgtttagggtctgctgctactgctctttggagtattgtgactacagttacttccaatggctctgtgaatggtatgcatgattcaacgatgcctctttccggtatgatggaaatgctgaacatgcagattaatacgtggtttggaggtgtgggtgtaggtttcatgaactattatacattcatcattatcgccgtattcatcagtggactgatggtgggacgtactccggaatttctcggtaagaaggtagaggcgcgtgaaatgaagattgctaccattgtggcactgcttcatccgcttatcatcttgggcggtgtggcactttcttgctttttgttcgctcattatcctgaatttgtggcaggtgaaggcggctggttgaataatcccagtttccacggactgagtgagcagctttatgaatatacttcggctgcggccaataatggttctggcttcgaaggattgggcgacaatacttacttctggaactatactaccagctggacgctgattttaggacgtttcctgcctatcgtaggtcaggtagccattgctggtctgttggccggaaagaaatatgttccggagagtgccggtacgctgaagacagatacagtaactttcggtgtgatgacttttgccgttatctttattgtggctgccttgtcattcttcccggcacatgcattgagtacgattgctgaacatttcagtttgtaatagtagtttgtaaaaagtaatttcataggtatgaaagataataaatcagcttctctgtttcagaaggagcaagtaatggaaagtttgaagcaatcattcgtgaagctaaatccacgggtgatgataaagaatccaattatgtttacggtggaagtcgtaacggttgtcatgctgattgtctgtttcctttcattgggtacttcggaatatggagcattcggatataatttattggtattcatcatcttgtttgtgacgttactgtttgctaattttgctgaagccatcgctgaagctcgtggtaaggcccaagctgacagtttgcgtaaaacccgtgaagagactcctgctaaagtgttggttgacggtaaaatccataccgttagcagttcacgtttgaagaaaggtgactattttatttgtgaagcaggagatacgattcctgccgacggtgagattgtggaaggtttggcctccattgacgaaagtgccattaccggtgaatctgctccggttatccgtgaggccggtggtgacaagagttccgtaactggtggtacaaaagttctttctgataaaatcaaggtattggtgacgcagcaaccgggtgagagctttcttgacaagatgattgctttggtagaaggcgctactcgccagaagactccgaacgaaatagcattgactattcttctggctggtttcactttggtattcgttattgtatgtgtaacgttgattcctatggctgattatacgaatattgaccatccgggaacttatatctccattgcagccatcatatctttgtttgtctgcttgataccgactactatcggcggactgctttctgccatcggcattgctgggatggaccgtgctttgcgcgctaatgtaattacaaaatccggtaaggcggtagaaacagccggtgacattgataccttgttgctagacaagactggcaccattacaatcggtaaccgtaaagctactaagtttcattcggcttcgggtgttgacgagaatttgttcgtagaggcttgcttgttgtcctcactttctgacgagactccggagggtaagtctatcattgaactgggacgtgaaaacggtcatcgtatgcgtgatttgaatactaccggtgctcatatgattaagtttacagccgaaacaaaatgttcgggtgtggatttgcaggatggtactcagatacgtaaaggcgcattcgacgctattcgcaagattgtggaaaatgccggaaacaagttcccgaaagagattgaagaggtgattgctgtaattaccagcaacggtggaactccgctggtggtatgtgtcaatcagaaagttactggggtaattgagttgcaggatattatcaaaccgggcattcaggaacgttttgagcgtcttcgcaggatgggtgtgaaaactgtgatggtgaccggtgacaaccctttgacagccaaatatattgcagagaaagctggagtagatgatttcattgctgaagccaagccggaagacaagatggaatatatcaaaaaagaacagcaggccggtaagctggtggctatgatgggtgacggtacaaacgacgctcccgcccttgcacaagctaatgtgggtgtggcaatgaacagcggtacgcaggcagccaaagaagctggtaacatggtggaccttgacaacgatccgacgaagctgattgaaattgtggagattggcaaacagttgttaatgacgcgcggtacgttgactaccttctccattgcgaacgacgttgccaagtactttgctattatccctgctttgtttatggtagccatccctcagttggctcctctgaacattatgggactgcatagccctgaaacggccattctctcggctgtcatattcaacgctatcattattcctatcttgattccgttggctttgaaaggtgttcagtataagccgatcggtgccagtgcgctacttcgtcgcaatctgttgatttatggtgtgggtggcgtcattgctccgtttgtcggcatcaaactgatagatatgatagttagtctgtttttttaaaacttggataaaatgaaaactctttggaaatcatttaaaataacaattgcattttgcatatttttctctctgttctatatccttgtcttgtggatatttgcacagttcgccggtcccaacaagggaaatgcagaggtggcaacactcaatggtaaagtggtaggtgcagccaatgtaggccagatgtttacgcaagatatttatttctggggacgcccatctgcgggtaattatacagccgatgcttcgggtggtagtaacaagggacctacgaacgatgaatacctggcagaagtggaagcccgtatcgatacttttctggtacatcatccttatctgagccgcaaggatgtgcctgctgaaatggtaaccgccagtggttccggtctagacccacatatcacacctgcttgtgcttatgtacaagtgaagcgtgtggctcaggcacgtggcatgaacgaggctgaagtgaaagccattgtagacaagaacatcagcaaaccctttttgggggtgtttggtacggaaactgtcaatgtgctggaactgaacattgcattagaagaagccgatcagaataaataattttttagttgtgtttgtcatgtgttatgggcaggagcggaagtatttctgttcaggcagcgaaagactgtcattttacagggggagccgaaacttccttcctgcctttcaacgattgattagtaatggtaaataaatagttggatatgaaaagtttaaaaatatcaattctagtttttgcgagtatggtagctgcttgttttatgggaaccggcaaagtgcaagctcaggaatttacaatacaaggtgatttagtcagttcttatgtttggcgcggcttttaccagacgggagccagttttcagcccactttgggttttggggtcggtgatttttctttgacggcatggggctctaccgattttgacggagtttcttcaggagaaggggctgcggctaaggagattgatttgacggctgcctatgctttgggagaatcaggtctaactttttctgttgccagcttgtggtggggcggacaaggagcaagaaagtattttaattttaagagtcacgaaacagctcatcactttgaagcgggattagcctatacattgccggttgaaaagtttcctttgtcaatcgcttggtacactatgtttgccggagctgacaaagatgataaaggcaggcagaattattcttcgtatgttgaactcaactatccgttcagtgttaagtctgtagatttgaacctgacttgcggatttctgccttatgaagctggggtaggagtatatggcgttcctaacagcgggtttgccgtaaccaatgtggcactgaaaggtattacggaaatcaagattactgacaatttctcaatacctgtatttgcacaagccatttggaaccctcgtatggaagatgcacatctggtattcggctttactttaaggccatgatttatttagatataactttagaactcatgaattagtgttggatgcccgtggcggtcgtgatgatcgttacgggttatatggcatatataagacaagtaaaaaaacagaagaaatgagtagggaagaaagcgtacagcattttcttgatttgattaaaaagtcgcggcgtggcaagttcaaagtctacatcggcatgattgctggtgtaggtaaatcttatcgtatgcttcaggaagcacacgagttacttgacaacggagtagatgtgaagataggctatatagagacacacgggcgtgccggtacggatgctatgttggaaggattgcccgttgttcctcgtcgtaagatattctataaagggaaagagctggaagaaatggatttggatgccattatccagatacaccctgagatagtagtggtggatgaactggcacataccaatgtggaaggtagccggaatgagaaacgctggcaggatgtgatggatttgcttgatgagggtatcaatgtgatttctgccgttaacatccagcacattgagagtgtcaatgaagaagtacaaggcatctcgggtattgaggtgaaggaacgtattcccgatagcgttttgcaagaggcagatgaggtggtgaatattgacttgactgcggaagaattgatagcccgtctgaaagctggaaaaatttacaagccggaaaaggtctctactgccttgaacaatttctttaaaacggaaaatattctccaattacgtgaactggctttaaaagaggtggctttacgggtggaaaagaaagtggagaatgaagtggttaccagtgtgggagtccgtcatgagagatttctggcatgtatcagcagcaacgagaaaacaccacgacgcatcattcgtaaagctgcacgtctggcaacccgctacaatacttcgtttgttgccctttatgtgcagactcccagagaaagtactgaccgcatcggtctggcaaatcaaaggtatttattgaaccacttcaaattggtgaccgaactgggaggggaggtcgttcaggtgcaatcgccggatgtgctgggaagcattgttgatacttgtagggagaaacagataacaactgtctgcatgggaagtccgtcactttcttttccgaaatcattgttcatgatattgaaataccgaaaatttgtgcgtgatttggcacaagtaaacatagatttgattatacttgcataatattaattcttaggaacattatgaatattcgtacaaaattgatactcagcgtaggggtattggctggaatgattattttgttggttgctctttctgtggtgaatctacagatactgacggctacagagccggatagtcctgctgctgtaccgggattgcaacgtgcattgctctggatttctgtgataggtggggtatgtatttttgccagtatcatattgttggtatggcttccccgttccatcagcaaacctattcaagaactgacgcgtgggattcttgaaatagcgaaccataattatgagaaacgtctggatatgagtggacacgaggaatttcgtgaagtggctgatagttttaatcggatggctgaacgactgacggagtatcgcgccagtacgctgaacgacatactttctgctaagaaatttcttgaggctattgtgaatagtattgatgaacctattattggtttgaaccgtaatagggaaattctctttatcaataatgaggctttaactgtgctgaatttaaaacgggaagaggtaattcgccgttcggctgaggagctttctttgaagaatgatttgctccgccgtttagttcgtgaattggtaaatccgggtgaaaagaaagaaccgttgaagatttatgcagacaataaggagagttactttaaagcttcttacattaccattataaatgcagaggctgatgatgacgaacctcataatcttggcgatgtgattttactgaaaaatattacagaattcaaagaattggatagtgccaagactacttttatctcgactatttctcatgaactgaaaacgcctatatccgctattctgatgagtctgcagttgttggaggacaaacgggtaggggtgttgaacgacgagcaggagcaattatcgaacagcattaaggaaaatgctgatcgccttcttgggattaccggagaactactgaacatgacgcaggtagaagccggtaaactgcagatgatgcctaaaataacaaagcccattgaactgatagagtatgccatcaaggctaatcagatacaggctgataaattcggcattcagatagaagtggagtatccggaagaaaaaatgcctaaattgtttgtcgatagcgaaaagattgcttgggtactcaccaatttgttgagtaatgctatccgctattccaaagagaacgggagggtggttatcggcgccaagcatgacgaggattttgtggaaatgtatgtgcaggattttggaaaaggtatcgacccgcgttatcaccagagcatttttgaccgttatttccgagtgccgggcactaaagtgcaaggtagtggcttaggactttccatttcgaaagactttgtggaagcgcatggcggtacactgactgttcagagtgagctgggtaaggggagccgcttcgttatccggttgaaagcgtaacgttttctattttttgcggtactgttgcggagacatgcctgtttgtttcttgaaaaatgtaccaaaataagaagcattgggaaaattgaagaaatcggcgatttcctggatatttttctgggtgttcttgagtagtgagatgcttttgcggatgatggatttgaatatcagttcctgcacggtgaatccgcagacggacttggatagtgcagagaggtatttgggtgataagcagagtttgtctgcataaaactctacaccgcgttcttccgtgtagtgcgcatctatcaactgaatcagccggataaaaatttcatgtttgtggccaaccgttgttttaaggttcatcagtttacggttgtaaatggaacagatgcggtatgtgagtcccagcagaagcagcctttgttcgttgtcgttgaaggtgttgttgtctaagtgcagggtattgtccagtaaggacatgtatttcaggacttcttcttcgtctccggtgttccatacgtagcatggttcggtccggagctgcatgtataggtacatggttgccactgaattgcctatgatgtcccttatcggttctatctggtaaatgaatatgaatagttgcaggtcttccgattcgctcagcacttggaagagggaatcttccggaatgaaaactgtttcgcctgcctgggccgagaataccttcatgttgagcgaaaaggtgaagttgccctggcggcagaccatcagtcctgctccattaatcatgaaaggtttcttcaaggaggcagggaaggagcagagcataccttctgaactacaaatgttttctccgttggacaatgcgcggtccaagtgggataaacgttcttgttgagtatccataacagacaaaattacaggttgtaccgaaaattgtctgctaagttagtaattttcgtttaggataccgcacgacaagcacaaatatcatgcaaatcaggcaggcatagagtgtccatcctgccatttcctttacagcagagagggtggcctgcacctggatgcgtcctttggtggatatggcagccatgttgattgcttcttgtttgctttttccctgatattgcatgccttgtacggtttgggtaaacgaggcggacgcttcggggtgcaacatgtctacattctgtgcatagcgggtgacgtagtgctgctggcgttcttgcagcacattcgtatagagtgcggctccgatgcagggagccaataccatgcgtacggtaatcatggtacatatccaggaagaaagatatttgtaaggcatgcgttgggtggcgtaggttggaatcagcgagtagaggaacatcatgccggtggagcggatgatgaccggatacttcatccgttcgtacagtcctgcaccttgtacctcgaaatacatgaacatggcggaaagccccaatagaaggaaaccggcggcaaagagatatttgaagtgtacgccttttacgctgagccagatagtggctataccgccgatgaggtagcccagcatggaccagttgcccagggtggcattctgaaagttgtccagtttcatgcctatgcccgtgaatacattgacaaacatggcgctggaattcagtaccattaacagaaaatagaataggaaacccatacggatggtacgcagtttgaatacatcgagctgatagtaaggattgcgctgggtagactcgatatagagaaatatgccgccagcaatgatggcgcagactgtggcccattgtatggttgggtcatcgtaccagtcgagcactttgccataagtaagcacgtaggtaatgcaggctagtgtgatgcagaagatggaggcattgccgaactgcttgaagttgatggggaaacggcgggtggtatatttatgataaggcatagtaatgaaggtgatgaggatgcaaagtaatagtagccccatcataaagtagtgtatgtactgccattcatattcaaaagcgagccaggcggtgagcgaggttcccaattgccccagtaccatgaagaatagatagatggcgggttgtgccgcactccgttcgatgtccagcttgtcccagccttcgtcagttgtgggctcgttgccgggtgtaattttgtcgtacgcctcgatatgccctgcatactttatgagggtgaagaggttgaccatcatcagcaccattcgtaggaatcccataaagatgctgcatagtgccagcaggaaaacgctgtctgtcttggcacagatatagctgaagatgtacatcagggagaatcctgccaggcacatcattttctgccggcgtatgactaccagcctatacagaaaagggcagaatgctgccatgccaatggaagtggcgaagttggcaaactggatatgctcggaaatgatgccgagttcgctcatcatttcggtgcttgccaccgagtaggtaccgcccacagtcagtatcggcaaaaagaatacgaataggatgatgatacctaccggtttgggtacccagttgtagaaaggatagttcttggggtatgagggcatggggataagggttaaggggttagggattaagggttaaagattaaggattagggggtaaggattaaggagttggttgccttaatccctaacctctaatccttaatccctatttttttgttttcgctttgactattaccatcataccggcggcaaggctactgttgtcttctttagacaaatcggtaaagtcgatgcggactgggatgcgttgctgtatcttcacgaagttgccggcagaattatccgtgggcactagggaatatttggagccggtggctccggagatggcagtgatttttcctttgaattctttgtcgctgatggcatcgacggtaatgactacttcttgtcccaagtgcagattctcaatctgggtttccttgtagttggctataatccacttttgtgtgtcaggcagaatgtaggtgatggtttgtccggcagtgatgaattgtccttcttcaagggtacgccgccccaatttcccatcacaaggagctactactacggtgtaggagagattcagtcgtgccatttcgagtgcggctgttgcccgttgtatggcagcttcggtattttcacggcgatgtgacacttcgttcacacccgacaaggcagctttctgttgtcgtttcacggcttccaacttcttgtgggtagctgcatattcggtttctatctgttccaattgaatgggggtggcagcgtttctcttcaccagattctggtatcgttggcggtctttctccagcttggtaaggcggatttctatctctgctatggaggcgtcgtagacagaggctgtagtttgcgtggtttgtagtgtggcaccaatgactgtggcaccggcttgtgcatccttgagtgcagcttcagcttccatgactctgattttatattcccggtcgtccaatataagtaaggtatctcctttgtgtacttcttggtgttctgtgaaacaaattttcttgatatatcctgatgcgcgcagattgacgggagatatgtattgttcaatctgtgcatcattactggtttccgtccgtttgtagttcaaaaagaggcagaccacttgaataattccccagataaggatagctattcctaataggctgacaacgatttgccaacggcgaagcttcttcaatttccgtgctttttcttggtgggtacttgcggtgttattgttctcttttgtttccatattttctatattatattgtttacttattatatatacatccgtccttgaatacgggctctattcatcttcctctttaatgaattgaggggctcaacgtctccagctgtcccgtcagcttcagcaaagtcagattggttatccggtaattgtagtgggcactgatatagttgttttgggcttcgctcatccgcatttcgtcctgcaatacttcggtcattgaggcgattccttcccgataacggtccatggtgacggtatatacatcttcggcaagcagataattgtccttctgcttcttaaagttacgttggctgttcatcaggtcattggtggcattcagatattgtgtctgaagattctttcgggtattctcttgggcgagcttgatgttctctatgtcaatggttgccttgcgcatcttgtagcgtttgtccagtccgtcgaaaatgggaatacgcaaggagagtcccactccataggagcgataccaatggttggaagggccggaatggaaccaatggtaagctttgtccgtataggcggagaacatccagcttcccgtcaagctcaaggaggggatgtaaccgttgctgactattgttttttgttgctctgcgagttgtttctgtgattgcagcagctgtagttcatatagtgtttcagatagcccggtgagtgctgcgggcgtaatcatttctgtattcaccggtaccagtgctatattttcttctgccggatagtcgatgatgtatttcagtaggttcagttgctgttccatcatggcttgtgcgttgtcgtgttgcaccttgaggttctccaggttgatgttgacgcgtttcacatctacttccatagccataccgttgtcatagaaggcctgagtgatatctctcaactcttctaggcgagtgatgttggcttttatcaaaataatctgttcagctgtaacctgtcctaggtagtacatttgactaatttgaaggatgaggtcttctcttgccttttcataagaaaggcgattcatctcatccatggttttagctatggacagagtggtgtagagtgtttggttataaagtggtatctgcagctgtaatccgaagttggcgttgtattgcaaagtttgggttacattatagggattgccatacgctgaaccatcggtaacggatacgggtggatcgatattgtcgttatagttggcaaaaccattgatttggggcagtagtttggctcgattctcagagatgccgtatttccctttttgtatttccttccgtttgctttgtaaggacaaattgttttcgatacctattttgaggcagtcctccaaggttagggtatcttgtgctcttgtacctagtgcaagcagacacagaaaggaaaatgtgaacagttgtcttttcataatagtcacttgatatttgcacacaaagttagtggcttaaaatgcaagaggactatccatatatcaactgtttgtattcatattttcctttttactataatttgaaaacaaaccatagtaaaaaacgagtattaaaaacaaaaaagaccgccaagagtggaagcctcctaacagtctaaatcttctttgtagcgggacccgggattgaaccggggacctcatgattatgaatcatgcgctctaaccagctgagctatcccgccatcatttctcgattgcgggtgcaaagatatagcttttatttaaattgccaaaacttttatggatattttctgctttttcttttgctgatagggtgctgaagtggtttgcagtactttttatcaaaagtctttgtataacattatcaatgaattaggggtgtatggaaagggaggtataaataaatttgatgatttattttctgtaattagaaaaaagtatttatcttggctggcgcaataaaaagcagaatagactatggaaagaaagaaaatacatttggaatatctcttgaatgcgacttctaaaagtattctttgggcagcgataagtacccctactggtttggagggctggtttgctgatagggttcagtcagacgataaaacagtaacctttttttggggaaaaacagaaaaacgtgatgccgagattattgccgtgcgggcgtattcattcatccgcttccgctggctggacgatgagaacgagcgagaatactttgaactgaagatgacaaacaatgagttgaccaatgatttcgtattggagataacagactttgccgatatagacgaggtgggtgattcgcgtgaattatgggaatcgcaagtggatactttgcgaagaacttgtggtttttagttaactttagattaaaaatttcccgtactccctttttttgtactacttttgtgctctcattgcatgaaacgagtaaaatgctgcgcataaaaaagttagatatatttgttttgaagagcttttgcatgctctttatgggtactttcttcatctgcctcttcatctttatgatgcagtttttatggaggtatgtggacgaaatggtaggaaaaggattggagatgactgtccttgcacagtttttcttttattctgcgctttcgttggtacctgcgtcgttgccgctggctattctgctggctgcccttatcacctttggaaatttcggagaacgttttgaattacttgccatgaaggcagccggtatttctttattgaaaattatgcggcccctgattatctttatttgtttcatttgttgtgtctctttctatttccaaaatgtcataggaccaaaagcccaaacaaaattatggactttgcttatttccatgaagcagaaatctcccgaagtggatattcctgaaggtgtgttctacgatgaaatagatggttataatctgtatgtgaagcataagaaccgcaaaactggtatgctgtatgacgtactgatatataattttgagaaaggttttgagaatgctcaaattatcaagtctgattcgggacgtctggagatgacggctgacaaacagcatttatatttgcatttatacagtggtgagcagtttgagaatttgaaatcgcagaacatgaaccaaaggaatgtgccttaccggcgtgagacattccgcgaaaagcatgcaatcattgagttcaattcggattttaatatggtggatgcaggtatcatgagtaatcagtccaacagtaaggatatgagaatgctgcaggcggatattgattccatgaaattgcagaatgacagtgtgggacgtggttattataaagaagctatggcaggaacttataaggtgacagccagcttgtctaaagaggatacattgaagattgaaaaggcctatttaggtgagtacaatgtagacagcctctacaatgtggctacactgatgcagaaacagaaggttatatccacggccgtcagccgtgcagagagtgcggggagtgactggagttttaagagctttaatatatcgcagactgaaagcagccttcgacggcacatgacttcctggcatgagaaactgactctttctctggcatgtctcatcttcttctttattggtgcgccactcggaggaattatccgtaaaggaggcttgggaatgccggtggtggtttctgtattgatttttattatctattacatcatcaacaatacggggtataagatggcccgtgacggacagtgggttgtctggatgggtatgtggaccagtactgctgtcttggctccattgggtgcgttcttgacatataaatccaacaatgattcagtggtattgaatgctgatgcttatataaattggttcaagaaggttgtgggtattcgcagtgtacgccatctgttccgtaaggaagtaatcatccatgatcctgattatacacgtattccggaagagctgaaggctttgtccgtagactgtcgtgaatatgctgatagaaaggggttgaaacgtgctcccaattactttaaattgtggatgactgatagccaggatgaggcagtggaagatattaacgaacgtttggaaagtctgatagatgagatgtcgaatacaagatccgttactttgttgacagcgctgaacacctatccggtcatccccatccatgcgcatgtccgtccgttccgcaattattggttaaacttgctctgcggtattgttttcccgataggcttgttcttttatttccgtatctgggcattccgtatccgtctgaataaggatatggagcggattatcaagacaaatgaagatgtgattggaattatagaaagggatcagaataaataaaaacaaaatagattatggaaaatgtaaagttgaatacgatagaagaggccattgaagacttcaaagccggtaactttgtgattgttgtggatgatgaggaccgtgagaatgagggtgatttgataattgcagctgaaaagattacaccggagaaagtaaactttatgttgaagcatgcccgtggtgtgctttgtgctccaattacagtttcgcgttgcaaggaactggatttgccgcatcaggtatcggataatacttctgtattgggtactcccttcactgttactattgataaattggaaggctgtagtaccggggtttctgcggcagaccgcgctgctactatccaggcgttggccgatccggcttctactccggccactttcgggcgtcctggccacattaatccattgtatgctcaggagaaaggtgtgttgcgccgtgccggacatacggaggctactattgatatggcacgtttggctggactttatccggcgggagcccttatggaaataatgaatgaggatggtacaatggcccgtttgcccgaattgcgcagaatggcagatgaatttggcttgaaattgatttctatccgtgacttgattgcctaccgtttgaagcaggagtctattgtagaaaaaggagtggaagtggatatgcctacagaccacggtcatttccgtttgattcctttccgccagaagtcgaacggtttggaacatgtagctttgttcaagggtacttgggaattggatgaaccgattctggtgcgtgtacattcttcttgtgccactggtgatatattcaattccaaacgctgtgattgtggcgagcagctgcataaggcaatggagatgatagagaaagccggtaagggggtagttgtatatctgaatcaggaaggtcgcggcattggcctgatggaaaaaatgaaagcatataaattgcaggaagaaggcatggatactgtggatgctaatatttgcctgggacatctggcagacgagcgtgattatggtgtgggtgcccagatgcttcgtgagataggagtgcacaaaatgcggctgatgaccaataatcccgtgaaacgtgtgggcttggaggcttacggtttggaaataacggagaacgtagctattgagactactccgaatccatacaacgagcgttatctccgtaccaagaaagaacgtatgggacatacacttcatttcaataagtaactgtctttttgttttcttatatcaaagaaaatcgcttattttgcaaccggatttgcgtaacaatcattaaatagtaacaaaatgaaccaattatcagatcgtttaaacagtttgtcgccttctgcgacactggctatgtctcaaaagagcgcagagctgaaggctcaaggcgtagacgtaattaacctgagtgtgggagaaccggacttcaatactcccgaccacattaaagaggctgcgaaaaaggcgatagacgataacttttctcgctattctccagtgccgggttatcctgccttacgtaatgcaattgtagagaagttgaagaaggaaaacggtctggaatataccgccgcacaaatttcttgcgccaatggtgccaagcagtcggtttgcaatgcaatcctggtattggtaaatccgggtgacgaagtaattgtacctgctccctattgggtcagttatccggaaatggtaaagttggctgagggtacgccggttatcgtacctgccggtatcgaccaggactttaagataacacctgcacagctggaggctgccatcaccccgaagacaaaggcgctgattctttgctctccctctaaccctacgggttcggtgtacagcaaggaggagttggcaggcctggccgcagtattggcaaagtatccgcaggttgttgtgattgccgatgagatttacgaacatatcaactatatcggcaagcatcagagcatagcacaattccccgaaatgaaagagcgtacggtcattgtgaatggtgtttccaaagcatatgcaatgactggttggcgtatcggtttcattgcaggtccggaatggcttgtgaaggcttgcaataaattgcagggacagtatacttccggtccttgttctgtatctcagaaggctgctgaggctgcttatacgggtacacaagttccggtggaggaaatgcgcaaggctttcgagcgtcgtcgtgatttgattgtaaagttggccaaggaagttccgggtttcgaggtgaatgtaccggaaggtgctttctatctgttccctaaatgcgattcattcttcggtaaatctgccggagaacgtaaaatcaatgattcagatgatttggccatgtatctgttggaagtggctcatgtggcttgcgtaggtggtgcttctttcggagctcccgaatgcattcgtatgagttatgcaaccagcgatgaaaatatagttgaagctatccgtcgtataaaagaagcactggctaatctgaagtgattctaacttcttctacaaacttattttagcaagacatctgtcatgctgtcacgaacagttcgtttcatcaaagcggactgttcgttttgttatgacgaacactttgttttgttatgacgaacactttgttttgttatgacgaacactttgttttgttatgacgaacactttgtttcattatagcgaacactctgttccatacagtataaacactttgttttatattatacgaacattttgttttctactatatgaacactttgttttatacttatggaacaaagtgttcatgtctgtgaactaacgtattatccgtatatagaaaataacaatgaggggggtgaaggtactgaatctcacgtgggggtgtcttttcctgatttagctagacgctttttctttttataaccgatatcagtagacggttcttggaatgt

SEQ ID NO: 4433 - DNA, 18826 bp, Unknown
  gut microbiota DNA sequence
gtcttgcagcaattcgcggtgtatctgataaatcttcgtcctgacagattccagatactggttcagttccaacgctttccgatctttgcctgtcacacatcctttggaagcgttccaacgctcttcggcaacgctgcgcttgatttgcatttcggcacgttgtccgtttacggtgattcgcagcccgatgggtgcctcaccgtttttcaacagtcttgttcttctgataaagaagagaatcgagaaatagtttctttgcatggcttgatacttttttgtttgcaaaattaagttccaaagccaaaagtgcggctacgcaaaatagtgtgtatcaacgcaaaacatcctaattcggtggactttttcggacggaatcttactccaccgatttggcctgtgaaagttgccgcattctgcgtaaaaaggggaggtgggcagaaactaaaaatccctgataactgttgattatcagggattttcttcgattttcatctttgattggtgatccgcctggggctcgaacccaggaccccaacattaaaagtgttgtgctctacctgctgagctagcgaatcagaccttattgctgttaagcgggtgcaaagatagctacttttgtttaaaaaacaaatggattaagggaaaaagttttgggaacgacttctgcttttactcttcttgttgattatcagtctgttcaaacttatgaattttttctctgtttatgatgaaacgttgatagtaggagagcataagggtggtaagcggaagtgctataatcatacccagcatacccatcaatgaaccccaaattgataaagacagtaggatgatggcagggttcaggcccgtaatcttccccatgacacgcggtacgatgaatccgtcttgaatggcttgtactatgatgaataccgcaagggccgatgcaatgataatccagaagtttcctcccgtatccgctgctttcagtatggccagcacgatggtaggtataaagccgataatctgcaaataaggtactaggtttaaagcgccgatgaataagccgagtccaatggccagtgggaaatcaataatcagaaagcctatactgaacagaataccgacacacaatgccacgaatgcttgtccgcggaagtatctgttcatgccgtctttcacatcgttcattacattgattacgaagggccggtatttctgtggtaccaggtgggtccacccttcggaaatgctttcgtaatccagcaatatgaaaactatatagagaagaatgaggaagaaagtgaagaaactgaacagcagattgacggattctgacaacaaggaccagagccggggaacggtttccttgatggcgttcagcatattctcttccttgaacaattgggtgacaaactgggtgtctatgttctcacgaaggaattcagagagtgttttgggcacattgccgtcgtgggttccgttggaaaagtagtctattaccaaatcttttaccctgacgaattcgtccatcatgggaggcacaagcagatagaaggcggttcctcctacaatcagaatactgaacaaggcgcagaagatggatatgacccggttcttgagccttaatctgtactggaagaaggtgaccagagggtatatcagataggcaatgagccatgcgatgaagaatggcagcaatacgccgctcagacgcttgaagagcataaggatgccgataatgatgacaccgagtatgacaccgcggataaaactgtcgaatgtaatctttttgcgttccataatgctctgtttttttgtattcgttaatgaccgctttccttttggtcggcttggatggcttgctgatagcactcccggcatagcggttcatactcttcggtttctcccagcagcacttgcttgtcattcttgacggtgcggtgggagaaagaggcgagttggccgcatttcacacagatggcatgtactttggaaacttcgtctgcaatggcacacagtcccggcatagggccgaatggaataccgcggaagtccatatccagtccggctacaatgacgcgtataccattgttggcaagcaggttgcatacatcaatcaggccactgtcaaagaactgggcttcgtcaatgcccactacatctatttctgaagtgaagagcagaatgctggcagacgagtcgatgggagtggaggctatggaatgactgtcatgcgatacgacatcggcttcggaataacgggtgtctatggcaggcttgaatatctctacgcgttgtttggcaaattttgcccgtttcagtctccttatcagctcttcggttttgccggagaacatggaaccgcaaatgacctcaattcttcccctgcgtttggtttcctgtatatgatcttctgaaaataataccatgtttttgagtgttatatttaagcgcaaaagtaacacttttgttcgctttccgatattttttcattatttatttctacatttgtagcgttaacacggactgtgtaaaggatatgcaaaccttattaaacgacatagaattagatattcaggaattgaaatgtttgatgcaggccatttcaagtgatgccaatccgacattgaagattgtggcaaaacggaatatccagcagatgaaggcacgcttggaggcgttgcaagaactgcttgaggaggcgccaacggctgttgtgtcgcccctggaggaaccccctgctgttactactcctttgaccgaatcggtttctccggtcgaatcggttattcctgatacagtgaagatggtatgtgaggaaccggaaacagttcctattttggcagaacgcatcaagcctgccaaggatttgaaacatgccatcagtctgaacgattcattccgttttgtccgcgaactgttcgcaggcgatgctgcacggatgaatgaagtggtacgacgtttgggtgaggctccttctttggacaaggctatggatatttttgcttcggaagtgcacccggatgaagaaaatgaagccgccgtcgattttatggaactcctcaaaaaatatttcagctaaacgaccgataagtatgggaaaactttatgtagtgcctaccccggtaggaaatttggaagatatgacattccgtgctatccggattctgaaagaagtggatttgatacttgctgaggatacacgtacctccggcatattgctgaaacacttcgaaataaagaatgcgatgcaatctcaccataaatttaatgaacataaaacggttgaaagtgttgttaatagaataaaggggggagaaactgtagctttgatttcggatgcaggtacaccgggtatatccgacccgggctttctggtggtcagagagtgtgtgcgcaacggcatcgaagtgcaatgcctgccgggagcgacagcttttgtgccggcattagtggcttccggattgccgaatgagaagttctgttttgaaggtttccttccacagaagaaaggaaggatgacccgcctgaaggcattggccgaggagtgtcgtaccatggtgttctatgagtctccccatagattggtaaaagctttgacgcagtttgccgaacatttcggtgccgaacgtcaggcttctgtttcgcgggaaatctcaaagatgcacgaagaaacggtgcgtggaacgcttacagaattgattgaacatttcacggcgaacgaaccgcgcggtgaaattgtgattgtagtaacaggaatagacgattaaataacttcattaaccaaacgtaaaacgaaagcgtatgaaaaagttagcagttttaattgtatgcgcggctgtaatggcttcgtgtgacagcttctctggtggcagtaagaaccagctgaaagctgaaaatgattctttattgatggaactgactcagcgtaatgctgaattggacgagatgatgggcactttcaatgatatttcagagggattccgccagattaatgcagcagagagccgtgtggatttgcagcgtggtgctgtggcagaaggctctttgaatgccaagcagcagattgcgtcggatattgagtttatccgtaagcagatggaagagaacaaggagcagattgccaaattacagtccatgctgaagaacagtaagaataactctgcccagttgaagagggctgtggagtccctgactcaggagttggtggcaaagacccagcgtatcgaggaattgcaggctgagctggcttccaagaatatccgtatccaggaactggatgctgccgtaaccggtttgtctactgagaaagaagaattgactgccgaaaatgaggcgaaggctcaaaccgttgccgaacaagataaggcactcaatacggcttggtttgtatttggtacgaagaaagagttgaaggaccagaagatattgacaaataccggacttttcaaaaaaggccaggtgctgaaagattctgatatcaacaaggactactttacacaagtggatatccgtacgacaaaagagattaaactatactctaaagatgctgatatcttgactactcatcccgcgggctcttatgcgttggagaaagatgataaaggacagctgactttgaagattacaaatccgaaagacttttggagtgtgtccaagtatttggtaatccaggtaaaataacactgttatagactgatacagaacggacgcaggttattggaattgataatctgcgtctatttttatatatctcttccctttaaattatggcatcccaatataagaacctgttttttgacctggacgatacgctttgggcattttcccttaatgcacgcgatacattcgaagagatgtatcacaagtatgattatgaccgtttctttcgttctttccagcatttctatacgctttatcagcatcgtaatgtagagctgtgggaagaatacggcagagggcaggtcagtaaggaagagttgaaccgccagcgttttctatatcctttggaggcagtaggggcgggggatgctgctttggccgaggctttttctgatgatttcttttcggtcattcccacaaaaagtcggctgatgccgcatgcgtatgaggtactggaatatttggcggggaaatataacctctatatcctttccaacggcttccaggagctgcaatgtcataagatgcgttcggcaggcattgaccacttttttaagaagattgttctctctgatgacatcggtatcttgaagccctggcccgaaatttttcattttgccctttctgccacacaatccgaggtgcgtgattctttgatgataggcgatagttgggagaatgatgtggcaggagccaaaggagtgggtatgcaccaagtgttttataatgtaacggggaaggaagaactgcctttccaaccgacttatcatatcagtaatctgaaagaattgatgcagattctgtgacattgaaatttttagttgtacttttgtctacagaaacgtatattatacagctatggacacaatcttacctttcgctttactttgttttacctccttctttacgttgacaaaccctcttggcaccatgccggtgtttttgaccatgacgcatggaatgacggaccgtgaacggcagtcggtagtatcgcgcgccactctggttgcctttattacgattatggtttttacgtttgcgggacagtttctctttaaattcttcggtatctctaccaatggcttccgtattgccggtggagttattatctttaagattggcttcgatatgctgcaagcccgttataccccaatgaagctgaaagacgaggaaatcaagacttatgccgatgatatttccattactcctcttggaattccgatgctttgtggtccaggtgccatagccaatgccattgtgctgatgcaggatgcccataccattcagatgaaaggagttcttataggaatgattgcctttatttatctgattacctttttcatattgcgtgcttccacacggctggtcaaaatcttgggtgagacgggaaacaatgtgatgatgcgcctgatgggacttatcttgatggttattgccgttgagtgttttgtcagcggagtgaaacctatattggtggatatattgaaagaaggaggcataccatcactggcacacctcctctaaacactttatttataaaaacacattgggaaaattcccaagtttctttaggctactattgattaatagcctggattttgttctatgttcggattggcattgatttcaccgacgggaatcaacgggagcgctttcttggagtcgcggttgaatgtacgcgcttcttcgctcaatacgtcgtgccatcctctgtcattaacgtccgtgtagcgtgtaacggtttcacctcggcgcataacatcgaaatagcgctgtccctcacctacaagttccttgcggcgttcaatgtagatgcggtctaatgtgatatttccgctggttacttgtttgctttcatccgttgtacggttggagatgatatcattcagcaagttggcagccttgttcttgtctccggcttggaaagctgcttctgctgctgacaagtaaacttctgacaagcgtagcaatgggacattggagtaacgtacatctccgtttacagcaggcattttgttgatgtaaactttacgtttgtcaaatcctcctgctgccgctgccaataatatgtcgttacggatgtctgccgggtcggatgtaagcatgtcagagaagtcttttgtgacaattacatctccatatccgggagaagcgccagccttgtcggcatataaataggcaataccttcacggtctgtccagtcagtattgttgttgatggaaatctcgaacatgatttcttttgaatgattggcatcacttttgctccatgctgcaacatattctgacggttcccaaagtttgtaagacgagtttgatatgatgtcttctgctacgaataaagccttgctccattcgccttttgtcatatatacacgtacctgcaaggctttggcagcccaaaggttgacataacccacttcattggttttgggcagtgcatttgagttgattgcatctgtcaaatctttttcaatactctcataacattgagctaccgtgctgcggcttggcttttctgtcgattctagtggggaggtagcgatgggcacaccgagtgagctgccttgatctaccgtataaggtttaccgtagatacgtgtaaggtcaaacagtgccatggcgcgcagaacttttgcttctgcatcatattggtcaatagtggcttttgcctctgccgcatcggtcaggttgccactttctgctgcctgaatcagacggttggcgcgtgcaatgactacataaggcatctgccatacggctgttgaggtggtgaaattgtctgcagttgtatattccatatagtagtagaagtttgctcttccacttcccccgttatattcatattggatatcttcccctctcatgtcaccgtatacgaacatgaggcgtccataataattaatcaggctactgttacctttaacggcagcataaagtcccgtccgcacattggccaaatcatcgctgttcttgattgcggtttcagcatctattccgtctgcgggtgactgatccagccaactgttgaggcatgatgaagtgctgactgccatagctgcgcaaagcgttgctgtgtataatgtctttaatattttcattttcgtatctttattagttagaaattcaattctattccgaatgtatatgttctcaatgccggagtctcaaatgtgcatagtccgtctacacgcatttccggatctacaaataagtctttagacttccatgtaagcagattggaaccagagaagtagattctggctttgctgagcccaagcttgctgatatagttttgcggaatgcttacacctaatgtgaggttcttcagacgtagataatcagtaggcatcagccagcgtgaagacagtgaagcagcgcttccatattcaaatttaggcaatgtggcattcgtgtcgcccgggcctgtccacatctttgagatgtcatagtatgtcggtacggcaccaccgtatagatatgaaccgccattggagtgctgccaagtggagtagtcaaaagcatcaccacccaatgaataagtgaaagtgaagcccaagtcgataaacttccatttgaggttgttggtaagaccgccttctatactagcctgatgcttgcctacaatagttttgttggcttcagagatatttgtagttgtcttgcgggcattctctgttccgtcattcagatagaacatttctttaccggtctctgcgtcgactccggcgtattcataaacatagtatgaatagtaaggttcgcctacacggtgaatcagcggtcctgatacgatttcattctgctggccatccaatttggtcagtttgttgctgttgtgtgccatgttcagagaagtggtccacgtgaaatccttgtttctgaaattggttgatgtaatggtcaactcaaaaccggagttcttcagtgaaccgatgttttgcggggtggtatacccataattgccatcataatatccgccgacttgtgatacggggaggtcatatataaggtcgctggttttacgctgatagtagtcgaatgttacagagatacggtcgatgaatgaaaggtcgagaccgatattccatgttttgttcttttcccatttcaggtccgggtttgcaattccgacgattgacattcctgactgtccattgtatatgattccgtatttataaagattcatataagcataatagtctgatggttgcgttccgtttacaccgtatgacacacggagctttccatctgtcaatacactcttgacaggattcaggaaactttcgtctatgaatctccatgctccggaaaccgaccagaaacttccccaacggttttctcttgccagacgtgaacttccgtcggtacgatagctgagaccgagataatatctgtctgcgtagttataattggcacgtccgaggaacgaagtcatgcgatagctctgtctgttggtttcggcacttgttgaaccggcatttgtcaattcgtacaaatcacccggatagtcttggcctgccatgtagttgaaagcatattccgtatcttgtgtttcaaaaccaagcagggcgtcaatattgtgtagaccgaaagagttgatgtaagagagctgggtttgtgtattcagctggtcattacgattgacgatacgctgcatgacaccaccgggggcaccattgtttgagtgtctgtcccaaagaacgtcattggttccttgtgcgtaatcataagcaatcttttcacttaaattcaacttgtcccaaatattgtaggtcaacttgattgtattgaatgccttcatcagggtataaacgtcagagctgtgttctctttcatacaaaggattgactccaaatacgccgcaaccattgtttaatgtgccgtcttcattataaggggttgatgaggggctttggaagaatgcgtaattggccacaggtccatcataggaggtagcttcattagttttgttttgtcttacttttgagaattggcttgtaacctgaacttcaaagtctccaaacttatgagtgaggtttgcattaccagtgaaacgttccagaccttgtttgtaaatgataccttcctgattggtataagctactgaggtgtagaacttggtacggtcattgccaccagatacgctcagctggtagttctgatgagaaccgttacggaaaagcaggtctttccaatccgtccatccggttgagggttttgaagcaaagtcctcgatgttctggtctgcaaaagttgcggcatctgcatcggacatgtttccggtgtataacccgtaattcttgagaccggtccataagagttcgcggcgcgagtcaccgtcaagcataggacgataatctattgccatgtttgagaaaccccagtcggaacggaaacttacatttgttttgccttgttttccgcttttcgtcgtaatgaccacaacaccgttagcagcacgcgagccgtaaagagaggcagcagccgcatctttgataactgtgatagactcgatgtcattggtattgagtgaagacaaaatatcagttcctgcatcactataagtgaactcggataagtctccacttgtgaccggtgttccgtcaataacataaagcggattgtttccggcattgatggaacccataccacgtacacggatactgcttacagaacccggattacttgaacttgagccaaaagtaacaccagcgacattaccagaaagtttgtcggcaacagaaagaacaggtacatcttccaaggtggaagtgtttacagtagaagcagctccagtaaatgatgcttttttaaatgtaccgtaaccggtaaccacaacctcttcaagcagctcagaatcggatttcaaaattacctttacatgaggtttaatcgttacttcttgggtttgcataccaacaaacgaaatcaccagagttttcgcggaactacaatatgtgtatcttgttggtaataaaggaggtacaataattcaagaaagtttcaaaaggaagtgttcccctttgggagatactctatacatgttcactatacatgacaatctacttatatgatactatttgtaatagtaatgtgctgatttataatagtctgattctgtactaatatgttataatcataacgttaggatttcttttttttaagaatgaatgcttatgtcaacatctatcgtttagttgttttttgtcaattatttacttgtattgtttgttacatccatgaaaacgtaaagcattatataaaatattattgaaattataaaggttacatagataccatcttacccatttatccattttatgcatagaacactatgcaattgtccttattttaaatggagatatccgtttgtttattccaaatacaaaagtaattgaagtaaagaactctgtaactgcgaaaaactactattggaagtatgtcaaaaatgtaaacctgcccttttcggatggaaaaacgattgttcagtcaaggtttagttctttaattccccaaagatttatgtagtaaacaatgtttttggtttcttgtttgggattatatttttctgatgaggaatacctattatgagaaaatatagtctacatgaaattacgtcgcttgggtggagatatttttatcataatcaggaaatgcagaatatgcttttgtgacccactctagctctcatatcgtgcgggcaatccaggtttgctgcttattgaagaaaggatactcctattgtttcagttcttctccataaagtttacgcagcatgatacgtgcaggtacacttttaatttctccattgggcaagccttgtataatgcattcattgcgcaatgctttttcttcaagcatacggcgttcggctaatgccaaaccgaaatgtaacttttcgctcagttcttttctttcattctctgacataactttgtattttattaaatcgttcaatatgatgtatatgcatctccatcccccgtccgccttcagcaacaataatacggggtgtctcgctattatctgccaatagccaatagtccacacagggcatataaatattgaaaaagttattgatacctgcttgataacgccgaatcacaacctctttgggaatgtcgtgcccaccattacgtacacgttgggctacacgctgaatagccaagtcgggcgaactcaaccagaaatatattaaattgactttatatccttgctcttgcgcacgatggacaaggcgggtgtaagttcttgtggcaagtgtggtttctatagaaaagttttgttgatttctcagcaattcattaatcctttgtaacatcaaccgtccggcttcaatagccatactttcgggattgaaaggagataatccacgagctatttcatctgcattaacaaactccttgcattccagaacatccggtagcacagtgtaagatgccgtagtcttaccagcaccattacaaccactaatgatgtagagctgttttttagaatccatattcatgcatttatctaattgcaaacatacgatatttttataagattatggataattgatagttattgttttttaaaagttgattgttccgcaggtatgagaagtacaggactcttttgagaactccacatttctcacatatcatctatccttattttcttcttgatgaaatatctgtttaccaaagtacgttttacgaattgaggtggagcaaagtacttgcctttcccacttgcgctatatagatagccctcccctctagtgatcattgatgaataccaaatggcaggcaaatatcctgagaatagtgtggaaacgcttttattgttctcctctaataacagagggaatgctttatagcatcccctctctcaaaaaacactttatttatagaataattccggtagaattattttcctccaagattcaactcatcgttgtaatcagtttcattcaaaggtacatcccatgtccatttgttgacaccggaggcaggaatggtttttgcaacggaaatgtgagcattaccaccttcggcaaaactgtgacggactatgtcgcggttccatctcttgtagtcgctccatgcaaaaccttcaccccagagttccaattcgcgatagtccataatttcattccaaagagcttcgccactcttgtcgcaagtgtattcaggattacgtccggaagtggcattcagttctaccagtgcggcacgagcagcagtctcgtcattcaagaaataattagcctctgcctctaccaataccatttccgatgaacggatgaaaggcaggtagctgacgcccggagtgtcgaatacataaaacttcagttgtccccccagatacatataaccagcctgataaggagcttccaggccactgaccgccattttctggcaataggcagctgcttcttcccaaagagcatctgcttttttctcatcatctcccattccaagaatgccgtagcctaaatccatggctgaaccgtcattgaagttatagccggggaatttgtcttcggttaggaacagtgccttacgagcatcgtcgttgggaatgcgattaatcagttcacgaccgatagagcctgcaccggtctgttgagtgctcgcataatatccgttacatgcatattgagtaccataactccaataccaattattctcttgtgagctaccaaaacttccgaaaatccattcactagtcggattacagaaccctgcatgatattccgcattgctcataagtgggtagttctgacgagccagcttggcttctgtcaatgctttggtataatcttgcttggtaagagcggcacgggcgtagatggcatgtgccacattgatgttcggcatccatacttgtgaggcattacggtccataccgctttgctcaaacagcatgatggcttcatccaaatctttataaatctgtgcgtatgtttcagctaatgtggcataaccttgtccaccggtagattcgtccaaacgaagtactatcccctgcgaagcaccattgttggaatcttgccagcgccagcaataatagtgtaccagtttttcgaaagcgtatgcacgaaaagtcagtgcagatgccttgacaaaatccctttccgcttccgtaccttcggcattgtctatattggcaagaatggtgttggcattacctgctatggtataatagtaataccatgcgtaagcatcgtaaatggagttggcacgtgtgtggaactcttgattgaagataggagaccaaccggatgcgtagaggttgtaattgtaattttcactcgggtagctttcatactgaatcattatgttgttctcaccagcaaatccacctccaaaataggagtgttgtgttgtcatgattttggcgataccgttcaatgccttcatggcattggccgtggtacctacggcatcggttgctccggttgagtcagtaggtgctgtatccagatagtcaccggcgcaagaagacaccagcatcatacctgccaataggcttcctgcgaacaatttattgataatctttttcatttctaatacaaattatatggttatacctttagaatttcacagtcagtccgaagttataaacacgggctgtcacatacgtatcgtccgaacctccgttgaaggaatactgcggattcaatcctttgcgtgaagtcaatgtaaaaaggttctctacaccggcagtcagcgaaaggccttctatacctacactttttagccaacgcttgggcaagctgtaggagagattcaggttcttgaatacgaagtaagaagagcttgtcagccaacggtcactggtggcattcaggtcggacgatttgtaaaagtcggcgcgcggagttccattcggatcaatgcgattggcagaagtttctgtcattcccgcaggaacttctttccaagaattcaggatgtccttgtggtaagcgctgccggcagcaccggattcagacacacccatcaagctggcatagctaccatcgtatgttttaccgcctaaagaataagtaaacagcatgttcaaatcccagtttttccaagaaagagctgagctgatagaaccgtaaaccgtaggaagtgcgctgccggcccagtcacgtttggcgtatgaagtcgcggtagcatagtccgtaccgttgatggtagtcaatgcaccggcttcttgggcggcggctttcttgtccggatccagtgtatagagagaagtaccggtcatctggtccacaccttcgaagtggtaagtgtaccattcgtagatggagtgtccttcggagtagttttgcataccatgcaagatgtcctttccatcgggcagtttcacgattttattcttcaggaaagtagcgtctacgccgatgttccatttccagtcattgttgttgatgacatcggcattcaaagagatttcccagccacggttggacacggtaccgatattcttgtattgcgtcaggttcatcggggcagtatcatcgacccaaggataagaaccggcagaaagcggtaggcgtacctcaaacagcaggtctttggaacgtttgtcgaaatagcctatttggaagttcagacggttgaacagacgcccctctacggcaacatccaccgtctgtgtagtttcccacttgatgtccggtgctgaaagtgattgttttaccaaagcggcttcaccaccgttcttgtcaatggtataaagagccatgtgaccataaaggcttacgcccatattgttaccgacttcaccataggacgcgcgcaacttcaaggcatccacccaatctacatcttgcaagaaagcttcttgtttcatgttccagctggcaccaacagaatagaagttaccccagcgattgtccttgtggaagcgtgaggaaccatcacgacggaacgaaccttctacgaaataacggttgtcataattatactttacgcgtgccagataagactccgtcttgtcctcatcatcacttccggaaaaataagagttgttaaggaaattacccatagtaaggtttccgtctacagccataccggtgttcattccggaagtgtacttgcgctcccaactatagttctcgtgagccaccatagcttccacgttgtgtacctgattaaattgatagttccagctcagaatttcctgcaaggttacagtcttgtattggtaggcataacttgtcaaacgaccgccattcgtagcaccgtctccaatttcgggattgtcatatttcttattgttcgaagtgctgttgttcaggtcaccttttacagttaatgaaagtccatatggcaacgagatggtggcaaaagcttgtccgcccaatacgttgcgcacactttcctgcttattatacaacatttcgtaagcgatgttgcggttactcagataagatgaagtggtgtcataaattttgttaccatcggcatccagttggtatgtaccgtcggcattgtgcataaacaacggatagaccggagccatataacgagtaatgtagaacggattggcgtaatagttgccactggcattactgttatagtcacgcttggtccacgagccagtcaagttcacgccacccttgaaccacttgttaggtgtataagtagtgttgatacggccggagaaacgttcgtaacctgtggcttttacatatcctttctcattcaagtagcctatggaagaatacacgttgtatttctctcccgaagtggcggcggaaagattgtattcctgacggtgtcccgtgcgttcgatggcattctgccagtccaagtcgtcatagccagccaggcgagtggcaatcagttttccgttattgtcaaacaacttatcaccagcggcattgtagatattacgaccgatagattcactaaccacgtgtcccgtggcatatgcggcagcatcgcttgccgacatgccggcattgctcatcatggcattcttcttggccatccaggtagcttccatccagcggtctgcatccagacggtcgtactcgggaatacctctgttatacataccttgattcatttgcagcgtaatactcggtttatgagtgtttcgtccgctcttggttgtaatgatgacaacaccgttggcagcacggttaccgtataatgcagccgaagcagcatctttcaagatggacatgctttcaatatcattagagtttagttcggccatgtttccatcgaaagggactccgtccactacatacagaggatctgaagcacctgaaaccaatgtaccaaaaccacggatacggatgctgggggcagaaccgggttcaccatatgtattgttcacttgtacacccggtgcggcaccttcaagtgcaccggttacgctggttgtgatgcgcttctctattttcttattgtcaaccaccgagatagaaccggtcaacgattcttttttagcagtaccgtatgccactaccacaacctcatccaaagcttctgcattgcttctcattgtcacctttacactcggcttaatcgccacttcctgcgtctgcataccaatataagaaatcaccaaagttttcgcggaactacattatgtctatattgttgataataagcaatataaaataaataaaaagagctcctgaaataaagtattcctctagagaagatactctatacatatccactgtaaatgacaatctacttatatgatactatttgtaatggtaatatcctgatttgaaggtgtttaattctgtactgatgtgctataatcataacgtcaggatcttttttctcaaaaactagaagggctttgtcaatatctatcatttagttgctttttgtcaattatttactcgtgttgtttattccatctatgagaatgtaaacccttatgtaaaatactattgaatttataatggttacataaacactatcctacctatttatccattttatgcatagaacaccatgtaattgtctctatcttataaatggagattattccaaatacaaagtaattggagtaaagaattctatagctatgaaaaactactgtttggagcatgtcaaaaacgtaatgaggaaattttcttgtaagagaatatagtctacatagaataacgaagactgagtggatatattttttattataattcaagggaataaagaatgtacttttgtaatccgcactggctctcgtgtcgtgcagacaattcaggtttgcagtttattgaagagaggatatttctatcgtttcagctcttctccataaagtctacgcagtatgatacgtgccggtacacttttaatctctccattgggcaagccttgtataatgcattcattgcgcaatgctttttcttcaagcatacgacgttcggctaatgccaaaccgaaatgtaacttttcgcttagttcttttcgttcattctctgacataactttgtattttattaaatcgttcaatgtgatgtatatgcatatccattcctcgtccaccttcagcaacaattatacggggtgtttcgctattatctgccaatagccaatagtccacacaaggcatataaatattgaaaaagttatcaatacctgcttgataacgccggagcacaacctctttgggaatgtcgtgtccaccattacgtacacgttgggctacacgctgaatagccaagtcgggcgaactcagccagaaatatattaaattgactttatatccttgttcttgtgcacgatggacaaggcgagtgtaagatcttgtggcaagtgtggtttctatagaaaagttttgttgatttttcagcaattcattgattctttgcaacatcaaccgtccggcttcaatggccatactttcgggattaaaaggagataatccacgagctatttcatccgcattgacaaactccttgcattccagaacatccggcaacacagtataagatgccgtagtcttaccagcaccattacaaccactaatgatgtagagttgttttttagaatccatattcatgcatttatctaattgcaaacatacaatatttttataagattatggataattgatagttattgttttttaaaagttgattgttgttgcgagagtctagaataaaaaatgaggttgtgcagttcacattttgacaacctctatcaaaaacactttattttcc

SEQ ID NO: 4434 - DNA, 25786 bp, Unknown
  gut microbiota DNA sequence
tatgattctcattgaattcttgtccatggtctccggtaatgatgaccagggtattgtctagcagtttcttttcctcaagtttgtggaggacgcatcccaccagtgagtcggcttccgccacgcagttgtagtagaggttcaggaaaggagtagggtctatgtcgttgttcagtttcatatagtcggcgaactcccaggacggttggaaacgataaagcttgtccttcggcacttcatatccgtgtgccaaatcatagaagagaaaggaaaagaaaggttttgtaccgctgcccagcgtatcgagtgcttgcagataatctgctgtaatacggcagtcgcggtcataaacggtttttccttcggtatgggtacgcaagtcgggtacctttgagaaaagtattttggcaaatggcgggttgacgattgtagcactgggataaatacctatctgataattctgcttcaatagttcttctatgagcaggggctgtatgcccgatacctcaaaatcagtccagtagatggatgagagactgaagaaaagcccgaagatacttccacgtgtgccattgctgctgcttagatgggaggtgaatctgctgcaactgtcggcaaagtggctgatatgaggtgtaatgtcctggttaaaggcgcggtagttccatgagtctatggctatcagcactacattcttggggttggaatggacttcgtatttcaaagaatctatcggatagttgaggtcagcagactgctttttgttgttgaagttcattttaatgacatccttggatgagaccactcctaacttcatcatcaggcgggttgccgtaagcgggaagtaatagggcaggcagggggcgctgcgaatcactgaagtcttttgcgctacggcggcataggcatgataaaagttagagaatagtgcaaacaaaatcagagtggcaagtataggacggaagccacagcggtgaaagcgggtataacaatggcctgcaagtattcttagcaaagtattggcggcaaatatacccactaatactcctgcaatcttcagataaagccagaagctgaatgtgaaaatctcactgttgccctctccaaccaggagattcagtacaaaaccattgatatggaacttgtaaagactgtacacactgccgtctatgtaagcaagtatattgagtaatgatacaagaataatgtgtgtgatggcggcggcttgatggcgccggacggtaatggctacgattaaggatatgatgtaaggaataagtgcccacaaggcggcatgtgagcaagcggccgttatataaaacatccagcctcccacgtccatcatggcgagccggggactgtgaatcagataaaacagaaattgtatggcaatcgtcagagttgaaattgcataaaaaataaatccttcactgagtgatttctctaactgtattttttgcattgatattgtaatgttttgcctatagtttcctctgattcggcattgatagtaaaggcgtgaggagcttatatagtgacgtcttttgtattatcgggctgtatctctaaatgtatgtgctactttgggatataagtgtaagcatctttttctcttcgtagcgggtagtctccccgcaatttttcaaattgttcgggatgtgttttcagtgtttcgctgtcccttctcgggtcatacatttgcagatatgcttctgccaggctgtcggcggtaataatcgggttccggggttgggggggagcgatgcggtagtcggctttgatgtgaaagaaacggcaaagggcatccagggacatacgggtggcattggcttttccgtcggctgaataaccggctatatggggagttccaaggaacactctatttaataaggtaagattgatatcaggctcgttctcccatacatcaatgatggcatcggaaatcagtccgtcttctaaggcattcaggagcgcattggtttcaatcacctctccacgtgaggtattgataatgacgggacagcgttttaatgaccggaagaaagtatggtctgccaaatggaatgttttgtatggcccttccttatataaaggtacgtggaaggtgaggatatcacattctgctgcgagtgcttgcaaggaactgaaatctctctctccttccttgtcttgccggggcaggtcattcttcaggacacgcatgcctagttcttgccctacttgggctattttgctacccacattgcctacgccgatgatgcctaatgtcaattcggacagttgtactcctttgagttgttgcaataatagtaaggctgattgcacgtattgagctacggatgctgaattgcatccgggggcattggtccaagcgatgcctgcttcacggcaatattccgtatctatatggtcgaagcctatggtggcggtagcaatgaagcggactttactgccttccagcaattccttgttgcagcgggtgcgggtacgtataatcagtgcatcggcatcttttaccaactccggagtgaagtctctgccgggagtataaatcacgctgtcggctattttttcgatggcttctttaatgaaaggtattttgttgtcaacaatgactctcataatgctgctgttcttttcgacgattttccatcgtgcgaagatacgactaatccgtcaaagtggctaagtaatgcccggaaaataatttgactctttccgtttttaagtttgcatttctgccctcaccgctctcactcttttcttcaacttccctattcatcggcattgcaggggtgggtgagagcaatcgaaaagggtgagggtaaattttgctctcacccgtgttttcttccgttccgcatccttctttcttctgttgcatccttttcattctttcgttttacttttggattcttcagcagcccacgttagtgagccgtgatgttcacttgagtgaactaaacagctcactagtgtggttgaattggttcataacagtgggccgatgatgaataaagtagttttcgggaaggagataaggtgtttgaaggataaaacaatgggccagtacggattgaacaatggggatgtgcccgattccgtacttggtttttgtaacagacagcaagtgattgctcatctctatcttatgttttataggtgaatttgtgtttttgtcaaaaaaggaaagcgaaatagactgctatatgaggattatcttgtacatttgcagctgaaactttttagagatgagaataggatacgacggaaaacgggctgtgcagaattttacgggattgggcaattacagccggtatgtggtgcagtcattgtcagcctttgctccggaaaacgagtattggttgtatgctccggtacaccgtgaaaatcagcaactctcgtcgatggtggccgaaagccggggaacggtatcggtacattatccatcttattggctctggagaggaatgacttcgttgtggcgcgtgggaggtatacgcaggactttgaaacgggacaacatacagctgttccacggactgagtaacgaacttcccttgaccatccatcgggtacgggaagtaaagagtgtggtgactgttcacgaccttattttcctgagactttcacattgtttttcgttggtcgaccgcttgatttataactacaaatgccgctatgcatgcaagcatgcagaccacatcattgccgtgagtgagtgtaccaagcgtgacatcatacattattatggaattcctgcggataaaatttccgttatttaccaagggtgtagttctctgtatgcctgccgtgtcggtaaggataagcgcaaggaggtgatgcggagttatcggttgcccgaacgctatatcttgtcggtgggcaccattgaggagcgtaaaaatgcgctggccattgtgaaggctttggagtatctgcccgatgaactgcattttgttctggtagggagacccacagcctatatccatcagctgaaagagtttatgacaaaagccggattgcaagacagagtacattttctgcatggtatcccttcggacgatttacctgccatttatcagtcggccgagacttttgtatacccatccgtttacgaaggttttggcatccctattcttgaggctttgcattccggcattccggtggttgcagcaaccggctcttgtcttgaagaagcggggggggagcattcattgtatgtgagtccccacgatgtggagggattggcagcggcgattgcccgtacacaagagccttctttgcgtgccaccatgattgaggagggattgaagtgggcacagcgtttcacgcaggagcagatggcgtgtgagacgatggagtgttatcggaaagtactaacaaaagaaacctaagatatgaattatttggaccgcaatgagtttaactacgcaccttcgcaagaggtggtggaggctctaaagaattttgatataaacaaactctgtttctatacccgtatctacgacgaaggcaagaagagtattctgtctgtttatctatctgaatcttacggaattgatgaaccgcaggtactgttgggttatggtggagaagatatattgaaacaagcagtccactatttcctgacccaagaggatgggaacaagacgatgctcattcctaaattctcgtggtggtactataaatccattgctgatgaagtggacgggcatacgttgcagtatccattgtatgaggatggcaatacctttaaatatgatttcgctgccatgaaagagatggtacagcgtgagaatcccaaggtcttattaatcgcttcgcccaataatcccaccggtaacggtctgacccctgcagaattggacgctttgttggctgagttgcccgtaacaaccatcgttttggtggacgaagcctatgcctctttcgtatctactgatacggactatattaagatgctggttgataaatatcccaacctgattatttcacgcacgctttccaagttctacggattgcccggattgcgcatggggtttgggtttatgagtaaggagttggccaactttggcaaatacagcaacaaatatctgggttataaccgtatctctgaggatattgctattgccgcactgaaatcggatgcgcattaccggaatatagcacggctgatgaatgagagtcgcgcctgctttgaagcggagatagggacgttgcctggtttcaaggtatatgagtcggtggcgaactttgtccttataaaatatccgattgtcttgaaagaacgcttacagaaagcttttgccgacgaggattataaggtgaagttcatgaatgaaccagacatcaatacccatttgcgtattaccttggggcgtcctgaacagaaccgtattgtcattgacaccattaaaaaaattgcattacaatgaaagcggttatattggctgcagggatagcttcgcgtttgcgtccgttgactgataccactccaaaatgtctgttgaaagttggagagcgttgtttgctgcaaagagcctttgatgcattgctgcagaatggctttcgggagtttgtcattgtcaccggttatagacagcagcagattgtgaactttctggaagctcattatccggcattggaggttacgtttatctataatgagaaatatgcttctaccaataatatctactctttatggcttacacggccttatgtagataaagaggacattctgttgctggacagcgatatcctttttgacccgcagattgtagccaagttgcttggatatggtcaagcggatgcgttggctctgaaccatcatacattgggggaagaggaaatcaaggtaatagcggacaatgatggcaaggtgttggaaatcagtaagacgtgctccatatcccgagctattggcgagtctattggcatcgagaagatgtctgccgcttatacagaagcgcttttccgggaattggaggttatgattaccaaagaaggtttggataatatcttctatgaacgtgcttttgagcgtctcataccgcaaggacactctttctatgcgcttgacactaccgaatatttttctgtggagcttgatacggtgaatgactttgaacaagcacagcggttgattccttcacaactttattaattaatgggctgatttttatggcagattatgatatacgtcctttgcagcttcgtattttgaagatattgcttgctgtggataaagtttgtaaagaacatggtttgcgctattatataatggccggtactatgcttggtgcagtccgtcataagggatttatcccttgggacgatgatttggatatcggtatgccgagggctgattatgatttgttgatgtctcattccaaggaatggcttcccaagccttatgaggctgtctgcgcagaaaatgatccgaattatccattaccttttgccaagatacaagatgcggatacgactcttatcgagcgtatgcatttgaaatacttgggaggtatctacttggacgtgtttccattggacggtgtaccgcaaagcaacctgaaacagaggattcattttgcccggtatgaattttacaagcgggtgctctattttatctaccgcgacccttataagcatgggaagggtctcggctcatggttgccgctgctgtgccggagactttttactactgccggcgtacagaggagtatcagaaatgtgatgaccacctatgactttgacaagtcttctttagtttgtgattatgatgacggtatgcgcggcatcatgcccaaggcagagctgggagctccgactcccgtttcgtttgagggcgaaacagtgtggggagtacaagattatgacgcctatctgacccgaaaatatggagactacatggttataccgaaacaaagcgggcagagacagcataatttccactatttggatttggataagccctattcttcacaagaaagttccaattctattttataattttgctcttttagggaaatgttagacaaatgtttttttccaaaatttccataagggaccgaaatctttggttaataaataaaatatggcttttaggcggccgcgtattaggcttattttgaatctatttcctgttttgaaagttcctatcttttgggatttgaaatcttttcctttgtaagtgaaaactttgcggaatgtggatgaagtcatgccccattttaatagaaattgcatttgaccacaattcttgcgtatgcgggtagttgattttgtttcaaaatgatagatgcgactggcttgtagccctttcatgaatctgactccacacatatataattttgcggtgaaatctgggtcgctgtacattccgggtgagtattctatactataaccgcctactaaatcccaaatgtcccggtgtacgatattgggaggaatggtagctcccatccagtcgtttattttgtagttcatgtattctttcagtaatttatcttcttgaaaagtttcgatactgtctccataattggctaagatggttgatgcgctttgtgtatgtggttgtattgatgtagctgaaagaaagaaataattgtcagacagtttttctatttcgtcatagagaaccttgtcccaaaaagggagtacatacatatcatcattcaaaaatagaatataatcagttttgactttagtgcgcatcatattcatagcaaaacatactccgatattctgctcagaatgtgtgtaatcaatacctgctttttttatccactctaaggttccgtcacttccatcgtttacgtgtacaatgatttggtgattgtagtaagagtttctttggatactttgtatgcatagttttaggaaagcaaggttattccatgtaggtataacgattgaaaataatctgttttgagattttatagctgtcatcttttgctaattgagaaaataagtacaaagatatttatataaatggagtttttgattataattacttgaaaacatttatattttataatatgcaaaaacaatattggtgtgaaatatactgttttatgagtgatatataatacctctagatttcttgtagacaatagtttggacttggattgaatttttatgtttgtgttttgtgtaggctgatgttctatattgtatgattagcctatatcgctatttgcgaaacttgaattaagttattacttttgtgccgaatcagcaattctaataaatttgttatgaccaaattcttaattatccgtttcagttcgataggggatattatccagtgtatgggaattatcggtggaatacgtgaacggtttgcagatgtggaaattcattggattacccggaaagatatggtggggaccttgtcgatggatggcaggattgataaaatctgggcgtttgacaaggagaccggacttgccggattgttgaagatggcggctgatttgagaaaagagcatttcgactacatttatgacgctcatagtaatatccgttccaacatattgaagctgatagtgtctccattgccttttgtgaaaccttacgttgctctgcggagcaaagagagaggcaaacgctttttgttgttcaaactgggaatcaaccatttcgacaagcctttcagggggatggtgtcttttcagaaaccattgaagaaatggggaattacgcattttccggacaactatcacgactggcatttcccggatgaaatacgtagcaagtatgagaactttgtaaccaaagatatgattacgctggtgccgtctgccaactgggaaatgaaacgctggcccgtttcctattggaaagaattggttgcccttcttcctgagtataaatttgttattctggctggtccgaaggatactttctgtgaggaaatcagaagtgctgcaccggaacgggtagttaaccttgcgggacaaacctcattgatggaatcttcttacatagtgttgcgttccaatctggtaatcagcgctgatacgggttttatgcatgccgctgatttgttccgtgttcctgcttttgccttgatgggacctacggccttcggtttccctacgggacctacggtggaaatactcgaaacagccctgccttgccgtccgtgcaccaaagacggacggggtaaatgcaaactggctgtttatcagaagtgtatggtggatattaccccccaacaagtcgctgaaaagattattgcttctcttggttgatggcgcctatagtctttgtagtggaataaccgtctacgaaagggatagttactgtttcttgggcgtactccctgcctacaatgttttctatggcatagtcgccaccttttaccaacacgtccggtgcaactgttttgatgagattcagaggggtatcttccgtaaaaatcactacgtagtccactgcttccaaggctgccaggactgtggagcgggcgctttcatcattgatggggcgcgattcccctttcagacgttttactgagctgtccgaattcaatcctacgataagtacgtcccccagtcttttggccttttctagatagcacacgtgtcctttgtgcagaatgtcgaagcagccgtttgtgaatatgattttgcgctcctgcgcacgcagttgttttatagtatctgcaagttgggaaataggaataagtttgctggccggtttcccgatttgtaactcgtcctgcaactctttgaacagaatggggctggtgcctattttcccgactacaatgccggccgctttattggcaagataaatggcatctgcaatagggataccggctgccagcgcagctgctaaagttgccacgacagtatcgcctgcacctgaaacgtcatatacttcccttgcttcggtaggaatgtcctgcgaggcatcgggagctatgtatgacatgcctttttcggaacgtgtcactaatagagaagtaaggttatactccttcagtatccggtctgctgcgctatggatttctttatcctcatttctcacatccactcccgaaacagccgaaagctctttcaggttgggggtgatgatggttgcggaacggtatttctcccaatttgtccctttggggtctataatgaccttcttcccttgcctggcagaggcggatataacctgctggcatactgtatcattgcatactcccttgccataatccgaaatcacgacaatgtccacttcggggagtgcacgcttcacggcatccagcagtttctgctcagtctcttcgttcaggcattcattttctgtttcaaagtccagccgtactacttgctggctgttgcctattacgcgggttttggtgatggttgggtgttctgtatgaaacagttcgtttctgatacccaaatcagcgaacatctcctgcattgtgtttccgttgtggtcgttgccaagcaggctgacgacatacggcgagcaacccagtcccaacagatttcttgcaacattggccgctcctcccaatacattgtaggtacgggtgacacggaccactggtacgggtgcttcgggagaaatccttttcacgttccctatatggtaagtatccagcatcacgtctccgataacgagtaccttctttccctttatactgtttaattctgtattcataataggttgttttttaattggttggcccaatatagaagtgaatgctcagaggtgacccggaaggacttgacaccacttctttcgccgcattccgtatccgatttcttatctccgaacatataggattgggatgggtcgatttcatatttcttcatcgcttccgtcaccatgaaaggagaaggcttacggcattcgcaatgttcttccggaacgtgagggcaagtatagaaatcgttcagtataactccatgtttttccaactcttgggcgagtgcctggttgaactgttcggcgtcctccagtgtaaagtagccacgtccaataccggattggttcgtgatgacaatcagcagataacccaattcctgaaaaatgcggagtgcttcggctacaccgggcaataattcaagctcttgggtcttgtaaacgtagccgaaatcaacattgatggtaccgtcccgatcaaggaaaatcgctttattcatgggagaacagtttattgtcaacgatgccgcacaagatatgtccgatggtaatgtgcacttcttgaatcctggcagattcggcgtgctgtataatcaacgggtaattgcaaagttccttgcaccttcctccatcccttcccaggagccctatggtggtgatgcccatagattgtgccttctgcaaggcatgctctacgttgggagagttgccgctggtagaaaggcctatcagaatatcacctttcgttcccaaggctgctgtctgccgttcgaagacgcggtcgaagccataatcattgctgactgcggtcaggatggaagtgtcggttgtcatggcgatggcgggcaggccttcccgttcggtcacgaaacgtccgacgagttcggcagcgatatgctgggcatcggctgcactgccgccgttaccgcaaagcaagactttgtgcccttgtcgaagggcttgtactatcagattgccgacggtttcgatgtcggtaagcatttgccggttgttcaggatattttctttgagcctgataccttcttggatggactggatgatataatcttgcataattttctaatctcgttggtacaaagatacgacatttcagaaatgaagcttgcttttgacgaaatttttaaattgtctttgctttctccatttcagtctgctgaagagagtgaagaatatgcattcttcaatatcgaatcctctttgctcggcatatagaggtattattttcatgaagtcatcggcgggaatacccagttggctgaaggcattcatggacattctgataccgggtactttaccgagcttcaggcggttgatgtcaatgagggcgaagtgatatttgccgtttgtcttccggtaaaatatattcttgggattatagtccagtggcaagaccttgttcagatgtaattggagagtgaagtctacgaggtcatgtcttagccgttttttctcttcttcctccatttccgtaccgaacatatccgtaacaagcgggtaggggaggtattcggaaataaagtatccggtgtggaagaaaccattctttttgatttctatataagctaccggaggggcggtctctattccccgttgcagaaaaagttctgcatattcaaaggcgcgctgcgctttgcttttgcggaaccaagtgtaaatgaggcagtttatgagggcaggtcttttgtatttcttgattacgaagtccttgtctccgaaccgcactctttcgactgtgttccttcggttacaataaacctcttcccgttcatattcttccgatgggatggctcggatataactctcgtaggcggcatagtgcggatgaatatgtaccttcattgcttttatttacattttacttcttttgaacggtgcaaagatagtgcaaaccgaaagcagaacaaaatgaacttgttcattttttattttgaggtgccgcctatcttcgcttttgagcaaagataatcaaaatgtatcatctggtcggaaatatcgtatgcttttttagcgaactcggcttctgccggggtgggctcttcacctaccacctccatttgggggctgatggcgaatcctttcttgcatgggtcgaggatgctttggcccaatccgctccagtagtaatcatccagttggagcaggttcagtaaggtggggtacatatcgatttgtcccatcactttatcataacgcatgcctaccggagagtttactatgatgaaaggggtgaatgtcttgtcggatacgatacccttgccaccgggggcgttacacaattcttcacggtaggtagccagtccttcgtggtcaccggtgatgacgataagggtctcgtcgtattgtgggagtgttttcaagtactccacgaattttcctatcgccttgtccgtatagcgtgcagtggtcatatagtcattcattttctgtggaatggccggagagaaatgaatctctttcaattcttcaggcaatttgaagggagcatggccggagtaggtcaccagctgcatgtaaacattctcccccttcttccagatttcccccttctctattttttggctgcattgcgccaggaaggagccgtctccggtacgtttgtgcgtgccaaaggcctctgtcagttcaaagtcatgataagcaatgatggtgtcggtcccgaaactgtaggctatgacgccttggttccaggtcgatactttatcaatggtcaggaggtagttgcgcgagttcttctgctgatgcatggctttttgcagggttccgtaggtgtggtctggatattggctgctgtatgtgccgctgttgataggcagcataccggcgcaaagcaacagctgtgcatcaatggaacgtcctcctttcacttgcgtcagtacgtggggagcgtataaggtggtggagtcttgcagcagtttgttgagatatggagtaatctcttgcctttccacttccctttcgagtacccagctttccaaagattctgccaggatgacgatgcagttgttgcggattccgatacgtccggccaaagggtgatgtccgggtttctggctcagccactcctttatctcttgctgtatctgtggggtggcctcctgcttctggttgatgaggtcatagcataggcttccgaagacggtatacatggaagtggtgcttgcacacagataggctttctggcggacggtgttgtatgcttccttgaatcctcctttggccagggtggtgatggcaaacagcaggataccgattcccaaagctcctccgtaatacttgtatgatgttcttccggcggtatttcttttgtaatgccaataaagggggatactggcaatggtagatagagggaagaagatgtcgtaccagcggaaggagtcgtaaacgcttccggtgaaatcggcgaggtttccagaaagtccatagctgttaagtgggatggcagtatagtaggtgcggaaatacatcaggttgacaatcagtagtatatccagcaaaagcatgatgactatctctgttttccagagccggaagaacttataggggacgagaagtacgagggtggctattattttggtcgcataaaattcgatggtagagaatgaagcgaatgtggtgggtatgctccagatgaaatcgaatagcaggaatttgaaaaaaatggtgattccgaacaaaagagtcactttatctgttgccccttgttggctgttggagcaatgaaaaagatttcttctcataaaatagtatttttaaaatattggggtgcaaagatagatattttagagaagaaaaagcttcataaacagcaacttttggagaaaagttgataaaagtcatttttttttctggattgatgcagtatatgcagaattcttgtatttactttgcagacgtttaaagcaaagaaagcaaaactgttacaaactaagggctggattttattgttctattggtaatttgaggtgacgattgtgtcgttgccgtgatattttgagtgtatgaagaagcattatttatttttcgtttcggtagcctattcctatcctatacttcgcccgcttcaggacgaaatcaggcgtagaggggatgaggtcgcatggtttgttgaaccagactgcccggttctgttggatcaagatgagaggtggcttcaatctgttcaggaagtgatggattatcagcctattgccgtgtttgcgccgggcaactatatttatgatttcttcccgggagtgaaagtttccctttttcatggctaccccatcaataagcgtggcgatgaaaaggacgaccatttttctgtccgcggatggttcgatgtctattgcacgcaaggagaaacgagcactcttcctttcaaggagcttgagaggaaatacggcttctttaaggtatacgaaactggctggtgcaaggcggatactttcgtgaaggaacgtgcacatactcctcataatgcacgtccggtagttttgtactcttctacgtttacaaaaaatataacttctgctcctcatctgtttgataccatcaagagactggtgcgcgagaagaactgggattggattatttcgttccatccgaaattctcggatatggaagtcctcaagaaatacaaggaactggccgcttcctgccccaatattactttccacgagggtggacttgttgatgccaagctgctgaacagtgcggatgtgctgttgtccgatgcttcgtctgtgattgttgaggcgatgatgttggacaaaccggtggtgacttattgcaataccatgccgggaccccatttgctgaatgtcaccgagacggatgctgtggaaggagcgatagaaaaggccatttcccgtccggcagaactgatggagcagatgcgtgcctacgtgcacaagcatgaggcgcatctggacggtgagtcctcttcacgggtactggatgccgtaaacaactacatctggtattttcaaggtaagaccagaaccaagccctggaatctggtgcgtaaatttaaattgcgatggcgggtgggctatccgttgatggccactttgcggttgtggtaattgtcatagcttatggagaacactgagacactacctctgataagtattattgtaccggtctataatgtaaagaattacttggagaaatgcctgcaatccatttgcgggcagacttataagaatctggaaataatattgattgacgacggctcttccgatggttcgggagagctttgtaatttatttgcccaaagggatgggcggataaaggttatccaccagacgaatgcaggtcagagtgcagccaggaatagaggtttggcggtagctcaaggtgaactccttggtttcgtggatagcgacgactggattgaaccggatatgtacgaattcttgtatcacttactgaaagagaatggggcggatatatccatttgctcgcattatatagaaactgccgtaaagaccagagtgaagcactcttctgggcaattctccagcttttctcgtgaagaagctatccgaacattggtagaagataagcgtataagaaattatatgtgggataagttgtataagcgtcaattatttgctggaatatattttccggtaaatagagtttttgaagatattgcagtttcttatcagatattttataaaacgcagaaagtcgttatgcaagactgtcctaaatatcattatttgaaacgtgaaggaagtactactcaaggtaaattgtataattacgaaaaggaatatctgctctttcaaactgtctatgaacaagtgaaatttgtgcgagaaaaagaaatatgggataaagctccttattgtgtacatgaacggggaattcatttgattgaccatttgatgatgcttcctcaatcttctttgatagatgatgttatcaatgatgtattagccagaatgcaggagtttgataatgtgtcgtggccgcaattggatgttatgcatatatttaagcgccgtatgatgtattgtcatctaaaggtttatagatgtatttaccgtttagtgaggacattcttcaaatctaaacggtataaattccaaacattataactttaattgaatctcaataatgaataaagcaagggttatagctttttatctacctcaatttcatccaataccagaaaacgacagatggtggatgaaaggttttacggaatggactaatgtaggaaaggcacgtccattgtttccaggacattatcagcctaaggtgccggcagatttgggatattatgatttgcgagtgccggaaacacgtaaggcgcaagctgacatggcaaaagaatatggtatcgaaggcttttgttactggcattattggtttggaaatggaaagagactcttagagcgcccgtttaatgaagtattgtcttctgatgaaccggattttcctttttgtctggcttgggctaatgagtcatggaggggcttttatcacggcataaagagcaaagatactttgattaatcagctttatccgggagaacaagattatatagctcatttccacgaggtattacctgcttttaaagaccatcgctatattacagtggatgagaaaccgttgtttatggtttatcatcctttggatcatccggagatgaaagagttcattgaactctggcgtactttagctgtgcagaatggcttgaagggggtttatttcataggacaaacctatcatttgaaagaagaaaaagagagacttatgaaaatagggtttgatgctattaatgttgtacgcttgtttgactttgagaagaaagctgctctgacttataaatatgcgaaatggaaacataaaatatttcgtattcctaaggttgtggagtataagaaggccagttctttctttgtgggtgatgaagaatatgaagagaatattatacctaccattattcctaactgggatcattctccacgttcccgtggtaaatcgttggtcttgaatcacgctgaaccttcttattttgcccgacatatgaaagaagcgataaagcgtattgagaataagcctttagaccatcggcttgcatttgtaaaatcatggaatgagtgggctgaagggaactatctggaaccggatttacattatggaaaacgttatctggaagtgataaaaaagaatgttgtagagggatgatttctatggaagaaaagatagcaattgttattccggcatataagtgccgcttcctccgacagacattggattctattgtcgtacagacttgtcggagttttactgtttacataggtgatgatgcaagtcctcagaatctgaaggaaattgtttctgattatgcggataaaatgaatattgtctatcgacgttttgatactaatctgggtggagtggatttgccggggcattgggaccgttgtatagcacttgcaaaagaaccggttgtttggttcttttcagatgatgatttgatgccgcaggacggggtagagcgtattataaaagcattagaatgctatggtacgaggcatggaatgttccgttttccccttgctgtgatagatgaaaatggcaagataatacataaaaatccttcattgcaggaatatccggtttcgggctatcagtttttgttggataaattggaaggaagaatttattcggctgcttgtgaatatgtttttactcgtgatatatatgaacggataggcggttttgtgaagtttccattggcgtggtgttcagacgatgcaacgtggacaagcataggtgaaaatgcaggtggaatgattcctttgccgggtaagccggtttgttggcgaaatgtgatgggcgagaatataagttgttccttcaattatgatgaagagaagatagtagctacaaggcaatttataaaatgggtttcagttttttactcggacagacttcaagatagaaaactacagcatgcgataaagaaatatgcccatacgatattgcattatagtttgcaagatcgttataaattacatgatcttatgggtatttgtcgtagtttatggtatatttgcccttctgtatcattaagtgtggcattccgcatgtgtaagttgaaacttagaaatcgaaagagataatgaagaaaattctttttatacttccttgtgtgccttatccgttgactgctggaggtaatcaggcctttttcaatatggtggaatatatccggcacaaaatgtctgtgtctttgttgctttctccggaaaataaggagatgaatgatgtcgaaagtttaagggctttatggacaaatgttgatttctatctttttagggaagaagatgcagaacctaagactcgttgcccccgatattaccgttggttaaaaaagatgtctgaatccatttcccgcaagatgcaacggcaactgtattcttttcagcaagagcgtccgtataagaatatgacgttgaagaattcttgttttaaaccttttcccaaggcatacgtagagtatgtgtctgacatctcacgtcgtggatttgatattattcaggttgagttctatccattgataacattggggtatctattgccaaaagatgtacaaacagtgtttgtgcatcatgaactgaggtatatacgtaatgaaaatgaaatggaatgccttactcatgtaacagatgaagacaagatgctctatggcattgctaaggatatggagaaagccgctttacgtcaatataagcatgtaattgcattgacggatattgaccgtttattgttggcagacttggttggacaagaatgcaatatttatgtttctccggcagtggtacagatagagtctgcttatgacagaattgtgaagtcggcctctgttcgtctgacatttgttggaagtgaaaatcattacccgaaccaggatgcagtagattggttttgtcatgaagtagccccttgtttgcgtgttcagggttttaaatttgtttttcaagtgattgggacatggaagagccgttacgtgaaaagtcttcaggcagtatgtccggaaatggagttagtgggttatgtggaggatttgcgggaatacttgaatgggagtatcgttctggtgccaattcgtattggtagtggtatgaggatgaaaatattggatgcggtttcctctatggcttcttttgtaactacgacaaaaggagttgagggaattgacctacgtcacaatgaagagtgtttgattgctgatagcgcaactgattttgcagcagcagtcattcgtttggaagcggataaaaaattgcaagtcaggctggcgacgcaagcattgaagcgtttgcgtgaactttataatcctcaggaaatgttggagagaagactggctgtttatgatgagatattgcaaaataatacaaactaatagcatcagattatgctttcaatcataatttgttcggtatctcccgaacgtttggagcaagtaacccggaatattcatgatactattggtgttgattatgaaatcattgctattgataatcgtgaaaaacaatggccgatagcgcgtgcgtataatgagggagcttctcgggcacattatccctttctgttttttgtccatgaggatgtaaagtttcattcggtaggctggggaaagtgcattgagaagaaacttaaggaaccggattgtggggtgataggttttgccggtagtaaggtgaaattgaaatgctattcgggatggggagatgtgtataagtgggatgttatattctattatcagagcgttggaactgaaacccaatttcgtgtagcatcggttactatggagcatccttttaaggaagtgctggtattggatggctttgccatgtttgtgcgtaaggatgtatgggctaaatatccttttgatgaggaattgttgacgggtttccattgttatgacttggattttacattgcaaatagctgcggatcgttgttataaaaattatgtatgttgttcttctgaggtcttgatagagcattcttcacaagggaattttaatcaaagttggtatcaagatacgattaaaatgcacaaattgaagtggaataagatgcttccaatgaaaatagagggatttgaattgggagaaaaagaaatgaggaagcaggaagaatataccttcagtgtctttttgcgtaagttattgaaagcgggatatcctgaggcgaaggtggtgctgaaggactttttagcttacccttattcatggaaacatttacagcactgtattaaatatgtgtacaaatatcttgtaagctaattgtggttgctatgaaattggtttttttatcacatgttagtgattgtgccggaggagcacaaagatgtttattagatttattgcgggggcttaagcatattcaccctgattggcaactctatatggttcttcctggtccgggagatttgcttgatgcctgctccccttatattgatggctataggttcttacaaatggaatggtggcttgtaggtaaggacatggatatcggccgagagagaatttcttatattcgtaaactatcgaagtattccattaaattaacccgttacttgagaaggataaagccggactatggaatgacaaatactgtggtttttcctcatttggcaatatcatgtaagatgttagggataaagcactgttggtttatccatgagatacctgatgtgacttggctgaatcttaatcctgtttttgaatttcgttttatctttagagcgattgataaattatcaaataagatattggtaacttccagatatgcagagtttcattatcaaaaggtgatgacaagcgcaaaaataagcagcatcacccaagctgtagaattgccgatgacggttggagtggatgtgaaatgtgatagacatacgcggtatactatcttgttggtcggcgcttttgactctaataagggacagatggaacttttgcaggcggtaaagagaatagtggctgaagggaaggatattctttgttatctggttggcccggatgttggctttatgcccaaatgccaaaaatatattcaagataatggtctggataacaatgtaaaaattgtctcttacacgcaacaggtggtttcttattatgctttggctgacgttgtgttggtttgttccacttttgaaacttttggtagggttgctgtagaagctcagaaatgcgggttgccattaatcctttctgatgtgggggcaaatccggaacgcattgaggatggagtgaatgggctcctttaccagaaaggaaatattgcggaattagcagaaaagatagaaatattgcgggatgaaaacgttagaaaaatgctctccaaaaacatcgattccattgcaatagaggaaaagtatggtattgataactttgcatcaagtttctgtactttgttgggcttgtagaatgtaattgtaaatatgatgaacgataccctttctcccttagtctctattataatttgtgtctataatggtgagaaatatttagagagatgccttcaaagtgctatgtcccaatcctacaagaatatagaaatcatcgtggtcaatgatggaagtatggataatactccagtcattatagaaaattatgtaaagttggattgtcgtattattgttataaacaaacagaatggaggaatatccgaagcgagaagaataggtgtgaatcgggcacgggggaaatatatacagtatttggattgtgatgatgttttgatgagcaatgcgataggatgtttggtgaaccgtgctgaggagactcaagccgatgttgttgttgctcctttctttttttgtgaagatggcggaagaaaggaatcggacagcatggagtttgaacaaatgtccgggattgaatatttaaaatgtatcctctgttcaagggcatattgggctatgtggaccaagtttcatttacgttctttatatgatgaggggattgaaaggctcggcatctcgtttggagaagatgttgctttgtctacgcagattttagttcgttcgggaaaagttgtttctataaatactccgattcttgattattatgtttattcctcttcggtatctcacgatttgggagagagagcatatcttgatttcaatgtttatgtgcgctggtttgatgactatatagaacggaacggattgcatgaggaatttgcaagagaattagctttgttccatataaagaatactcaagcgcggctccattggaaaaaggtaaaggatgttaataaagaaatgaatcggttgatgatagggcttggggattatccggaattttggaaattactgtcacgccgtgagaagaagatagttactacttataggttatcatcgttgttgggatattggagactgtattattataattggaaaaataaattatagagaaatgaaaatcatagaaaggtggaagaaaagcctgtatagaaaggctgtaaaacatagactgatagcccctcaagtgatagtacttatggatggcggagtttgttctcagatgcaccaatatctgctgggtagaatttttgaaaatggaggacataaagtgctctatgatttgtctttctatgaagagtggggaacagatatgaattaccagtttgtacgtaacttcgatttgttgaaggcttttccttacttaaaagtgaagtccgcttctaaactggctttgtctgtctataagaagaaatattttaatttgggtaataatacttatggcaggcaggatgacttctcttttctacaaaagaagcctccggtctatttaggtggttattatcatgttccggctgatatttggcttccggtattccggtcgctttttagagtaatgcccgaggtgctggatgcacagaataaattgctgtattcagagattgattcacgtccttgttccgtagctgttcacgtaaggcgtggggacttgaaagtagaaattccggcttacggcaaacctgcttcattggagtatttcaagtcggcagtgacttatatgcaggatagggatatgtcttctttcttctatttcttttcagatgagccggattgggtgagggatgaacttattccgcaactttatcttacggaaggtaattgtaagattgttgatataaacggttctgataaggggtatatggacttgtttctgatagctcgttgcaagcatcagattaccagtaaagggactttaggtaaatatggtgctcttttaggagataattcagagaaaatggtggtgctttgtaatgatgaagtggaatatccatggaaagaattacttcaaaatgccatatttttatagattcggctcagtggttgtctctgttttcgtaagtagtgattttatttctatgttgaacagtttgtttcttgtatatcggcaataaaaagtgtggagagggttttcgtgcccttttccacactattaaatcttagaagaaataccccacggagagcatcaagttgcggtttttgtttccgctatcttctatattgtccagtaatccccagtcatatccgatagagacttgatatttttgaaagaattcgactcctgctttgagtccgagaccaaagtcgaaacgtttcatggcattgcttccgaatactttggcagaatcatgaatgcttgtcaatccttccacttcatcaatcaaatatcccgttgccttcattttaccgaagagaccgactgcaaagtaaggaccgaaattgccaaagatggcaaaattgtcattgatggcatatttgtagcccatgtgtataggtatttctaaatagtagggattgaatttcagagatgcatcattcccatttatttgtgtaccttttaaggacagcagtgcagccatgtcgagataaacaccttgggctatctggggcaagtctttctcggccttgatgccgacatggaaacctaccttgctgtcaaaaccatcggtggagaacttgctggaattcatacctgccatcgctccccatttgagtccttcttgcgcgtggatgcccataacgccggtcatcagtaatgcgaataaaactaaaatctttttcatgttgttttaatttatattgatataaacataatatatagacctgacatacttcaatgcttttgaataaattgcatgcagagagtgggtaatataaactcatatacaataattgggtattaagttatctccaacacattggtacaccttgtttattcaaattatgtcctgttacatatttccatgagttacttttccctttaatattttcaatagcaacaaaaatggcatctaagaaaccattattgtctaaatcataaagacaacatgctgctccttgtccagtgtcacacggtgataaagagtcagggaaacgaggggtatatataggttttgcataagagttaccatacttatctatatcaggtagtatttcatatacgaatttatctttaccagagggagcatctaatgccataaataggatatccaatgtaccattattgtcaatatcaccaactgcaactcctgctccatctccatcatgacctaatcctggaacttcatatacgggtgatagactcaaatagttgccatttgattgtaggtcgaaagcaatttgatatcgaaatgaattttctccttctggggcatcatagaccatcattaataaatcaggagttccatttttatttatgtcacatatatcaatacctgctccatcgtaaaaaaatccgagttcttgaatgtatttagcgaagataatgagttatagtggccatcaggtttgaggtcataagctacgtaataccatcggtaggcacgacctgctgtagtgggcttgtctgtgcataaaagaaccatatctaatattccattattattcaaatcacagagggcgatatcacctccagaattttcccaaccctcagcagaaattgaaagaatagatgattcttttgaatagtatccattttcatcaatatcatataagactttataccaaaaattattctttcctttaggattatctattcccatcaaggcagttatataccacccgaccctaagccggg

SEQ ID NO: 4435 - DNA, 42606 bp, Unknown
  gut microbiota DNA sequence
ttgttaagcggcacgtatggtttttccggatttacaggctgtctccttcgatacgtatatcggtacggaacgtttcggaaagttgacggacgatttcctgcaagggttgctgatcgaatgtcagtacgctatgaattacttgggtttcctcggtagtatgtatggcttctgtgggaatggcttcccgtggtggtgctacgtataagaactgataggctgcccagctcgttacacagagcaggactacggctgcggcactggctgtacgcatccagaaccgcttcatgctgcggcgctttagcaaacggctttccagcagcctccagctgttctctgccgtaaagcgtcctcgtggggaacgggtagaagcaaccagtttgttcagtaccttgtcgaaattctcgttattcactttcatttttggcaatttattaagagcctatgactccttttccgtatgtaaagacagctgcttttcaggaattccctatgcctatatcctgaaataatgttaatctgaagctctttgtccgtgaaagtccgtcctgcctacgtatgacttccttgcttctctgtttcaatcaatagggaaagtctgcatgagatgtgcatctcatgttgttcgagatgtgcatctcatgcggttcgagatgtgcatctcatatatgcatacggggcttcttgcgaggaagatgaagcagagttcactccgtcagcaatgcttccttgagtcttgtgagtgctttttgcagttgcgcgtctactgtctttgtgctgatgttcagatcctccgccacttgtgcatagctttgtttctcttcgcgcaggcggatgaatacttcacggcaacgctccggcaggcggtcgagcgccttgacatatcgggcaaacagttcttcgctgataagagtgtcttcgggagaatcggcctggccggaaagttcgggaagctgttcggacgagagtgtagggtgtcggttctctttttccaggtaattgagggaggcgtttttggtaaggataaagcagtaatcctctatgttgttcacttccggcaaccgggcgcgttgttcccaaagcttcatgaagacgtcgagcacaatttcttgcgcccactcttcgtgcttcacgaaatagcaggcaatacggaacaagcggtcgtagcacagattgtagaaactgtgaaaagcccgttccgagtcttcttccttcatttggcgcaagtagcgtctgacttcttgttcggtcatgcagtctcccggttttgttgttattcaatgaacatcaggtcacttattataccgtccgaaacaaagatgccttcccgggtcaggtgcaggcggtctgcctgcatctccagtttgtggctttggaggtagggggctgccatcttcgtgcaatattggcgcaactctgtgccgaaggcttcttccgtatatgtcagggagactccccacatggtacgcagggaagtcatgatgtattcattgtaacgggtcactttatccaggatttctgtttcggaggaacgctgtccctcttcaatggactttatgtatccttccagagaagctgtgttccattcccttgtctccgcattgaaggagtgggcggaagggccgcaccccaaatacggaatgcctttccagtaagcagtgttgtggcgtgagtacatgccgggcttgcagaagttggatatttcataatgctcataccccgcggctcccagggtgtccatgagcgccgagaagaagcgcacgctactctcttcatctacttcgctgatgcggtggctttgcagcatttcgtagatgcgggtgcctttttcgtaagtcagatgataagcggagatatgctccacatcaaggccgacggcttgttgcaggtcgcgttcccaccgttggtctgtttcatccggcagtccatagataaggtcgatgctgatattccggaagccggcttggcggaggcggtgtatggctgcgatggcttgcgcggcattgtgccggcggttcaacagtttcagggtgggggcgtcgaatgtctgtattcccatgcttatgcggttgaaggggagggtacgcagcatggacacatattcttccgtcaagtcgtcgggattggcctcgagggtaatttcttcggcatgttctgttccatacacctctttgatagtccggaatatctgctcgaaatcttcgtgagcgagctgtgagggagttcctccgccaaagtagatggtctctatcggttcttccttcagataacccttgcgggttttcagttcagtgcacaaggcacggatgtactgctgcttcaattcgctgcgagtggtggaatagaaatcgcaatagatacagcgtgtcttgcaaaaaggtatatgaatatagatgcctgccatggtatgcttatggatatttgttgcaaaaatagtcttttggcaggagaatatatcggttttcgggacatttaatgtaatatggaagtagtcagtgtcttggtggatattctcagttttgtctgtaatccggaaaaatagaacattttttgagtcgtatggaaattcattattccgaataaactcctttcctttgttatcagaaaaaggaatgggtgtctattaaaataatgagtaatatgtttgaaggacttgacttttggtttgaacagattatagcttattgcattgccctcgtactggtgcagttcatgaagaaacaaatatagcggcaaatactttattcacttccgtcgtagcacggtttaatcttaggctttttcttgtgatttctgagcttttggggtactaatgaccgatatttacccctttttgaaacaatagtgcccccgaaattaccgggaatggggtaattttgcagtattgaaaaacaaacttaaataatatcatgagaaaaagtaactacttatggctgctgctggtggcagttttattgctgcccgctcaggaaatggctgccaagaagaaaaaagagaaggaagtgacagaccgcgaactttgggccggggtgttgtatcaaatggctgctccggtactgagcaatatgagtgaagggaagctccaggaaaatatgcaggtggagcttagccccacttgggatggacgcgacaaacgggtgacctatatggaatgtttcggacgtctgatggcggggttggcaccctggctctctttgccggacgatgacactgccgaaggcaagcagcgcaggcagctccgcgagtgggcattgaaaagttatgcgcaggcggtagacccggaaagtcaggattacctactttggcggaaagagggacagccgctggtcgatgccgcttatgttgctgaaagcttcctgcgaggatacgatgctttgtgggtgcctctggatagtttgactaaacggcgttacattgaagagttcacccagttgcgccgtgtggaccctccttataccaactggctgctgttctcgtctacggtagaatgtttcctgcgcaaggctggtgccaagagtgatgcttaccgtattgtctccgctctgcgcaaggtggaagagtggtatgtaggtgacggcttctatagcgacggaccgggatttgcctttgactattacaacagcttcgtactccatcccatgtatgtggagtgtctggaagtctttacgaacagtggaaaaaataagatatggaatgcgccggattgcaatttccagcgtgcccagaagcgcatgcagcgtttcggcatgattctggaacgtttcatctctcccgagggggccttccccgtattcgggcgttccattacctaccgcaccggtaccctccaaccattggctttgttggcatggcgtggatggttgcccaaggaattgtcgaacggacaggtacgtgctgccatgacagctgtcatcaaccgtatgttcggtgacaaccggaacttcaacgagaaaggttttctgacattgggattcaatggttcccagcctcatatctccgactggtatactaacaacggcagcctttacatggcttccctggcattcttgcccctgggcttgcccgccgaccatccgttctggacagatgctccgcaggcatggacctcgaaaaaggcgtggggtggtgaagaattccccaaagaccatgcctattatgagtaagactgattcattttttatagtatttatattaattgtttgggggattggtggatttccggtggcactctgtgcacagggtgctgccggtgtccttcccgaaacgcatctggtggaagtggggaaaggatacagccagacttccgtcaacactgccgtattccgtaataattcgctggtgacgcaaggtgacgagcaatacatcagttactatgatgcggaagggttcctgactcttggaaaacggaacctccatgccggacagtggacactgcaccgcacacagtataaagggaatgtgaaggatgcccataacgtcatcagcatgatgctggacggtgacgggtatattcatgtagccttcgaccatcacggacagcccttgaactactgtcgcagcattgcaccccattcgctggaattgggtgagaaggagcccatgacgggcgtggatgaaggcaatgtaacctatccggagttttatctgctgtccggaggcgacctgctgtttgcataccgttccggttcttccggccggggcaacctggtgatgaaccgctattccttgaaggagaagaaatggagccgtgtgcaggatgtactgattgatggcgagaacaagcgcaatgcttactggcagctatatgtagatgagcttggaaccatccatctgtcgtgggtctggcgcgagacttggcatgtggaaaccaaccatgacctatgctacgcccgttcctttgacaatggcgtaacatggtataaggcaaatggcaagaaatatgatttgcccatccgtctgggtaatgcagagtatgcctgccgcattcctcagaattcggaactgataaaccagaccagcatgagtgccgatgcaggcggcaatccgtacattgcttcctattggcgcgacccggacagcgacgtcccgcaataccggattgtctggcatgacgggcagatgtggcacagccgccaggtctccgggcgtaccactccgttttccctgaaaggtggaggcacgaagatgattccgatggcccgtccgcgcatcgtagtagatggcggggagatattttatgtattcagggatgaagaacgggggagcaaagtctctttggcgcacgctacggatgtggcaaacagtaagtggagcatcagcgatttgaccgacttcactgttggtgcctgggaaccgtctcatgacacggaattgtggaagagcaggaagcggctgcatctatttgtgcagcatgccaagcaaggagacggagagcgggttgtggagtttgcaccgcaatcggtatatgtattggaagtaataagataaaagaacagtattagtatatgaaaacgacatgcttatttttattgggtttggctttttgctggggactgttctcatgcaccgctcagcagccgaaaccggaagaagtgattgagattatcaatcgggtgaacaactattggcaggagacccatccgcaacatgggcgctctttctgggacaatgccgcctatcatacgggaaatatggaggtgttcttcctgaccggtaatccggaatgttatgcctattccgaggcgtgggcagaacataatgaatggaaaggcgcgaagagtgacaacaaggaagagtggaagtacagctatggggagagtgatgattatgtgcttttcggtgattatcagatttgtttccagacttatgcggatttgtataccgtgaagccggattccgggaagatagcccgtgcgcgcgaagtgatggaataccagatgagtacggacaagaacgattattggtggtgggcggacggactttacatggtaatgcccgttatgacaaagatgtacaagctgaccggcaatccgttatatctggagaaactgcatgaatactggacctatgccaacagtatcatgtacgattcggaggaaggcctatactatcgcgacggcaaatatatttatccaaaacacaaaagtgtgaatggtaagaaagacttctgggtacgtggcgacggttgggtgctagctgctttggcaaaggtactgaaagacctgcccgaaacagaccaataccgccaggagtacatagaccgcttccagacgatggccaaatccgtggctgcctgccagcagccggaaggctactggacacgcagtatgctcgaccctgagcatgctcccggtcctgaaaccagcggtacggctttctttacctatggtctgttatgggggatgaacaacggcttgctggacaaggctgcttatcaacccgtagtgatgaaggcgtggaattatctgactactgtagccttgcagcccgatggccgcatagggtatgtacagccgattggcgagaaagccattcccggacaagtggttgatgccaactctactgctaactttggggtaggggcatttctgctggcagcttgtgagatggtgcgttttttgaatgccgactgattggagagattaaataagtgtatatgttacacaacatatacactttctttgtattataatgtatatagtgttaattttacacccgttaaaaggtttaatataaaaagattatgattgtacggatgaaaaacactttccggatgcttttggcggcaatgttattgtcgttgtttgcacttccgggatattcctggcaaaaatcctttcccgaaaaagattatgtagcttatttgttcacttatttcactgggaatagtggcgatgaagaagctgtgcgctatgctgtaagcatggacggttatacctactgggcattgaatgataatgaaccggtaatcgactcgaaagtcatcagctccaccgggggagtccgcgacccgcatatccttcgttgcgaggatggcaagactttctatatggtagtgacagatatggtttcagccaatggatggagttccaaccgtgccatggttttgctgaaatctaccgacttggtcaactggtcccactccgttatcaatatacagaaacgttattcaggtcaggaggatttgaagcgtgtatgggctccgcagactatctacgacccggaggcgggaaagtacatggtgtattggtccatgctgcatggcgatggagccgatgtcatatattatgcttatgccaatgcggagtttacggatttggagggagagcccaagccattgtttctgccggagaacgggaaatcgtgcatcgatggagacattgtctataaggatggtgttttccaccttttctataagacggaagggcatggaaacggcataaaggtggccaccacccgttccctgacctccggggcatggacggaagagcccgattacaagcaacagactaaggaagccgtagagggtgcgggcattttcaaactgatagggcaggataagtatatcctgatgtacgacgtctatatgaaaggaagctatcagtttacggaaaccactgacttgaagaattttaaggtgatagacagcgaggtgaagatgaacttccatccccgtcatgggaccattatccccattacccgccatgagctgttgcgcattaccgatgaatggggcaagccgacagaactgggcgcattgcccaacaatcccgtattgccgggtttccatgccgacccggaaatcctttattcccatcagacccaaaagtattacatctattctactacggacggacagccgggttggggaggctggtatttcaccgtattctcctccacggatttgaagacctggcaggatgaaggcgtcatgctggacttgaagtcggagcaagtgccctgggcagatggcaatgcttgggcgccttgcattgaagagaaaaaagtggacggtaagtataaatacttcttctattacagtggaaaccccaagaatggcggcggcaagcagattggagtggctacgagcgattctcctgccggccctttcaccgatttgggacgccctgtcgttactgcttcacccgtcggtggcgggcaacagattgatgtggatgtgtttacagaccctgtttcgggcaaatcctatctttactggggcaacggctacatggcaggtgccgagctgaacgacgatatggtgtccatcaaggaaaataccgttacggtgatgacaccggcgggaggcaccttgcaggactatgctttccgcgaagcagcttatgtcttttatcgcaacgggctctactatttcatgtggtcggtagacgataccggttcgcccaattaccatgtggcatacggtacatccaagtcgccgctcggtcctatcgaagttgccaagcaacccgttgtgctgattcagaatccggaaaaggaaatttacggtccggcacacaacgctgtattgcagattcccggtacagatgagtggagaatcgtttaccaccgtattaataaatggtacttgaaagatggccccggcgttcatcgtgaagtctgcatagaccggatggagttcaatgaagacggaaccatcaggccggtggtgcctaccttttgatttaatgatataacataataatttaataccatgaagaatagattgaaattactggtttggttgtttgccctctcaggtccgctggcagcacagagtgtatctgtcaatggtccggatggaaaattgcagcttacggtatcctgcccgtcagccaacggtgaagtgtcttacgccgtcacctacaatggaaagcaaatgctggaatcttctcccttggggatggagacaaatgtgggtgatttctatagaggattgcagttgaaggaacataaagtcacagctttcgatacggtttatgaacaatcccgaatcaaagcttcgcacatccattaccgggcaaacgaattgctttgttcattcgtcaacggtgaggggaagaatgtgcagataactttccgcgtcagcaacaatgacgtggctttccgttacaccctgccgagggagcagggaaaaggaagcgtcacggtgaacagcgaacggaccggcttccgcttcccgtcgcagaccaccactttcctttgtccgcagagcgacgccatgatagggtggaagcgtaccaaacccagttacgaagaagaatataaggcagatgccccgatgaacgaacgttcgggttatggacatggatatacatttccctgcttgttcaaggtgggggatgacggctgggtactgctcagtgaaaccggagtggacagccgttattgtggctcgcgtttgagtgattgggataacggcgtgtatcgcattgctttccccatgccggaagagaacaacggcaatggaacggtgtcacctgccttttccctgccgggctccacgccgtggcgtactgtgacggtgggggaaaccttgaagccgattgtggaaaccaccgtcccctgggatgtagtggaaccacgctataccaccacccatgattacaagccgggccgtggcacatggagctggattctctggcaggacggcagcatcaactacgacgaccaggtgcgctatgttgacttggcagccgccatgggatacgaatatgtattgattgacaactggtgggacaacaacatcggtcgcgaccgcatggaacagtttatcaagtatgcccgtagcaagggtgtggaggtattcttgtggtatagctccagtggttactggaacgatatagagcagagtcccgtcaaccggatggataactccattgcccgcaagcaagagatgcgctggttgcaaagtctgggtgtgaagggtatcaaagtagacttcttcggcggtgacaagcaggagaccctgcgtttgtacgaggagattctgagcgatgccgacgaccacggtctgatggttatcttccacggctgtaccttgcctcgcggctgggaacggatgtatcccaattacgtaggcagcgaggcggtgctggcttccgagaatctggtatttagccagcatttctgtgataacgaggcgttcaatgccacgctgcaccctttcatccgcaatgctgtgggatgcatggagtttggcggtgtgttcctgaacaagcgtttgaaccgcagcaacgatggcggaactattcgccgcaccacggacatctttcagctggcaacggcagtgctgttccaaaatcctatccagaacttcgccttggcacctaataacttgacggatgctccgcaaatctgcctcgactttatgaaacaagtgcccactacttgggacgagacccgtttcattgacggctatccggggagatatattgttcttgcccgtcgtcatggcaacacgtggtacatagccgctgtcaatgcaacggcggaaccattgaaactgaagcttgaccttcctgtgctggcaggacaagaggtgtctctgtatagtgatgacaagaagatgcagcctcaattaaagctgcagaagataaagactgacggctctctgcaactcacggttcagccgcagggaggggcggtaatcgtggaataaagaaggcatggagcaacccttgttttgtaatgatatatcataacggattacttcttttgcaaatcattgattatcagaggtttatgattatcctgattcagtcgtatactgaatggcattcactatacgactgaaccctattcactatacgactgaatggcattcagaatacggctgattgtgactatcgaactaaatgtgaatgattaataccgacttaataccatgaatagattcttgaaattattgtccttgtgtctgttcttgacactgaccgttcctttgcaggctataacgaatggagtggcgaatgaacccgattcagtctatctcttttcctactcccatgccgacggcagtggcggtctgaaactagcctggagtcccaatggcaaccgatggttcagcgtggcagagggcagctcctttgtcaactcggacttcggcccctgggggcaaatgaagcggatgctgaaaccgcacttgatgcagacccgtgccgacgaccgttggcactgtatctgggaactgacggaaagcggaaactcccttgcatacgtcgagtctcccgacttgctgcaatggaaagcgcagaaatactttgaccgttctcgccttgccgaataccggccggaggaggtctatcctaacgtgcggaaggaggttctgctgaacggtaccgtacagcagggttggatgcagcgtgtaccgtatgccacggtgcagcgtgtcatctcctttgcagagcataagaagtaccgccaggcactccatgccgaacgtaccgagcaagaccccgtacgttttgccggactgaaaccggtggaggcgactatcgaagtggagacggaatgtgcaaaacccatcagcaagcatctgataggtattttcttcgaagacatcaactatgctgcggatggaggactgtatgccgagctggtacagaaccgcgacttcgagtattcgtctaaggacggttcacaccaaggttgggacggcacatatgcctgggcggtgaaagagggcgatgctgcggctgccgttaccattgccgctgccgaccccattcatcccaataaccctcattatgccgtattggaggcgcgtcccggagtgacattgcagaacgacggtttcgacggcatcagcttgaagaaaggggagaagtacgatttctctctcttcgcccgcgtggcaccgggcagcaagggaggcaaggtggttgtttgcctgctcgaccagacgggccgtgagattgcccgctcttccgtcaatgtgtcctccaaagagtggaagaaacagcagacggtgctgacggcaaacgccgatgtgcgtgccgccgtgctctcgcttcagccgcagacggtggggacactgcatctcgatatgatttccctttttccgcaaaatacattcaagggccataagaacggcttgcgtgccgacctggcgcagacgcttgccgacctgcatccacgcttcgtccgcttccccggcggctgcgtggctcatggcgacggcatcgacaatatctatgattggaaaggctctatcggaccgcttgaagcgcgtaagccgttgcgcaatctgtgggggtatcatcagacacgcggactgggctacttcgagtacttccgcttctgcgaagatataggtgccgaacctctgccggtattggcagcgggcgtgccgtgccagaattcgggcacacactcgcactatgccgacaactgtccgcagggggccaacaaggaactgatgcgctacggccagcagggtggcatcccgatggaagagatgcctgcctatatccaggatgtgctcgacctgatagagtatgccaacggcgatgcacgccgcaccgtgtggggcaggaagcgtgctgaggcaggccatcccaagcctttcaatctgaagtatatcggcatcggcaacgaggatatgattaccgaagtgtttgaggagcgctttgccatgatatacaaggctgtcagggagaagcatcccgaaattacggttgtcggcactgtaggtcccttctacgaaggcacggactatgcggagggctggcgccttgccacggaactgggcgtgcccatggtggacgaacactattacgtggatccgggctggatgattcacaaccaggactactacgaccgttatgaccgtaccaagtccaaggtctatctgggcgaatatgccgcccacctgcccggacgtcccaacaacatagagacagcgttggcagaagctctctatctgacttcggtggaacgtaatgccgatgtggtggagatgacctcgtacgccccgttgctggcgaaggaaggccatacgcagtggaatcccgacttgatttatttcaataacacggaagtgaagcctaccgtgggctactacacacagcagatgtacggacagaatgcgggtacgcagtacatcacctcgcacgtcacactgaataatgggcaagaggctgtccgtaagcgcgtcggtgtttcggtggtaaaggatgaggccacgggtgaccatattgtaaagctggtgaacctgcttccggtggaggtttcctctacagtgaagctgaagggcatcgacttgcagaatccctcggcagtgaagacgctcctgacgggtgacccgaaagacaagcaggcacgttccgtgacttccgccttcgtcgacatcggcggtacggagtttccttataccttgcctgcctattcgtttacggtgatacgtatccatgagaataaggggaaataaggataaatccgtgtaattccgtgcgtgggaacttaagaacttaaaaacttaaaagatatgatacgattattgactttggcacttgttgcagccatgaccggcagtgtgtcggcacaaaagcaacagactttgcattccggttatcccatcgacccggttcctttcacttcagtgaaggtgacggacagtttctggggacaacgcttgaaggcaagccgcgaggtaaccatcccgttggctttcagtaagtgtgaggaaacgggacgttatgaaaactttgtgaaagctactcatcccagtgatgagtataaggtgggaggcttctcctttgacgatacggatgtctataagacgattgaaggtgcaagttactccttgcagacttacccggacaagaaactggaagaatatatcgacagcgtattggtcatagtggccgccgcccaagaaccggacgggtatctttacaccgcacgtaccatgaaccccaagcatccgcacgattggtcggggccggaacgctggtcggaggtggagaatttgagccacgagttctataatctgggtcacatggtggaaggggctgtggcttattatcaagctacaggcaagcggaacttcctggatatagctatccgttatgccgactgcgtatgcaagaatatcggtgaaggccccggacagaagcgtgtgattcccggacatcagattgccgaaatggcattggtacgcctctataccgtgacaggagataagaaatatctcgaccaggccaagttcttcctcgacgcgcgcggcactacggcacgcaaggacatctatttgcagtcgcacaagcctgtactggagcaggaagaggcagtgggacatgccgtacgtgccggttacatgtattccggtatggctgatgtggctgccattacgggtgacagctcctacatcaaggctatcgacaagatatgggagaatatcgtcggcaagaagatatatattaccggcggtatcggtgcgcgtcatgcgggcgaagctttcggtgataactatgaattgccgaatctgactgcctacaatgagacctgtgccgccatcggcaatgtttacatgaattaccgcctctttctgctgcatggcgattccaagtatttcgacgtgctggaacgtacgctttacaacggattaatctccggcgtttcattggacggaggcaagttcttctatcccaatccgttgtcttgcgatggtaagtatcacttcaatgccgaccatacgattacacgccagccgtggtttggttgtgcctgctgtcccagcaacatcagccggttcattccttctttgccgggatatgtgtatgccgtgaaagacaatcaagtgtacgtcaaccttttcttgtccaaccgtgccgagttgaagttgaatgaaaagaaagtggtgctggagcaggaaaccggatacccctggaacggagacattcgtgtgaaggtggctcagggcaacctgccgtttacgatgaatatccgtattccgggttgggtgcgcggcagtgtacttccgagtgacctttattcgtatgccgacgacctgaagttgggctatcgtgtattggtgaatggcgaggaggtgaccggtgaacttcgtaaaggctatctccggatagaccggaagtggaagaaaggggatgtggtagaggtgcatttcgacatgcaaccccgtgtggtgaaagccaatgaaaaagtggttgccgaccgtggacgggtggccgttgagcgtggtcctatcgtttattgtgccgagtgggccgataatgattttaatatacagaatatcatcctgaaccgtcatccgaaattccaggtgacggagaagcccgaactgctgtatggcatcaacgaaattaccacagaagtgcaggctcttggttttgatgctgccggaaagttggcaaccagagatgtgacgctgaccctgataccttattatgcatgggcacaccggggtgagggcaagatggatgtatggttgccggtaaataggattgatgtagaataggtaagtatgtcgtcataatttagcttatgctatcgttataaacagattaaaaccatgaaaagacttttatttctattgacattgttcgttgttcttggcatgcaggcgcaacagcatgtgatgactgttgatgtatcaaaaccgacggctcggataaatcctgccatgtatggaatcttcttcgaagacattaatttcggtgcggacggtggtttgtatgccgaactggtaaagaaccgctcttttgagttcccgcagccgctggtggggtggatacctttcggcgaggtgacggtacaggacgagcggccctgcttcgaccgcaatccgcattatgtgcgcattaccaatgacggctgtcttttgcgtgccggactggataatgaaggttatcgtggcatcggcctgaaaaaaggagaagattaccgtttctccgcctatgtccgtacgccggataccaaaccaatgaagctttccgtcgaactggtgaattccaacggagagaatctcctgaagaaggaactggaagtgaaaggcagtgaatggcagaagctgacggctgtgctgaaagctccttttaccgatgttcgctcgcgtctgcgtgttgtgttgcagacggagggtacggtagatatggaccacatctctctcttcccggtgaacacttggaagaagcgtgagaatggattgcgtgccgacttggtacaagccctctatgacctcaatcccggagtattccgttttcccggtggctgcatcatcgaaggcaacagccttgccacccgttatcaatggaagaattccgtgggtccggtagagaaccgtcctttgaacgaaaatcgctggaactatacattcaagcataaagctttcccggattatttccagagttacggacttggcttttacgaatatttcctgctgagtgaagacctcggtgcagagcctctgccggtactgagctgcgggctgtcctgccaatacgaaagcaacgaagtggttccccttggagaactcggcccgtacgtgcaggatgccctcgacctcatcgagtttgccaacggtgctgcaacctccaagtggggaaaggtgcgtgccgatatgggacatcccgaaccgttcggtctgaaaatgattgccatcggcaatgaacagtggggggaagtctatcccgagcgtctggaagtgttcacgaaagccatccgtgcggaatatcccgatatgcagattgtaggttcttccggtccgagtgcagatggggacaagttcgattacctatggcccgaaatgaaacgcatcggggtggatttggtggacgagcattattatatggctcccgactggttctttgccaatgctgcccgctatgatgactatgaccgtaaaggaccgaaagtctttgccggtgaatatgcatcgcatgaccaccccaccgggaaagccaataatttcttggcggcactgtccgaagcagcttttatgacgggactggaacgtaatgccgatgtggtgcgcctggctacctatgctccgttgtttgcccatgtggatgcctggcagtggaatcccgatttgatttggttcgacaatctccgtatgatgcggactcccaactattacgtacagcagatgtacggtatgaatgccggaacagatgtgctgaacctgcaaatggacggaaaacccgtgacggggcaggacagcctttatgcatcggcagtgctggatgctcctacgggagaagtaattctgaagcttgtcaatgcgggcagcagatcggagaaggtacagatagagttcagcggattgaagaagcggcagcttgtctcgggttcctgcacctatttgcaaagtgatgactggaaagccaagaatacactggagcaggaggctattgttccacgtattcgtccggtggaggtggcttcccgttctctgagcctggagcttcagccccgttcgttcggagtctatcgtttgcggataagtactcaatcaaaataaattcccatttagtcacctatttaattatgtgaactagttatgaacacttatttaaagaattaaattcagcctttttcgaacgattattcttccttttaattataggataggcgtatctttgtgacggcataccggttctgcttgtatgccgttgctaatttttataaactatttaccatgaagaaacatttcattaccggactgcttgcgacttttgccattgccgcaagcgcacagtccttcactgaatggcaaaaccctgaagtgaatgccgtgaaccgtgctccgatgcacaccaactattttgcctatgagtcggtagatgctgcggctcgtggagcaaaagaacattcttccaattacatgactctgaacggtatctggaaattcttctgggtgaagaatgccgatgcccgtcccacggatttctggaaagtggggttcaacgacaagggatggagcgatatggccgttcccggtatgtgggaactgaacggtttcggcgaccctatctacgtgaataccggatatgcctggcgcaatcagttcaagaacaatccaccgcaggtgccgacggagaataacaatgtaggttcctaccgtcgtgagattgtaatacctgccgactggaagagtaaggacatcattgctcatttcggttccgtgacttccaatatgtatttgtgggtaaacggcaagtacgtaggttatagtgaggacagcaaactggaggctgaattcaacctgacaccctacttgaagccgggacaaaagaatctgatagcctttcaggtattccgctggtgtgacgggacgtatctggaagaccaggacttcttccgttatagcggtgtagggcgcgattgctacttgtatgcccgtgacaagaagcgcattcaggacatccgtgtcactcccgatttggatactgcttataagaacggttccctgaaagtacagcttgatgtgaagggtggcggcaatgtcagtcttgaactgctggacgctgccggaaaacaggtggctacagctgtcgccaaaggtagcgctactgccttgataaatgtggagaatcctcataagtggacggcggaaacgccttacttgtataccctgcgtgccactttgcaaggcagcagtgaagtgattcccgtaaaggtgggcttccgaaagatagagctgaaaggaagtcagatacttgtcaacggccagcccgttctcttcaagggagccaaccgccacgagatggatccggacggtggttacgtcatttctcgcgaacgcatgattcaggatattcaggtgatgaagcagttcaacttgaatgccgtgcgcacctgccattatcccgacaataatctctggtacgacctctgcgaccaatatggtatttacgtagtggccgaagccaatatcgaatcccacggaatgggttatggggaagagacacttgccaaacgtgaggactataagaaagcacatatggagcgtaaccagcgcaatgtgcagcgtagcttcaatcatcccagcgtcattttctggtctttgggcaacgaagccggctatggcgctaatttcgaagctgcctacgattggataaaggctgaagacccgagccgtgccgtacaatatgaacaagccggtaaaacaggcaagacagacatctattgcccgatgtattatggctatgacggatgtaagaaatacagtgaggatgattctatgacaaagcccctgattcagtgcgaatatgctcatgcgatgggaaactcgcaaggaggttttaaagaatattgggatttggtgcgtaaatattccaaattccaaggtggctttatttgggattttgttgatcagtctgtacgttggacaggaaagaacggtaagatgatttatgcctacggcggtgacttcaaccgttttgatgccagcgacggtaacttctgtgataatggtttgattagccccgaccgtgtacccaatccccacatgtatgaggtaggccgtatttatcaagacatctggactactccggccgacttgaagaacggcgaaatcaatgtgttcaatgaatacttcttccgtgacctttctgcctattatatggagtgggaggtactgaaaggtggtaaggtgatacggactggtcgtgtggataatctgaatgtagctccccaacagacagccaaaatcaagttggacttgggcaagacttgccaatgcaccgagtggttgctgaatgtttcctataagctgaagaaccgtgaaggattgctttccgccggacatgtagtggcaaaagaccagttgacgctcaatccttaccaagctccttccatggaattgaagaactgcgaacagagcaatatcgagatgacggctccccaagtacaggataacgattggaactacctcatcgtctccggtaatgctttccgtgtagaaatcaacaagcacaacggttatctgaccaagtacgaagtgaatggccgggatatgattaaagacggcgaggctttaaaaccaaacttctggcgtgcgcctgttgacaacgactacggtgccaatctgcaacgcaaatatatcgcttggaagaatccggaaatcaaactgacctctttcaaacagcgcacggagaacaatcaggtgattgtagaatctgcttacgacatgccgggtgtttcagctaagctgaaccttgtttatgtcatcaacaatgccggtgccgtcaaggtgacccagaagctgactgccgacaagaatgccaaagtatcgaacatgttccgtttcggtctgcagatgcctatgccgcgcagctttgaaaccgttgaatactatggacgcggtccggttgaaaactatattgaccgtaatcattgcgccgacttaggcatttatcgccaaagtgtggccgagcagttctatccctacatccgtccgcaggaaaacggaacaaagaccgatattcgttggtggaagatgttggatcagtctggtaatggcatcaagattgtggcagccgctcccttctctgcatctgccttgcactataccatcgagtctttagatgaaggctggagcaaagggcaaggacactcgcaagaggtggatgaagctgatttgactaatctttgtatcgacaaggtgcaagccggtctgggttgtgaggatagctggggacgtattgcacgtccggaatacctggtgccatacgctgattatgagtttacgttcatcctttttcccgtatgccatagtatcggaatagaataacatttcttctcagtgtattacatactgagaaacagattttataacactgaagcggtcgcctttccgatgggggagggtgaccgctttgtgttgatgttttgcttgcttctgtatatttctttgttttattgtttctgatttcggcaaatgcaatccgtcagatggtcgttgataaaccccgaagcttgcagatgggcatagcaaatggtagagccgaagaacttgaatccccgttttttcatgtctttgctcatggcatctgattcgggagatgataccggaatctcactcaatgactgaaaatgattgataatggggttccggtcggggaagaaggatagcgtatagttgtaaaagctgccgaattctttctgtatggcaagaaacagctttgcattggtgatggtcgacttgattttcagacggtttttcacgatgccgtcaaagtgcatcagccgttccacgtcttcgttggtcatttgcgccacttgcgtggcatcgaaattgcaaaaggctttgcggtagccttcccgctttttgaggatggttatccagctcagtcccgcctgggcactttccaatacaagaaactcgaatagtgtcttgtcgtctgttaccggttttccccactcttcatcgtggtatttcacatacagctcgtcggttccgcaccagccgcaacgtccgtttataaagtcttgcataagcgtaattaatatatgtaatgaagtgctaagatattgttttcattgcgaacaaacaaatctatccattcagaatggacagttctcatattctttcttacttttgcaaaaaggtaacgggtggtttgaacgcctgaaaaacaagaaaattaataataaagaatggaaaagacttggagatggtttggcaagaaagacaagataacccttgccatgttgcaacagataggagtggaaggcgttgtcactgccttgcatgaagttcccaacggtgaaatatggacgttggaagccattgaagatttgagggattatattgaatccttcggattgcgctggtctgtagtagaaagtctgccggtgtgcgaggctgtcaaatatgcggggagtgagcgtgaccgattgatagagaactacaagataagccttgccaatctcggcaaggcaggcatccggacggtatgttacaacttcatgccggtgattgactggattcgcacggacttacaacatccctgggaagacgggacatcttctctttatttcgacagaatccgttttgcctacttcgacctgaagatattggaacgggagaatgcggaagccgattattctccggaagagctggacaaggtggcagaactggataaggtgattacggagtctgaaaaggcagagctggtagatacgattatcgtaaagacacaaggattcgtaaatggcaacatcaaggaaggtgacaaggagccggtaaccctgttcaaacgtttgctggcgctatacaaagggatagaccgggaggctctgcgcgagaatatgcgttatttcttgtctgccatcatgccggtatgcgaggaatatggggtgaatatgtgtgtacaccccgatgaccctccttttcaggtattggggttgccgcgcattgtgacagacgaggcagatattgcctggatactgagtgcagtggacaatccccataatggcctgactttttgcgccggttcattgagtgcgggtgaacagaatgatacccgtgaactggcaaggaagtttgccaggcgtacccactttgtgcatttgcgcagtacgaaggcaataccgggtggaaactttatcgaaagttcccatctggagggaaggggacacctcattgatttgattcgtatctttgagaaagaaaatccgggattgccgatgcgtgtggaccacggtcgcatgatgttgggcgacgaggataaagggtacaatgcaggttattcttttcatggccgtatgctggcattggctcaagtggagggaatgctggctgtggtagacgatgaattgtacggaaaatctgtttgattgattttaagttaggcatggattacgcgaaaaatcatggatattcttcatttattatccatgatttttcatgtaatccgtgtctaaagaatctattagtgttgtaaatccggcttaatagttgaaagccttggattttacgtaaaccttgaagtctttgattccacccggtacctcgctttccattctgggtagatattgtatgccggtcagggtgcgggtactacccaagtcaatcacgacagaatgcgggtatggagtgtcttttgttgtgctccaataggttgattcctggaggtcgaagattttgtccgcagaacagttgacgtgggatacgtcttcgctgtcggcataattgacaatccagggttcgcgtgacagacgttccccattctcatccagcagatacatttcggcaatgcaagccaggtcttttccatcttgtgcactcaaggcttccaggcagacataacgtccggtgacgggttggtcgaatttgcgttcctgccaaccgttgccgggattgaagctgccggagaggacgggctgctcaccggacaagtcgagattttcaccctcattgcggtgcgtcagcggtttggtgacgagcaactggtccagtaatggctcgctcagtccttcggacttaacttctttgggaccgatgatgtcgaagacaatcacttcattctcacctttcttcaaccagcatcccgggatgtagagggtctgttgcgggccgatttcccaaatgcgtcccatggcgtgcccgttgacgtagacaagtcccttgccccaagtctcgaagtttaggaatgtgtcgctgggcttgttcaccttaaaggtggcacggtagcaacccggaatgcgttgtcctaactcatctttcagtgagccgatgggctggaacttcatgttcttatagaaatcgtatgtatcttcgagattatagacttcccaatccttcaggttgcaggtgaaaggacggccgtcgatgtctacggtaagttctacgctttgggtgatacccttgaagtccttgatggcacgtccaaagttgatgcggcccatggcttctaccagaatgtcgaggcgtgcacctttggggcaggcggggaattccagttgcttttcaccgttgcggcggtccagtttgccgatgtatttgccatccaggaaaacttgggcataatcgtgcgcatcgttcacagtgagcagggacggggttttcatctcgggcagtgtggtgcggtagagaatacttccgaatccctggttatattcctccatggtacggatattgcggtctttcttggcagcaggaagattgtcgaacaaaggagccatctctgtaaattggaaagacggaatacggatgggcttgattaaagcgggaactttagcctgcttctcgccgttcatgtatttggacaatgcttttcgcaattcccagtatttgggagtggtctgtcccgattcgctgatgggggcgtcgtagtcgtaagaggttacgtcaggggcgaatccgggtgagttggctcctgcccagtgtccccagttggtccctccgtgggtcatgtagaggctgaaggagatgcctttggacaacatctcgtcaatgccggcaatcatgtcggcagccggacgggtttcgtggttggctccccacttgtcgaaccagccgctccagaattcggagcacatcagcgggctatcaggacggagtttcttcagcggtgcaaactgttggtcgatgttggctcctgtaccgaagttcatggtccataccaggtcgtggagtccgttcttggtgaagttggacgcccagtcgcattggaacagtgctacgccggggtagttggcgcgtacgatgtcgcggatttgcgatacgtagcctttgtcttccccgtaggagccgtattcgttctctacttgtaccatgatgatgggacctccgttctgtatggtcataccggctacctgctcggcaacggctttttcgaagatacctacacgctccataaagtaggggtcggattcgcgcaggcggatatcttttttcttgagtaaccaccagggcagtccgcccatttcccattcggcacagacatacggtcccgggcgcaggatgacatacatgtcgttctgctggcataggcggcagaattccgccaggtcattctgtccggtgaagtcgaacactcccggctgagactcgtgggagttccagaatacataaaggcagatggtgttcatgcccagtgccttgcatagcttgatgcgttggtcccaataggctttggggatacgtggatagtgcagctctgcggctttgatgacaaacggcttgccattcaataggaatgttcctttgccggcagagaagtcgccttgtccttcccattgggtacgcgggtcccagctgtcgcgccagggtatcgcgattgtgccgtccttgccgaattcaagcgggagccatacgtagcgtgagtcctcaaggtttttctttttccagcggtcgaacatggcaatgtaggcatttccttttccgtatacttgctgcacgtaagtgctttgtgcatagaaggtcttatctgcatcaggaccggtacacggattgccgatggtagtccattgccccatgatggagtcggccacagccagttcggcaacattgggatcccagccggtacaaccggaagagagcatatagtacttgccgttatacttgaatacggcgggtgcttcgcggctttgcttcacgaaattgcgtgtatagcgaccagtgggcttcaggtagtcatccgttagttcgcttatatataaggtagcgttgttttccgacgagtagaactgatatgccttgccgttatcatcaacgaacactgtttggtcgcggctcatcgcaccgttgggacggaagctgcctacataggtgaatgtcccggtaggagaatcgctgaccgctacgccggcacatgccttactgtagtcggcgctttccacatgcgcccacatgacgaatttctttgtcttttcgttgtaaatcactttgggacgttccaacaccttgctggggtgcaggtcgtgtttctcgtcatctttcacggcaggaagtacaataccctcgaacttccagttcagcaggtcttttgaagagtagcagctgacaccggttacgtcggtgcggtagcattcccacgtagcccattcgggcaggatggtttccccttttttgtattcgccataccaatagtaggtcccttcgtggtaaagaaggccgccgccatgggcgttgatgggattgccgtcggtgtctttccatacttccccgggtatgattgcggcatttttcgtttgtgcttttgtttttgcagatggcaggcagcaaaggcaggccagcaatgcaaaactccaaataattttccttttcatttaagaattcggtattagataattaataaatcgtttatgttttgggcaaagatatgcgaaagttgagaaatggagggtatgtaaatgtgtcaaaaaggagagattatagctctaatctctcctttttgtgatgtttttcggtcttttctatttggtttgtacttgtttcatcacccggaggaaatttccaccccatatcttggcgatgtctgtttctgtaaatccatgttccagcagacggacggtgatattgatgaaatcattgtccccattgcatcctttgaccccgcctccaccgtcgaagtccgagccaatgcccacgtggtctatgcctgccacttcaaccatgtgcagcaggtgtttcatgaagtccgtaaggttggttttcttggcatccgggttcagaaactcgtctaccaggcaggcttgagccacaccgccatgtgcggcaagggcgcgtagctgttcgtcggtcagattgcggtcgtgtctgtagatggcgcttgcagaggagtgggagactatgaccggtgcttttgaatatttcagtacatcccagaaggtgctttcggctgcatgggaaaggtctatcattattcccagccggttcatttctttcaccacttttctaccgtaaggacttaagccgttccaacgggcagtcgtgtccgaagaactgtcgcagatgtcattgttgcgggtgtggcaaagggtgatgtaggtaacgcctgcatcatggaaacgggtgatattcttcaaatccttgccgatgccgtatccgttttcgatgccaatataaaaggctttctttccttcggtcttgagcctggacaaatcatcgggcgtgcgggctatggcacattgctccccgttcatctccacttgtcggtagatgtggcgtatcaactcatccactcggtcaatggctttcagactgttctcttcatcgcacgggccttgacgcacccagcatgccaggtattgtccatccaatttcccttctcgcatcttgggcaggcaaacctgcgttttttcgcgcgtacctatattataggaaacgtcaaaatcaagtggggtgtctgtatgcgtgtcgagggagaggatgcggcgatgaatctctttggcatgccggtaggtagctgccttttgaaccagaaaatagaagaatctggcagagatgctgtcgcctgccgtagccagagcttcgggatggaattgcacaccccatatcggatattcgtgagaagactctatagcttcgggaatactgtctgacgaccaacccgttacgctgaatcccggggcaacttgcttgaccgcctggtgatggtgagtattggtgaaaagttgtgtctgtccggttatggatgccatggcagaaccgggagtgaggtggacggtatgagttggtatactgctcggttcctgctgctggtggcagacagtggtgtcgggatgctgggtagggatatcctgataaagggttccgccgaaagctacattgattaactgttctccccggcagatgccaaacatcggaatgttacgccgggtagccaggcggatgagtgccatgtcgtatacatcacgcagggagtccacctctcccagctgttcgatgggcgattcattgaaataggaagggtggatgtctcctcctcctatcagaatgataccgtccagccggttggcaatgtctgtcaagacaaggctatcggtagtgatggaaatcagtataggtgttccacctgcctggattacagactcggtatacgtcatctgtgtggatgagcttcggcccggatgtgagcaggaaatgccgatgagaggggctttcctggttgttttttggttggactgtcccattgccaaatatggacatagaacgagcagtgttgttaacagtagtttgttcatggttttcgggggggattctttttcctgcaaagttataagaaatatttaagccgtccaagaagttggatgacttgtgaattcgggcagtttattggcagaagaacattatattctttgttggtggaggaagtgtgttatataacatgcttcccgatgttgcttttctttgaattaatgcctaatttgcgcctcacaaaaagttaacggcatcatcgtatgtcaggttattcacttaaaatcttaatatatcatgaaagtatatcagacgaatgaaattaagaacattgccctccttggcaatgacggctcgggtaaaaccactctcacggaagcgctgctctttgagagtggtattataaaacgtcgcggcaggattactgccaagaatacagtcagcgattacttcccggtggagcaggaatacggctattctgtgttttccaccgttttccatgtggagtggaacggcaagaaactgaatatcattgactgcccgggtagtgatgactttgtaggggctgccatgacggcgctcaacgttacagatactgccattctgctgctgaacgggcaatacggtcccgaggtaggtacgcagaaccatttccgctacaccgagaaactgggcaaaccggttattttcctggtaaaccagcttgataatgaaaagtgcgattatgatatggtgcttgagcagttgcaaaccatatacggtccgaaggtggtgcccgtgcaatatccgctggctaccggaccgaacttcaattcgttgatcgatgtacttttgatgaaaaaatattcgtggggacccgaaggtggcgctcccattattgaagagattccggccgaagaaatggaaaaggctacagaactgcacaaggctttggtagaagctgcagccgaacatgacgaaggcctgatggaaaaattctttgagcaggactctttgacagaagacgaaatgcgcgaaggtatccgcaagggactggcttcacgaggtatgttcccggtattctgcgtctgtgccggcaaggatatgggtgtacgccgtctgatggagttcctgggtaatgtggtgccgtttgtggacgaaatgccaccggtgcacaatacacgcggtgaggtggtgaagccggattctaacggaccgacttccttgtatttcttcaagactgccgttgagccgcatatcggtgatgttcaatacttcaaggttatgagtggtaaagtgcacgaaggtgatgattttaccaatgcagaccgcggttccaaggaacgcatcgcgcagatttatgcttgtgccggtgccaaccgtatcaaggtagaggaaatggtagccggtgacatcggctgtacagtgaaactgaaggatgtacataccggcaatacattgaacggtaagggctctgaaaaccgtttcaacttcattaaatatccgaactccaaatactcacgtgctatcaagccgttgaacgagtcggatacagaaaagatgatggttgctttgaaccgtatgcgagaggaagacccgacatgggtgatagaccagtctaaagaattgcgtcagactattgtacacggacaaggtgaattccatttgcgtaccttgaagtggcgtctggaaaacaatgaaaaactgcaaatcaagtttgaagaaccgagaataccgtatcgcgaaacgattaccaaagctgcccgtgcggattatcgccataagaagcagtcgggtggtgcaggccagttcggtgaagttcatctgattgttgagccttactacgaaggcatgccgttgcccgaaacctataaattcaatggtcaggagttcaagatgaacgtcaagggtaccgaagaagttccattggaatggggtggcaagctggtattcgtcaatagtattgtgggtggttccattgatgcacgtttcatgccggccatcttgaagggtatcatgtcacgtatggagcagggaccgttgactggttcgtatgctcgcgatgtacgtgtcatcgtatatgacggaaaaatgcatccggttgactccaatgaaatctcctttatgctggcgggacggaatgcgttcagcgaagcgttcaagaatgcaggcccgaagattctagaacccatttatgacgtggaagtatttgttccgtcggacaagatgggtgatgtgatgggggacttgcagggacgccgtgccatgattatgggtatgagcagcgaggccagttacgaaaaactgagtgctaaggtgcctttgaaggaaatgtcatcctactctacggcacttagctcactgactggtggacgtgcttcgttcatcatgaagtttgccagctatgaactcgttccgagtgatgtgcaggataaactgattaaggaatttgaggcaaagcaagctgaagaatgattttcaggggttggtagtttggctgttgtaactaccggctgctaatataacaattgttaaagccgttgttacttcatggcaagtaataacggcttttttcattaacgtagattaagaacatgcagaattgtgaattgaatgattaattttttattaaatttgcaaaccaaaggcttgtgtttttgttataatgctcataatacaacctaaaaaatggtcttcggttaatttacgagaacgtccggttaaatcaggttaattggttaggagtgttaattagggagtgttaattttgtgactatgaaaaagtcaactatatggatattaggtgttgttatggggctttccttccttagtttgctgtatctgcagataagctatattgaggaaatggtgaagatgcgtaacggacaatttgatgaatcggtgaagcgtgcgttgatggctgcttcgaaagaggcagagtccgcagaggttgtgcgttggctgaatgaggatatctccgaggcagaaaagaaggcgtgggaacaatcgcaaagcagtagcggagtgatgcgtacccagcggtttgtgatgacagctccggatggcagtgtccgttcttcggtggaattgaaaactttcagtaacgagccttctgaattgccaagagcaatgatttcacgcaaacacggagcaaaaaccattcctcagacttcacgctcgcagatagagatgcttaaaaaccgctatctttaccagcgtgcattggtagacgaggtggtgttgcagatggtatacaatgccagcgacaagccgattgaggagcgtgttaatttcaaaagtctggaccagtatctaaaagcaggtctgatagagaatggtctcggtgatatggattatcacttcaaggtgatagaccgggaaggtcgggaggtataccgttgtgcggattatagcgatgcagggagtgaaagctcttattcgcagccattgtttttgaatgacccaccagcccgtatgagtatcgtcaagatacattttccgggaaagaaggattatatcttcgattcggtcaggtttatgataccgtcgatgatatttacttttgtactgctggtgacgttcatctttacgatttacatcgtattccgccagaagaagctgacggagatgaagaatgatttcatcaacaatatgacgcacgagttcaagacgccgatatcgacgatttctctggcggcacagatgttgaaagacccggctgtgggcaagtctccgactatgttccagcatatatcgggtgtcatcaacgatgaaacgaagcgcttgaggttccaggtagaaaaagtgcttcagatgtcgatgtttgaccgtcagaaggctactttgaagaataaggaactggatgccaacgagctgatagcgggtgttatcaacacgtttacactgaaagtggagcgttataatggaaagattgaatcggagcttaaagctaccaactctgccatttttgccgatgagatgcatatcaccaatgtgattttcaatctcatggataatgcagtgaagtataaacgtccggatgcggatctgcaactgacggtgaagacttggaatgagcctggcaaactgatgatttccatccaagataacggcatcggcatcaagaaggagaatttgaaaaagatattcgagaagttctatcgcgtgcatacaggtaatctgcacgatgtgaaaggcttcggcttgggactggcttatgtgaagaagattatcatggatcataagggaactatccgggcagaaagtgaactgaacgtaggaactaaatttattattgcattacctttattaaaaaattgattgatatggacgagaaactgcgtattttattgtgcgaagatgatgaaaatcttggcatgcttttaagagaatatttacaggcaaaaggttacgctgccgagttatatcccgatggagaagcaggatacaaggctttcctgaagaataaatatgacttgtgtgtgtttgatgtgatgatgccgaagaaagacggattcacactggcacaagaagtgcgtgcggccaatgccgaaatacctattatcttcttgacggcaaaaacattgaaggaagatattctggaaggtttcaagattggtgccgatgactacatcaccaagcccttcagtatggaagagctgactttcagaattgaagctatcctgagacgtgttcgcggaaagaagaacaaggagagcaacatctataagattggtaagtttacattcgacacgcagaaacagattctggcgactgccgagaagcagactaaactgaccaccaaagaatccgaactgctgggcttgctttgtgcacatgccaacgaaattctgcagcgtgactttgcgttgaagactatttggattgatgacaactatttcaatgcacgtagtatggatgtatatatcacaaagctgcgtaagcacctgaaagaagatgattcgattgaaatcatcaacattcacggaaaaggatataaactgattactccggaagctgagtcttgatgaggctcggctcctctgagggagagaaaataaaaaaggcggtctgcatgtatatgctaaccgccttctttatttcttttcttttgatattagtcgacaattctcttgttgatgacaatgtaggaaatcaatcccactacaaccaaaacggcagaactgcccaagatggcattgttgttaacattgccggtaaaagaacatgcaaccaggattacagctcctattacgactaatatcaatcccagattttttaataagcctttcatgtgtgtgtattttaattagattattatattctttcgtattcttgtcacaaagaaaagcataattctttaacaagcgaaattatttttgcaaaaaatccatattttaataaagaatggaagatgaggaatgaaaaatgacgcttcatccccttgttttctcctcccttaatctctaatccttaacccctaatccctatatcttagtccttcgtattgaagaaaatcttcctcagcacctcctggctcacactgagctcttcgatggtgatgcctttcaaggcttctttgagggtctggttggcaatgacgcgcgcgcgttcttccagctccttgccgtccttggtcagatgtatcagattggttcggcggtctttcttgtccgatatgcgcacgacgagatgctgacgctccatattgtctatcaagcgcgtcatgctgggcttgtctttgaaagttgcattacacaactcttgttgcgtcaccccgtccttttcccataagaagatgaggacggtccactgttccggagtaatctccaaaccgttctggcggaagttgcgggacagctttcggttaatggcagccgacactttaccgttcagtatggcaaagataaggcggatatcaaagttgaattgctctatcatgaaattattgtttaaacaactttgcaaagatagtgcaagccgaagacaattcctatatccctacacaaaaaaacattaaatgtttgtagttcaaaataaaatgtctacctttgcaccgcatttttaaaacgaataatttatttatttaattaaacgagtatgaatcaatacgaaaccgttttcattttgactcccgttttgtctgatgttcagatgaaggaagcggtagaaaaattcaaaagcatccttactgctgaaggtgctgagattgtaaatgaagaaaactggggactgaagaagctggcatatcctatccagaagaagtcaaccggtttctatcagctgattgagttcaatgcagaacctactgtcattgagaaattggaaataaacttccgtcgtgacgagcgcgttatccgtttcttgactttcaagcaagacaagtacgctgctgaatatgctgcgaagagaagaagtgttaaatcaactaaaaaggaggattaatcatggcacaacaagttcaatcagaaatcagatatttaactccgccctcagtagacgttaagaagaaaaaatactgccgtttcaaaaagagcggtattaagtacatcgactacaaagatcccgaattcttgaagaaattcttgaatgagcaaggtaaaatccttccgcgtcgtattaccggtacttctttgaagttccaacgtcgtgtagctcaagctgtgaagagagcacgtcacttggcgttgctgccctatgtaactgacatgatgaaataataggaggaggaaagtatggaaattatattgaaagaagacattgtaaacttgggttataagaacgacatcgtaacagtaaagtctggttacggtcgtaactacctcatcccgactggtaaagctgtcatcgcttcaccggctgcaaagaaaatgttggctgaagagctgaaacaacgtgctcacaagctggagaaaatcaaaaaggatgctgaagaactggctgctaagctggaaggcgtatcattgaagattgctactaaggttagctctactggtactatcttcggttctgttggtaacatccagattgctgaagagttggctaaattgggtcacaacatcgatcgtaagattatcgttgttaaggacgcagtgaaagaagttggtaactacaaggctatcgttaagctgcacaaggaagtttctgtagaaattcctttcgaagtagttgctgaagaagcataagaaaagacttaataatgataaggaagcccggttctgataaaggaccgggcttttctatgttcggagcgtatgtgtgtgagcttattgagggatacgtaaagctgcggtttacgcatgctgacatagaggtttacgaatctgaagtagaggtttacgcgcgcggtatagaggtttggcaagaatactcttgtgtctctttacgaggttactaatgcaaaaaaaagagcatatccactcaggggtatgctctttgccttattgtcagccaataattcttttagtttcttggcaatgcttctttcactaccatttggcggcctacatattctgctccattcagtttgttgattgcttgttgggcttcagcagcttcgggcatctctacgaaggcaaaaccttttgatctgtttgtattacggtccataatcagttttactgattctactgttccatactcttccattacttgtctcaaatctgattccctaacgttgtagctaaggtttccaatgtacatattcataaaatacaaaaataaaaaattaataattcaataaaggagtcttaggaagttgtagtcagaaatgaaaattctcaatgtggctaatcgaggagaaacatagtgaaacgtagatcgtaataaacctcttattgttttgttgatgcaaagtaacggcttttatttggtatatgcactatactttatcatttatctgccatataatacccttttttgtgaaataagaccaagacttaacaattggaagggaacagaaggagaggataagacataaaaaaagtctggtgtgcttgtatgcacgtcagactttcaattctctcgagtgttgtactgaaattattcagctacaacagctgcgctatctactgctacagtgtcagctgctgcggctgctgctgcggcttcagctgctgctgcttctacagctgcgattgagtcagcgatacggatagaatctgcagttgcttgttcagcgttagctgctttgttgccacaagatgcgaaagatactgctacgatagctgcagccatcaaaactaattttttcattttctttacttttaaaacgtaatacaatcaattgctttattaaaacgttgcaaaggtatgtactttttgaatatgttgttctcgaaaccccaactttttttatattttttttggagcttcggctgtttttatccctatctatgtgttttacaacatattaatcttcggcaatgctgttgtataagtatctcttgatacttcttttgggcgttttctcaaattcagtcggataaagttggatttggcttactttttcgtaggctgccacgctgttattcagatttttgagattctcatccatgatggttttaaggttatccggctggtttagtcccaaggaatccagggcttcatagtcggcataaaccagcgctaccagtcttttattccgttcgatgacaagactttccaggacgaaaggcatgttgttgagccgtgcttctatctcttcggggaagatattctgtccactggaactgagaatcatggttttgctgcgtccgcgtatgtataggttgttgtcgtcgtccagtgtacccaagtcgccggtgcgaagccatccgtcttcggtgaagacttctttggtggcttcggggtttttgtaataacccgtcatcacgttctcgccacgtacttgtatttcgccgagtttgtcgtccgggttttccttgtagatacgggcttccatgatgtcgagtacccgtccggaggaagtcgggacgaattcattccagggagcatagctgatgagaggggcacattcagtcatgccgtagccgatggtgaaggggaacttgatgcgatggaagaattcttccacttccgggttcatggctgcgcctcctatgatgacttccttgaaacgtccgcccagtgcgtcaatcagtttcttgcggatttgcccgtatatctgtccgtcgagcaagggaatgctgagcgcccatttcatggtctttttgttgatgatgggctgtatgacattcttgtatatcttttcaatgacaagggggacggtgataatcaggttgggtttcacttcctcgaaagctttcatcagaatctttggggaaggcacttttcccaacagtgtgacgtgtgtgccgacggccgtggcggtaaggaaatcgaatgcgcagccgtatgcatgtgccaaaggcaggaaagagagcactttgtcccctttcttcagcagctcggtacgtatgccgaaggtgacgttgccggccaggttgtttcccgtcagcatgacgcccttactgaatccggtggtgcccgaggtataattcagcagcatgaccttgtcgttggaaaggtccgtgtaaacgatgtcttccttgcggaacccgttcgggtaggtcgcttccatttcatcgcccagatgcttgaggaaacgctggatggtttcgccgtcccgctgatacagacagcggaagtcgctcagtgagaacacaccgcgaagtccagtaagtcgttcttcttccagatgttcccaaatggcatcgctggtgaagaggaacgtcgattcggagtggtttacgatatgatggacatcattggggttgaagtcttgcagaatggggactacgataccaccgtaggtgatggtggccatataggcgatgcaccagcgggcattgttcttgccgatgacggctatcttgtcgccgcggcgcagttggcagtacttgaaaataagatgcagtctggctatttcttgtgccacttcgccataagtatagctctcgttttctccatagttggtatagcaggggaggtcccaattctcgcggaaactatgctcgtatagtttgataaagttctcttgtatcattgcacaaattttagttgagtgtgcaaaagtaggaaaaatagattaataatgtatatatttgcagcataaatgtgtttataagctcatgatagataccaatatatttcaagataagacggcggtttactatacgttggggtgcaaactgaacttctcggagacctctactatcggtaaaattttgcgggaagcgggcgtacgtacggcgcgcaagggtgagaaagcggatatttgtgtagtgaatacctgctcggtgacggaagtggcggacaagaagtgccgccaggccatccacaaactggtgaagcaacatccgggtgcatttgtcgtggtgaccggttgctatgcccagctgaaaccggagacggtggcaaagatagaaggtgtggacgtcgtgctgggagccgagcagaagaaggacctgctccactacctgggcaatctgcagaagcacgagaccggcgaggcctacacttccgctttgaaggatatacgttcgtttgccccgtcttgttcgcgtggcgaccggacacgcttcttcctgaaagtgcaggacggctgcgattattattgttcctattgcaccattccctttgcccgcggacgtagccgtaacggcagcattgcttctatggtggagcaggccagccaggcggctgccgaaggtggaaaggaaattgtattgaccggcgtcaatatcggagacttcggcaagtctaccggtgagactttcttcgacttggtgaaggcgctggacgaggtggaaggcattgagcgttaccgcatatcctccatcgagccgaatctgctgacagatgaaatcatagaatacgtgtcccgttcccggcgtttcatgcctcatttccatataccgctgcagtcgggcagtgacgaggtgctgaagctgatgcgacgccgttacgataccgccttgtttgcctcgaagataaagaagataaaggaagtgatgcccgattcctttataggggtagacgtgattgtgggtacccgtggagagacggaggagtatttcgggcaggcttatgagtttatcaagagcctggacgtgacgcagctccatgtcttcagctattcggagcgtcccggcacgcaagccttgaagatagaccacgtggtagcacccgaagaaaagcaccgcaggagccagcaattgctggagctttcggacgaaaagacccgtgctttttatgcgcgccatatcgggcagacgatgccggtgttgctggaacgtcccaaacccggactgccgatgcacggcttcactcccaattatatccgtgtggaagtccctcatgatgctgccttggacaaccagctcgtgtctgtgcgcctgggcgatttcaatgccgacggcaccgcactcttgggagcaatggaatgaggaatgccgcctttgcaacaaataactcataacttataactcataactgacgaagtgaaatcaaaaattgtctattggctgacttatgcgggcatgtggcttgtggcacttctgcctttccgggcgctttatgcattgtctgacgggctgtacttcctgatgcgccacgtcgtgcattatcggaagaaagtcgttcgccgcaaccttcgcaattcctttccggagaagtcggaaaccgaattgatggagatagagcgcaagttctaccattatatctgcgactatatgctggaagaggtgaagatgctgcgcatgtctttcgaggagctctgccgccggatgaagtatgataataaggaagaataccttgccatgatagagaagcatggaggcattgtactgttgattccccattatgccaattttgagtggattataggcatgggggccatcatgcatccgggcgacatcccggtgcaggtgtacaaaccgctaagcaataagtatctggacgagatgtttaagcatatccgtgcccggttcggaggatacaatgtggcgaaacattccacggcacgcgaagtgataaagcttcgccgtgaaggcagacggatagccatcggcctgattacagaccagtcgcccaaccgcagcgaggcccattattggaccactttcttgaatcaggacaccgtgttcatggatggcgccgagcgcattgccaagctgatggacttccccgtcttttattgtgaattggaacggacatccaggggatattgcaaagtgctcttcgatttggttaccgaaactcccaagcagacggcggatggcgagataaccgagtgcttcgcccgtcgtctggagcagaccatccggcgcgaaccggcttattggttctggtctcataaacgctggaaaaataaacgaaaagaatctgtgcaacatggataagattgctgttgtcatattgaattggaacggatgtgatatgctccgttccttccttccctctgttgtgcgtttttcggaggtggatggtgctgtggtgtatgtggcggacaatggctctacggatgcttccgtggcaatgctccgtcgcgagtttccttctgtgcacttgattctgctggaagagaaccacggttttgccgacggatacaatctggcattgaagcaggtggaggcagaatatgtagtgctgctcaactccgatgtagaggtcaccgagcactggcttgtcccgttggcagagtatatggatgcctatccggagacggccgcttgccagccgaagatacgcagttggcgtaacaaggggcagtttgaatatgccggagctgcgggaggtttcatcgaccgctatggctatcccttctgccgcggccgtattatgggcgtggtagaagaggacaaggggcaatacgacacggtgatacccattttctgggctacgggggcggctctgttcatccgtctggcagactaccgggaagcgggtgggctggacggacgtttttttgcccacatggaggagatagatttatgttggcggcttcgtgcccgtggcagacagttggcatgtataccgcagagtgtggtatttcatgtgggaggggccactttgaagaaggagaatccgcgcaagaccttcctcaattttcgtaataaccttgtcatgctttataagaatctgccgcaagaggacttggcgtccgtgatgcgtgtacgtgcggtgctcgattatgtggctgcgttcagtttcatgctgaaaggccagttacccaatgctttggccgtattccgtgcgcgccgtgcctaccactcccttcgcacttcattggcagcgtcccgcaaagagaatctgaaaaaaactacgcttgccgtaataccggaacggacaaaaagcagtatattggcgcagttttatctgcatggaaagaaattcttttcccaattgtaggaactgttgccttttataattgttcaatctattaaaggttttgaattatggaaaaactagttagaaaaatcggattagtggcacacgacgccatgaagaaagacctcatcgagtgggtactgtggaactcggaattgctgatggggcataaattctattgtacgggcaccacgggtacccttatcctcgaagccctccgggagaaacatcctgatgtggagtgggatttcactatccttaaatccggtcctttgggcggtgaccagcagatgggctcgcgcattgtggacggagagattgactatcttttctttttcaccgacccgatgacccttcagccgcacgatacggatgtgaaggcgttgacccgccttgccggtgtggagaacatcgtgttctgctgcaaccgcagtacggcagaccatatcatttccagcccgttgtttgtcgacccgacgtatgaacgcactgttcccgattacagcaactacaccaagcggtttgcaaataagccggtggtggccgaagcggtggaatcggcaaagaagcggaaacggcaaaaataaggatgaaactcggttctactgggcattcttaatctatcgctacccttcgttcatggacagcccacactggtgcgatagcccacccttgccgtttgaagtcatagagttgcacaataatggtgttggtgaatctgcccattctatgtcgttgaggtattggtaggggaagcggaactctgtgaggtttattttcaatagttcattccttctgaagtctgcatagttgtatgggtttgtaaagtcgtaaggggtgggcaggtagagggcatttctccaatgaaactcggagctgtatttgatagcaagcggccggtagcaggaagagagcgacgatggggagtaatgccagtcgttgtatagcgtttctcattgactttttgttgatgatggggcaaaggtacggaatattggtatcaatggttgtattctacggcagaaaagttgctgcatgctcactgcagaacttctgtatacattttgcagtgctactgcatatctgttgcagcg

SEQ ID NO: 4436 - DNA, 75598 bp, Unknown
  gut microbiota DNA sequence
gtataaaaagtagtggcaacggaatcacaaggaaaaaaccgcaaatggctaaaaaaagcttttgcggttttcttgttttagaattagaaaatgtccgcattttgtcagcataggttgtaatgggaaacaaattggagtatttggtttacattgcaggcaagatttatttgcgatacctggagaaaaaattatcaatccaacggactagatatactataataactccggctatgaccatactgataatacgtaccaacataatttatagaattaaagatttgtttttatggaataataatgtgcaaagataattgattggtggagaaacaaaaactctggaaaggatataaagataggaattaacgcatattttcacggatataatcttctattgtaaaatcactcttatatctagatatttccggattcttctctacagtcgtaatgcaacgtttttctttaccaagtaccaaccggtttaggaagctcaggatgtcatgacgattatccttcataggagaataggatagggaatgtcctataccttccgctatatagaaatagtatgctgtctctttttctttcagttgcatacagataaagtttgagccccatagccccatttcctcttctactactgccttagtaaaaggaaccgtgctgtcggcatcaccatggaacaacataagaggacaaggggacattatccattttggaataccattggcacagattgctccagaaaaggaaatgacccctgcataattgaaattggcaggtaatctgtccgcaaaagccgtttgattgcaaatctcatactctgcttgaagggcagttatcgcacctgcacttgaaccgcaagctataatttgtgcaggatttatttgccattctacactatgctcaattatataatttgtagcatcaccaaaatcttctacagcacaagtgattgcttgttgcagggcagaagagaatccttgcaagtccgaatactccgatttatctatatcctttaattgggtacggtaatctgttgatactaccacatagccggctcgtgccaaaaaatgaaaataagaaatgtaatcgggattatctcttctcccgcctttgaaacctcccccaaatgcaaaaagaatgacgggctttgattgtgtcccttgtatttgatcaatcattacatacttgtccagtttcagagtatcaacctttttgatggcaaaaatatatgtttgcttgtcaatatgctgtgcatgcacaacagtagctatactcaataatgagcatgccatcaagataaaaataaagcgttttcccatattcagtttattctattaatgctgcgtggattatctgacctacaaagatagaataaaactataactaaaaaggggaaagatgacatttagacataaaaaaaggctatctatcccagacagccaatcttttttattaaccttaaatctaatactatgaaaaacacagtacaaagatacgtacttgcaggagatatccaaattttagcgggtaatcagcggatattataacatggtttagtagaatattatttccgttaactattaacataaataatattcaatttaacagaagaaggaattaatattcctcatcagtgattgcaaactttagtcatgtccactgtaaatccaccattggcgggtataaattttccttttcttttaagaaattctatcagggtatctacatccatattgtcggcagagcaggtgaaaaaacgctgctgctcgccgaatttttggataatggcttctctcaatgataactcagtataactattaccttccatcatgtgaaggacttcatgtgcatgtaattgttccataatctttttttgtggcaaagataatatgatattctaagtataagtgtaacatatgtgacaaagcccaacacacatatccggatatttgcttttacgtaaaataacacttgttacgactatgctaaaaacctcaaaaaaagtaaaaaggttttgcttctataccattgtaaactaactttgggaatcaacttttaaatgaattaaagcatatgaaaaaattaatcttatctattgcactatgttgtgcagctacgaatttctttgcgcagaatgctgaccctgcccagttggtcaacgatggtaaggctgctcttgaagctaaaaattaccaggaagcttacacaaaatttagtacttatctgacacaaacaaacaaccaagattccgtaattgcatataactgtggcgtttgtgccgataagataaagaaacctgccgaagctttgaagtattttgatattgctgtacagaaaaagtacaacctggcaaatgcttatataggtaaagccggtgctttgaaagatttgaagaaaaatgatgagtatgttgccactttaaaggaagggctggaagcaaatcccggtaataagacattgactaaattgtatgccacttattacgtaaatcaaggtatcatggcgcagaaagccaaaaagatggatgcagccgaagaagcatttaaacaagccatagctatccaagcagataatgtaaatgcacttaacagtctgggttctttgtattatagtaagggtgccaataccatgaaaacagatgtagaaaaagcaaaagttgaattcaaggaagccaaagaatatttggataaacttattccattgctctctgcagacaaaccagctcaaaagaagatgatggataatgcaaaaacgatgttgaacttcatcgacagtcaattgaaataaaagactctcctatataaaaaagaggcagatatctgaattgatatctgcctcttttttaatgttatgaaatgattatttagttcttttcagtacaacagctgtacgtgccggtatgtaaagcttcagccactccttcttgtcttttttataaagcggatcgtggatggtaaaatgtttgatggtatcatccgtcaaaccattaccgccataatctggattatctgtattcaaaataacttcataagttccggcaggaaccaagaaaccgtaatcagtaaaagactgcttagggttgaagttgaatacaaaaatcaagtccttgcgcatataggccaatacctggtcaccgtcattatgccatatttcttggaccggagtagcctggaagttctttatgctttttacaactaccaacatggcagcatcaaagtcacccatataatgatatgccagattcttgttgtccaccaaatcccattgacggcgggcatatttacaagaccaaccgttaccttcacgggggaaatcaatccattccggatgtccgaattcattgcccataaagttaagataaccgccattgatagtagtcgcagtcagtaaacgtatcattttatggagagaaatgcctcgatttacggtatagttctcgtctcctttctgcatgtgccagtacatatccgcatcaatcaagcggaaaatgatggttttatcgcccaccaaagcttggtcatggctttccgcataggagatggtcttttcatctttgcggcggttggtcacttcccagaacatgctggatggcttccagtcttcatctattttctccttgattgtcttaatccaataatcgggaatattcatggccatacggtaatcaaatccgtagccgccatcttcatattttgccgccagtccgggcattcccgatacttcttcggcaatggtgatggctttggcattgacctgatggataagccggttggcaagtgtcagataacaaatggcattgtcgtcttgatgtccgttgaagtaatctccataattacagaatgcttctcccaaaccatgactataatataacatggaggttactccgtcaaagcggaagccgtcgaaatgatattcttccagccagaatttacagttagacagcaggaagtgaataacttcgttcttgccgtaatcaaagcaaagtgaatcccaagctggatgttcccgacgtccaccgggatagaaatattgattaggatcaccggcaaagttacccaagccttccacttcattcttcacagcgtgtgaatggacaatatccatgataacggcaatccccatactatgggctgtatcaatcaactccttcagttcttccggagtaccaaaacgggaagaagcggcaaagaaactggaaacatggtatccgaagctaccataatagggatgttcctggatagccataatctgtatgcagttgtagccttctttggcgatacgtggaagaatcttttcctgaaattccttatagctaccgaccttttcctcctgctgagacataccgatatggcattcatatatcaataaaggatctgtagatggcttgaaaacccgctttttcattttatagggtttctccggagcccaaacctgggcactgaatattttagtctgttcgtcttgtacgacacgtgtagcccatgcaggaatgcgttcaccgcaaccaccgtcccaatgtaccatcagcttgtacaagtcaccgtgtttcacggcatcagcaggaagcttgatttcccaattaccgtttgctttacgcttcaagctatattttttttcttctttccaatcgttaaaagttccgaccataaagatttgggttgcgttaggcgcccattcacggaaaacccaaccatcgtcagtacgatgcaggccgaaatagaggtatccggatgcaaaatcagacaaggttagttttcctttgttggtcaattccgattctttgtctatggcatgttgatgacgtccgttgatggcatcggcaaaaggttccagccatgggtcattcttgattaaattcaatgtttccataaagaggatgagttttggatatttgataaatttacgctttaactttcacaattattttttttacaccgtcaggggtaatacccggagcatgcccgtcctgagggaaaaagatagcaaacattccgggcttcactgcaatatagtcctccgccagtccttcaaaaaaagtgatgtctttttccgcattgtaaggagcatcaaccggaaggcagtcttgggcggcggtataacccattatctccgtaccggacaagggtatttgaatgtcaatatagtctttatgggtttccagtttggcattttctttttcttttgggtttgtctgcgccacgttgaccagcaagtcctttcctttcagttcggtcttgccgatttccaaagagtgcaagtcatgtgattttaaaaaatcaatggcctgctcaaacagaggatgcagcaaagtatatttttctatgttttcaagtctgtctataaccataattcaaatgttttaagttagttatataggtaaattattcaaagtcgtctatggtgtaattcacaaaatcagaaaaacgcttcatctgcttgaagatgtcgtctgtacgatccaaaaagtctggagcaagaaagaagctgtccggctggcagcaggcaaccgtatactctttacactgaaggtatttcagatagggatagtcctttggaaatccttttggagctgtttttagaaaattctctccgatgacgggaaagtattgcttgaaagcaggatcttccactatactgcgaaattcatctatattgtcgtataccgcttgtcgcagagctcttaacaagggcgggggaggacaataacttccaccggccaacaagcagtttcccggttccagatgcacgtaatagccacaatggtcggatttctttcctttcgcattgatatatcctcccagatgtgtcttgtagggagttttatcttcggaaaagcgtgtatcacgataaatacggtatgtacagtcctttgcttctataccacggatgctttcatcaaataaagagatacgggagataattactgtaagcaagttttcaaactcgctgcgggcgacttcatactgttcccggtgagaattgaaccattcacgattgttgtttgcagacagttctttcaaaaattgaaatataacagggatattcatatcatattctttccttattatctgccaaatttacggataatatttctaacatgctacaaagaagggtaaaaaaaagcatcggctctggtaaaccgatgctccttacacatttatcaatcaaacagacgcttctgtttttgatgtacttacttatcacaagcgggtacgtctcttttaattaatcttatatctaatactatgaaaaacacatttatataacacaacaaattggaattttgttcatgcggatgaggataactttagcataaaaaaatgggtgggtcattttattctgcatccggtttgcactatctttgcaagaaaatatgtagaatatggccgaatataaatttgatgaagatagcgttaaagcgctgatagattgggcaaagagcacatctttccctcaaagtgtaacattgtctgatgctgagaacatagtggatgtgaaacgttttgtgcaagctaacctgagtgatgtagatgcacattatcctgatgatttttataatcctgccatcacgcggctatatcggctgaaggaatatatggaagagaaccaataaagacttggcactgattatgcggaaaaccacgaagcgattaagaaatccgtgttgttctgcataatcagtgccaaatctaataaatcaccagagttgtgattccgttatagctttatcttaagtatctttcctccatatccttcgacggccacattagtagccttatagggaagcagacttatgttttcttcttttccgctgagcagctccgtagctttgtactggtccatctgcggtatttgcaggaagtcaaaagcatgagaaggaatatttatggcaaggtctgccgagatatggtcgaagttcacgacgaacagcagcaggtctctctcaaatttgcgcaggaatgtatattgcttatgttcattaaagcgccatccgttgacattggcatacatcaaatcgaagaaagccccctgagagatggccttttcttcattgcaaagagtcagcagccgtttataaatgctgtataggtgtttctggtcctccgtcagcatcttgccgtcgaacttgccgccattgcgccaacggcggatagtatctacactccaatagtcaaagatggttgtacgtccgtcccggccgctgaaaccttcactatccatgcccagctcaccaaactcctgaccgaaataaatcatcatcggattggtgttcatgcaagctgacacaatgagtgccggaatcgccttgcgtgggttactggcaaaaaagtcggaagcgatacgttgctcgtcatggttttccagaaagttcagcatgcgtttttctatacctcccagactttgccaggaacgggtgatggcagttgccgattcatacccgcaagtaacagcccgcaaggtatcataaagtcctactttgtcgtataaataatcaaacttgccacggaacaagtaattcttgtattctcccgggttatagacttcggctataaacagcagggagggatattgctcttttacctgcgggattgcccattcccagaactctacgggaaccatttcggccatatcgcaacggaaaccgtctatattctttcccgcccagaacagcatgatatccagcatcttggtccatgtgtcgggaatggggtcgaaatggcaagtcccgccgttctgataatccactccataattcaactttatagtttcgtaccaatcggtgatgtttggataagcgtcaaaacggttgtttccggtagcttttgccggaaactccctataaggttcggcggctgcacctttcatgtcaaattggccatgcagttccgatttcgggatataatagaagttattatatgggctgaacgcataattggtatcatcgtttgaacccagttgtgaagtgccatccggctgggcatccgagtgatattgacgggctacgtggttgggaacaaaatctatgataaccttcagaccgctacggtgagtgcgctgcaccagattctcaaactctctcatacgctccggtacgtccttggcgagatccggatcgacatcatagtagtccttgatggcatagggagatccggctttacctttcacaatggccggatggtcgggttggatattgtgacggcggtagtcagtttgcgtagcatgctcgatgatgcccgtgtaccatatatgtgtagcgccaagcttcttgatttctcccaacgccttggctgtaaagtcagccatcttgccgcatccattttcggtgatgctgccattattgatgcagtggttattgttgtttccgaatagtcgggtgaacacttgataaataatcaatttgttttcgtcgttcatttctttgttttctattgttatagaatggttattttattctttccagatgctgcctttgtcaatgagcaggcgttccaatatatcattggtcgtattatatccctgcatgaatatctcctccgccttttccagctctgtattgctgtatccctccaagttataaggttctatcagcaaatcagccttctcgcgttcaggaaaagagttggagcggaacataaaattataggaacgtaaggcaatgctcacaatgttcattttatacttggttgccatcaaagggctgacattcacggcaatcactttttcgcatatacggcggagggtagagacaggcaggttcatcagcaggcctccgtccacgtaatgggtgccgtctatattgaccggggcaaacaataccggcatgcaacacgaagctgctacgcgttcggcgatgtcccctttatggaaatgtaccagacgtccgtggtccaggtcagtagctgtaataatcagagggatttgcagttcttccagtttcttggatttcagattgcttttcaggaaatcgatgaactctcccaattcaaataatccgactttgggaatcaccagtttggtcaggtcctgaaacttgtgcccggcaaagtagtcaagaacttgatgcggttcattgccgtcggcgtagaataccccggccaaggctccggcactgactccggaaagtatattgggcttgatgtcatgttccaataaagattgcatggcacccaaatgggcaaagcctttgatgaaaccgccgcttaaggcaaaacctattggatattttttagtgaaccagttgttcgttactacttccatgttgaaaatatgatatattgttcggcacgaaattaatgattttattgtagggagaaaggaaaatagcggaaaaaagttcaaagtattaagagaaaagtcttctctattaaggagaaagtttttcttagttagggaaaaagtttttatcagttaagaaaaaactttgtttatggtttgcggatgtctatcccaagccttgggatagacatccgcaaactggggatatgtatccgcagtgtgcgaacaaagttttaggattaagggatactgtttgagaatatacgcttaattttttgcgattgctttcagcagtacatatcctccgaaccactgaatcagcatgcccggaatgcccatacggaaatcttgcacagccagaaagaaattaccgcacagcgcccattcaaaggccgtaccgataatttgataggagagaaccacgcccagcaatgccaataaagagatattcttggcatagcgtgcagcaagagcggcggctccgaccagcagaccggactttataagtatggccggcaacacggctgctgcaggcatggcaaaaagcagatgattgatgaccggcgacaggatagccgtcagcagacctaccttgaaaccatatttataagcagctatcagtgtaaagaaatagatgggaagcaacgtcggaccgcctgctgggaccagatggcagagttgcggcaaggcgatgtttcctgccacgaacagcaggacgaatagataggtctttacgttgccgaaaggcaaagaataaagttttacagatgtttccatttgtataatattatagttgataaatctatttttattatgactgtttaaaactgaaaaggtttaatcaaatcttcaccaattcatattccatggttcccaatcctattttctcggcatggcgcaatccggcaagccagtctgtgtcggggtgcatcaagtggaacttgtcgcatccacacaagtcgtcgtgctcgtgtgccgtggcaaggcaattgttaccgtgcagtatcggggcttggatgaccatatctgcacatgccttgtccagtgcaaccgggtctgccgaagccagaatgccgaggtcgggcacgatggcggcatcgttgtggttccagcagtcgcattcgggagatacgttcatgatgaagctgatgtggaaatggggcttgcccataacgacagcgagggcatattccgcaatcttgtagttcaggcgctcggaagtatcttcggctcccatcacggcaccgtcgtgctggcagagggctacgcactgtccgcaacctacgcatttggcgtagtctatttctgccttgcggctggcattgaggtgcacggcgtcgtgtgcgcaatgcttcacgcagatgttgcagccgatgcagcttgcttcatcaatcttgggttgcgaggcgcaatgcagttccagctttccgcctacgctggcacatcccatgcccagattcttcaaggcgccgccaaaaccggcttgttcgtgccccttgaagtggttcatactgattacaatatcggcatcggctatcgctgtgccgattttgggtgccggacaatattccccgttcagagggatttcgcggtagtccgttcccttcagtccgtcgccgataatgacctggcactgggccgagatagggttaaagccattctccatcgcactttgcaagtggtctacagcattggcacgacgaccggaatacagcgtgttgcagtccgtcaagaaaggtttggctcccaggctgcggagcagggttgccattcgagctgcataattgggacgcaagtatgccaggtttccgggttcgccgaaatggattttaatggcagcaaagctatctttcaaaggaagttgctcgatgcctgcccttttcagcaagcgttccattttatccaaaagattggatgtaggggaggtacgcaaatcagagtagtatacttttgctttttccatgtgtttttacctatttatagtgatagtatctgcaaaaataacggattatttccatattaataggtatatggctaaaaaaagtagggaaatcccttttgacaaatagggggataataagaggtctatccatgtttctgcctacctttgtggcaactaaaaactcgataagatgaaaacaatcagactaattattgcgggactggtaatgacgatgggattcagcagttgttccagtttgttttatgatgctaaggtagatgtgttgaacagtatccagaaggggatgagcaggcaggaggtcaccaagatattgggaactccagagtatcgccgcttcgaccgggatatagaagaatgggaatattccagagtgctgtccggtaaaagtaatatcagccgaactcagattgtcgtgacttttgaaggtgggagagtcgttgcaatggactcattctccggagagccacgtacgttgccggttgttcccagtgaagtagtgatagattctccagctccggtttatgtcagggggatgcaccccgaagacttccggcatttttatgaaaaagtgaagtcccgccctttcaaggatgatcaaatcgaaatgatgagaactgttgcccgaaacaacagtctgaactgtgtgcaatgtgccagtttgatggcactatatacttttgatgacgacaagatgaaagtcctcaacatattcgctcccaatatcgtagatccggaaaactacgaagcgattttagacgtcattgattcactgttcaagaaagacgatgccaagaaaattctgggcatacgctattaagaagcaggcatgtcgaaacgcattgtccgttggtgccaaacacatgatgtatcggaggctgacagataatgcgtttaaggtaaacagataatgcgtttcgacgagctcttattccgataaaggaaagtgccataacggaccgttcccgtgccctatattcatgtctttcccccggtttatcgcagtaccgatatactctttagccttgcagaccgcttcatcgagtttgttgccaccggcaagaaatgtagctatggcagaggaaagggtacaccctgtgccgtgcaggttacggctctctattttggggttggaatagaggatgcatccggatggcaggacgtcagccccggcagaaggttgccggcaataaagcacgtcgcacatgtcattgccctccagatgtccgcctttgacgagaacagcggtattgtatctgcaggataattcctgtgccgcttgctgcatctccacagtgccggcaatggttcgcccccaaagcaggcttgcttcattcaggttgggagtaatgagggtgcatagcggaaacagttccgtcttaatgacttgtatggtttcttcggtcatcagccgccgtccgctggtcgatatcatgacggggtcatagactatacactccggagtatatgtctgaagacaatcgacaatggtggtcacaataccggcatcatataccatacctatcttgacggcatccggccttaaatcatccataacagaggtgatttgtgccttaaccatatccacaggtatcggataaaccgattgtactcccagtgtgttttgtgcagtaacagccgtgatgacggaagcggcataacctcccaaagcggaaatggtctttatgtctgcttgtatgcctgcaccgcccgaacagtcggaaccggcaatggaaaggataatagggggaagcatgaaataattaaaaattagaaattaaaaattaaaggggtgagaggaaagctgtttcaggtggaggaagtgggggatgaaagcttccttcgcttgctgccagacatctcccagcagtacggcacctccgaaacctaaagcggctatttccggaagatgttccaaggtgatgccacccaatgccatcacctttgagtcgataataccagcttgctgcgccttctgcaaggtatcgcaggagtaagcggaagaatagccttctttggatatactgtcataaatggggctgaggaacacatagttacaatctgatttatgtttcaacacttcttcaagagagtgacaagagcgactgacatgtcccttatatccggacggtatctgcggattgcgcccgttcagatgaattcctttcagaccgaaaacggatgccagctggaattgctcatgcgtgacaatgcgtggcatatattccatcggtagctgttgaagaaaattccccatctcctctgccgaagctcccggcttgcgcaggtggagcatttccaaaccgttttggaataaggaggtaactgcctctgcttctccttcaaagaattgcggcgtggtaatgactatcagtttcatatctttatggatgtttgcctatagtgagagaatatacgactgcatggtccttaaatcaatcgtccatagctttccagccaagggttcaccgtagccgcaaatcagtttcaacacttcattggcttctacgctacccacaatggcaggggttacgccgataaccgatttgtccggagatggcatgagcagtgtcccttcttcatccggatagaggtcacgatagtttttagcactctcaccgtagcagaagacggacacttggccttcaaagccttgaatggcaccataaacgtagggcttgccccaagcgttgcatacgtcattcagcaagtagcgggtagcgaagttgtcgcacccgtctaccactatatcgtagttccttatcagttctccggcattcttcttgtccagacggaaggggtatacttccacgtttacatcgctgttcaaaccctgcactctacgggcgccacatagaggtttaggctgcccaaggtcagcttcagcatacagaacctgacgttgaagattactgatgctgacctggtcatcgtccaccaatcccagcgttccgactcctgctcccgccagatagagggcaatgggagaacccaatcctcccacaccgactatcaacaccttggcattacgcagtttctcttgtccggcttcgcctatttcagggagggacgtttgtctggcatatcggttcatttgttcattattattaaggttctgtattcggccactcatctcttgaaagccttcaaatcaaaactcgcatcccaatctttccacactggttcgcgccccaggcgtttcaatgctttgtccacttccacagccttgcgctcgtcgctgacatgaaactgttccagtgtttgcggatagctgtaatatcctcccggttcggtcttgctttcggcgctcatggttgtcacaccgagtgttgccatatggtcgcgtatatcggcaggctcgcgggtggagtaggagatgtctacatcatggtcgaagatgcgcatggcgaaagtgacttgtgccagttcgcggtcgctcatgatgacattgggctggaagccgccgttctccgaaggacgcatacgggggaagttgacgctgtatttcgtttgccaataatgtttctggagatagcgcaggtgataagccatcatggtgatgtctgtccgccattctttctccagaccgatgagcactcccatgccgatggaatggacgcctgcctgccccatgcggtcgaaaccattgacacgccattcgaatttggacttcatgccacgggggtggtagatgttgtaattcgacttgtggtaggtttcttgaaaacaaatcacgccattcatgccgtgttctttcagcgttgcatactcttccgtttttaagggcatcacttctattttcagattgctgaagtagggttttgccaggtccagtgcacgggctatgtagggcacgcctgctttggccggattttctcccgttaccaacagcaaattctcgaaaggtgccagcttcttgatggccttgtattcgttcacgatttcttcttccgtcagtatggtacgcggcatggggttgctgatatggaaaccgcaatacacgcaagagttggtgcaggaattcgtgatgtaaagaggcacgaacatggagatggttttcccgaatcgtgcctcggtgtatttcttgctcaatcgtgccatcgtctccagatagggggcagcggcgggtgagatgagggccatgaagtcctctacattacaatgttctttggagagggcacggcgtacatccgcatctgtcttggcatggatgcgtgccgtggtttcctcccaggatatatgttctaattcgtctgaaaacatagtgctctatcaattcccatttatttcttttttaattctctcgacaaccgcatcgcacagaagttcggtccgcacatcgtgcaatactccccatccacatgcttccctgcatgaaaatagctgaacgcacgttccgggtcgagcgacaagtcaaactggtctttccagcggaattcataacgtgctttgctcagtgcattgtcacgcacttgtgctccgggatgcccttttgccaggtcggcggcatgggcggctatcttataggtgatgacacctacacgcacatcctccttatcgggcagtgccagatgctctttgggagtgacatagcagagcatcgccgtacccagccagcctatctgcgccgcaccgatggcggacgtgatatggtcgtatcccggtgcgatgtccgtcacgatggggccgagcgtatagaaaggcgcatcgtggcatttttctatctggcgctccatattctccttaatcttgtgcatgggcacgtggccgggaccttcgatgaaagcctgcacattcttgtcccaggcacgcagcacaagctcgcccatcgtgtcgagttctgcaaactgcgcttcatcgttggcatcgtgcgtagaccccggacgcagcccgtctcccaaagagatggcaacgtcatactgtgccagaatgtcgcaaatgtcatcaaagtgttcgtaaaggaaactctcgcggtcgtgcaccaggcaccatttgctcatgatgctgccgccacggctcacgatgccgcacaaccttttctcggccagatgcacattgtggcggcgtatgccggcatggatggtgaagtagtccactccctgctcgcattgttcaatcaaggtatcgcggtagatttcccaggtgaggtcttccaccttgccgttcactttctccaatgcctggtagatggggacagtgcccacgggaacgggacagttgcggataatccattcgcgcgtttcgtgtatgttctcgcccgtggagaggtccatcagcgtgtcgccgccccatttgcagctccacaatgctttctctacctcttcttcgatgcccgaggtggtggcggagtttccgatattggtatttatcttcaccaggaagttacggcctataatcatcggctctgcttcgggatggttgatgttggcaggaagcagggcgcgtccggcagcaatctcctggcgtacaaattccggtgtgatgtgcgtctctattcccagctccgcgcagttcatgttctcgcgaatcgccacatactccatttcaggcgtgatgataccttgtttggcatagtacatctgcgtgcagcattttccttgaagggcgcggtagggcagggtgatatgctcaaagcgcagagagtcgagcgaccggtcgtcgcggcgcatgcgcccgtactccgacgttatttcgggaagctgctccacatcgccgcgtttcagtatccatggttcgcgcaggcggggcagccctttcttcaaatccacttcaatggcagggtcgctgaacggtccgctggtatcatacacatacacttccggattcggagtaatcaccttttctccatctacgaagttcgtactgggcacttgctccaccttgcgcatagctacgcgcaattcgggaaacaaggtgcccggcaaatatactttctcggaacgggggaattttatcttctggttcattgcattgtcagttttataggttcaaaaaagccgtcagcggtgagctggcttccgcaacaaaattatctgcctgtatgcccagacctgcttcgtatgccatgcgtcctgcctctacagcctgcttgaacgctaccgccatggtcacggggtcgcccgccactgcaatggctgtattcaccaggcaagccgaagcgcccatttccatagcctctgccgcatggctcggggcaccgataccggcatccaccactacggggatattggcttgctcgatgattattctcaggaaatcccttgtctgcagtcctttgtttgtaccgataggagcacccagcggcatgacggtggcggcaccggcttcttccagcctcttgcacagtgtggggtcggcctggcaatagggcagtaccacaaatcctaacttgaccagttcttctgtggctttcagcgtctccatagaatcgggcaacagatagcgggggtcggggtgtatctccagtttcagccagttcgtgccgaaagcttcacgcgccatctgtgcagcaaaaacagcttcttcggcattgcgcacgccggaggtgttgggcagaagctggataccgggatgctgtatgtgtaccagcatattgtcttccttgttgtccagttcaatgcgtttcatggctaccgtcaccatttctgtgccggatgccaggatagactgctccatcacttcatcggaattgaactttccggttcctaaaaacagacgggagttgaactcacgttccgcaatcactaatttttccatatcagtcgtcatatattaattctttatttttcattctccattaaagaaatgattcttttcatttcatctgccggactatcggcatgcagtaccgtgcccgaaagggcaatcccgcttacccccgtctgcataacggctggaatatccgctatggttattccaccgatggctactatcggaaggtgtatatccttctcctgcatccggtggatgatagctgtatatccttccagtcccaatatcggactcagattcttcttggtagtggtgtagcggaaggggccgcagcctatgtagtcggcaccggctttgtagtgttgcagtacatcctcaaaggtatttgccgtgccgcctataatgtactccgcgcccagaatccggcgtgcgtcggctatgggcatgtctttctttccaagatgtacgccgtcggcatgcagcttctttgccagttccacatggtcgtcaatgatgaaggtggcaccgtattgccggcaaagggcctgcacttccaaagctacgggttctatcgtttccaccggggtgtctttcatgcgcagttgcacccagcggcaaccgccctcaagagccatgcgtgcagcatccagatacgaatatcgttccgtatagtgcgtgatgaactgcattcctccgtttttcagtctctcgtccttcatcttcctcaccctccgcaagctgctttgataatgatgatgggcatgtattccctcaggatgcattttgtccattccgtgcgaagtacaatacggttgtctacggccacggcaatgccttgcatcggtagggcaagttcctcgataagttgtgaaagggtagtggcgccggttttcacttccttgttgttgaccaatactttcatttttctgttcattaagaaataaaacaaatggaagtaaatacaaagaagcgtctttacggcaagttcagtgaagaaagaaatatccaattcctacggcagtactaactgcatcaggttcgagggtataatctcagcccgtcggggcacccctttgtctttacggcaacaaaggtaagggaaaatcggaaataaaaaacaaaagaacgtactttttatttcagtgattactttttgtttactcgcgcccctttgtggcacgtatctttttcagcgtattccgaacagtggttctgactcccgttgaataaaatggcctactaaaacaagaaaggctgtctatttgaagaaagacagccttgaaaatattctatttaaggaattatgcaatcccgtgagccgtagcttccggtgcaatcttcttgataagaccttgcagcactgcaccaggaccgcactctgtgaagtccgtagcaccatcggcaaccatgttcttcactgtttgcgtccaacgtaccgatgctgtcagctgagccaccaggttcttcttgatttctaccgggtcagtatgaggcatagcgtctacattctgatatacggggcacttcggagcatggatttctgttgcattgatggctgcttccagttcaactttggcagggttcatcagcggagagtggaacgcaccgcctaccttcaacggcagagcacgctttgcacctgcagccttcatcagttcgcaagccttgttgataccttctatggaaccggaaattacaatctgtcccgggcagttatagttggctgccacgcaaacttcaccttcagcacttacttgagcgcagatttcctcaaccttttcatccggcagggcaataatggctgccatagtggagggctgtgcctcgcaagccttttgcatagccatggcacgggcatacaccagtttcagaccatcttcaaagctcagtgcaccggcagcaaccaaggcagagaactcgcccaatgagtgaccggcggtcatctccggcttaaagtcatcgcccatgcagagggcggaaataacggaatgaaggaacacggcaggttgggtaactttagtctggcgcaggtcttcatctgttccgttgaacataatatcagtaatacgatacccgaggatatcatttgctttctcaaaaagttccttggctaatgccgaattttcgtacaggtcctttcccatgccaacgaattgggcaccttgacccggaaatacaaatgctttcatatttactcgttttttagtgtttaaataaaaagtgctgcaaaggtagaggtttttctgatattcaccgcacaaacggatgttttttgtgcaatgcccttactttaaggagggaagctaaaatacaatatgtatgcttgggccttctgtggtatccggaggctgaaatacttataaatgaaacactttctccttattgtacttcctacaattagacctcttgtatattcttgtaaattacatattgtattccatacgataacaactgaaaatgatattgtataaagtaagatatgtattcagttgaaaaataatgctttataacattataaaaatattcttttcctttattgcaaattagaaaaacctatttatatttgcagcgcttaacgagatatattatgcaaaacatagaacaaaaaacgccgttggcaaacaatcatatctctgtggactgtgtagtgattggttttgacggagaacagctaaaggttctgctgattaagcgtgcaggagaggaagaaggagaaatctttcatgatatgaagcttcccggaagtttgatttacatggatgaggatttggatgaagctgccaaacgggtgttgaatgaattgacggggctgaagaacgtcaatctgatgcaattcaaggcattcggctcaaaaaaccgtacgaaggaccccagagatgtacattggctggaacgtgccatgcagtccaaggtagagcgtattgtcaccatagcctatctttccctggtgaagatagaccgcgcattgaaccgtgatttggacaattatcaagctagttgggtagccatgccggatataaaggctctggcattcgaccacaacctgattatcaaggaagccattacctatgtccgtcagtacgtcgagttcaacccgtcttcactgttcgacttgttgccgcgtaagttcaccgcatcccagcttcgcactttgtacgaactggtgtatgacaagcagtacgacgtacgcaatttccataaaaaaattgccttgatggagtatgtcgtccccctggaagaaaaacagcagggcgtggcccaccgggcggcacgctactaccgtttcgacaaaaagatatacaataaaatccgacggtagccggattgtaaattcttcatatcactttcattttaatattgatagaaatgtatttattaggttatgacatcggcagctcgtctgtaaaagcgagtctggtaaatgcggaaagcggcaagtgtgtatcgtctgccttcttccccaagactgaagcggacattatcgcagtgaagcccggctgggcagagcaagaccccggaaactggtgggaaaacttgaaactggccacacaagcggtattggcagaatccggagtaaacgcagaagacatcaaggcgatcggtatctcttatcagatgcatggcttggtatgtgtagataaaaaccagcaggtgttgcgtcctgccattatctggtgcgactccagagccgtgccctacggacaaaaggctttcgaaacattgggagaggagacttgcctttcacatctgctgaattctccgggcaacttcacggcctccaaactggcttggattaaggagaatgagccttccgtttacgaaaagattcataagataatgctgccgggcgactatatcgccatgaagttgagcggtaccatctgtaccacggtgtccggtttgtccgaagggatgttctgggatttcaagaacaaccgggttgccgactttctgatggactattatggattcgactcctctctgattgccgacatcaaaccgactttctccgagcagggacgtgtcaatgctgctgcagccgcagagctgggtctgaaagaaggtacgcctatcacttaccgtgccggcgaccagcccaacaatgccctttccctgaatgtattcaatccgggtgaaattgcttctaccgccggaacgtccggcgtggtatacggcgtgaacggtgaggtgaactacgaccccaagtcacgtgtcaacacctttgcacacgtcaaccatgctgccgggcaaacccgtctgggtgttctgctgtgcatcaatggtacgggcattctcaattcatgggtaaaacgcaccgttgctcccgaaggcatctcctacagcgatatgaatctgctggcggcgcaagctcccatcggcagtgccggtatcagtatcctgccctttggaaacggtgcggagcgtatgctggagaacaaggaaataggctgctccattcatggcatcaacttcaaccagcacggcaaacagcatatcatccgtgcagcgcaggaaggtatcgttttttcctttaaatatggaatcgacatcatggaacaaatgggcattcccgtgcagaaaattcatgcaggcaaggctaatatgttcctcagcccgctgttccgcgagacattggccggtgtgacgggagctgtcatcgaactgtatgataccgacgggtctgtaggtgccgccaaaggcgccggaatcggtgtgggcatatacaaggacaacaacgaagcatttgccacgcttgagaagctcgaggtgatagagccgaaagtggcagaccgccaggcttatgccgacgcatatgcgcgctggaaacactgggtaatgtgctaatgtgcacattaaaacgttagcacgttaaaacaataaattaataattaaccccgtgatgaatgtgtctgtcattggcacattctcacattaaaacattaaattcttatggcaacaaaagagtattttcccggaataggaaagattaaattcgaaggtaaagagagcaagaacccgatggcattccgttattacgatgccgataaagtaatcatgggtaagaaaatgagcgaatggctgaagttcgccatggcatggtggcacactctttgcgcagaaggtggtgaccaattcggtggcggaacaaagaaattcccctggaacggtgaggctgacaaggttcaggctgccaagaacaaaatggacgccggctttgaattcatgcagaaaatgggtatcgaatactactgcttccacgatgtagacctctgcgaagaagccgagaccattgaagaatacgaagccaacttgaaggaaatcgtagcgtatgccaagcagaaacaagcagaaaccggcatcaaactgttgtggggtactgccaacgtattcggccatgcccgctacatgaatggtgcagccaccaatcccgatttcgatgttgtggcacgtgccgccatccaaatcaaaaacgccatcgacgctactatcgaactgggaggctcaaactatgtattctggggcggtcgcgaaggctacatgtcattgctgaatacagaccagaagcgtgagaaagagcacctcgcacagatgttgaccatcgcccgcgactatgcacgtgcccgcggcttcaaaggtaccttcttgattgaaccgaaaccgatggaacctacaaaacaccagtatgatgtagacaccgaaaccgttatcggcttcttgaaggctcacaatctggacaaagatttcaaggtgaacatcgaagtgaaccacgctactttggcgggccacaccttcgagcacgaactcgcagtagccgtagacaacggtatgctcggctccatcgacgccaaccgtggtgactaccagaacggctgggatacagaccagttccccattgacaacttcgaactgacccaggcaatgatgcaaatcatccgtaacggaggctttggcaatggcggtacaaacttcgatgccaagacccgtcgcaactccaccgacctggaagacattttcattgcccacatcgccggtatggacgtgatggcacgtgcactggaaagtgcagccaaactgcttgaagagtctccttacaagaagatgctggccgaccgctatgcttccttcgacagtggtaaaggcaaggaatttgaagatggcaaactgacgctggaggatttggtagcttacgcaaaagccaacggtgagccgaaacagaccagcggcaagcaggaattgtatgaggcaatcgtgaatatgtactgctaataatgatcaatgtttagtgattagtggttaataagttgcgcatgaggtgtttcaatattaatcattaatcgctaatcattaatcgctaatcattaaccattaatcattaatatcatgaattatacagaaaaaggcagtaaactctacctcttctctattgtgctggtagccgtcatcgggggcttgcttttcggctacgatacagcagtcatatccggtgccgataaagggcttcaggcattttttatgggtgcctccgattttgtctacacagatacgattcacggcattacctcttccagtgcacttatcggatgtatcatcggtagtgctctttcgggattcttcgcatccaatctgggacgtaagaattctcttttcatagccggcgtcttgttctttctgtcggcattgggctcctactacccggaattccttttcttcgactatggtgttccttcctattccttgctcgtggcattcaatttctaccgtgtattgggaggaatcggcgtaggtttggcatcggccatctgcccgatgtatattgcggaaattgcgccgagcaacattcgcgggactctggtatcatggaatcagtttgccattatcttcggccagttggtggtttacttcgtgaacttccttattctgggcgagaattcaaatccggtgataaaggccattgaaggagtcaaccagattctgaatcccgaagcggcagcatggaccacagagacaggatggcgtttgatgtttgtcagtgaggctgttcctgcaggagtctttgcgttgctcgtactgtttgttcccgaaacgccacgctatcttgccatgagtggcaaggatgataaggcactccaggtgttaagccgtatcaacggtttggctcaggcaaaggttattctgtctcaaatcaaagccacggcagaggaaaagacggaaaagcttttcacttatggctggatggttatctttatcggtatcatgctgagtgtattccagcaagcggtaggtatcaacgccgtactctatttcgcaccgcgtatcttcgaaacgatgggaatgggcaacccgatggttcaaaccgtcatcatgggtatcatcaatattctgttcacgttgctggctgtctttacagtcgagaaatggggacgtaaaccgctgctcatctcggggtctatcggcatggcgataggtgctttcggagtagctctttgcaacgttgtggcagggcttcctcccatgttggctgttgtcagcatcatggtctacagtgcttcgttcatgttcagctggggccccatctgctgggtactgattgctgaaatcttcccgaataccatccgtggcgctgcagtagccattgccgtagccttccaatggatattcaatttcattgtatcttccaccttcgtacctatgtacaatatgagtttgggagatatgggagacaagttcgggcacatgtttgcttatggcttatacggaatcatctgtgtggtggctgctctgtttgtctggaagcttgttcccgaaacgaaaggcaagacactggaagacatgaccaagctgtggaagaatagaagaaacaatagataagaccgtcattgaaactgtccatataagacgggaaagaggaggcctgatgaatgcctcctctttttgttatcaattccgtatcttttcccttatccgttcaagatgggaaagaaaaatcttcggaggggaagataacatgtaaggataaaccgtacctttgcactgtttttaatcaggaatagcaagaaagttatggattcaatgaaaatcaataaggtgcagatacgcaatctgcagattgaagattatgaccagttggcacaatcgtttacgcgcgtttattcagacggaagcgatgtgttctggacgcacaaacaaatagaaaaactgatacgcatcttccccgaggggcagattgtgacggtggttgacgagaaaatcgtgggctgtgcgctttccatcatagtgaactacgatgatgtgaagaacgaccacacttacgcccaggttacgggcaaggagactttcaacacccacaatccgaaaggcaacatactttatggcatcgaagtctttatccatccccaataccgtggcctgcgtctggcacgccgtatgtatgaataccgcaaggaactttgcgagacattgaacctgaaggcaatcatgtttggcggacgtatccccaactactacaaatatgccgatcaaatccgccccaaggagtacatagataaggtgaagcaaaaggagatcttcgacccggtgctgacctttcagctctctaacgacttccacgtgcgaaaggtgatgcgcaactaccttcccaatgatgaggagtccaagcactacgcctgcctgctgcaatgggacaatatctactatcaggctcccacacaagactatgtaaaccccaaaaccactgtccgcgtaggcttggtacaatggcagatgcgtacctacaagacactggatgacctttttgagcaagtggaattttttgtggatgccgtgagcgactacaagagtgactttgtcctttttcccgaatacttcaacgcaccgttgatggcaaaattcaacaacgagggcgagtcgcaggctatccgcgggctggcggcctataccgaggaaatcaaggagcgtttcgtcaagctcgccatcagctataacatcaacattattacgggcagtatgccgcttatcaaggaagacgggctgctatacaacgtaggattcctctgccgacgtgacggaagttatgaaatgtacgaaaagatacatgtcactcccgacgagataaagtcctggggactgagcggaggcaagtccatccaaactttcgatacggactgtgctaagataggcgtgctgatatgctacgatgtagagttccccgaactgagccgcatcatggcggaccaaggcatgcagatactctttgttcctttccttaccgatacgcagaatgcttacagccgcgtaaaggtgtgcgcccatgctcgtgccatcgaaaacgagtgctttgtagtgatagccggcagtgtaggcaatcttccccgcgtgcacaacatggacatccagtatgcccagtccggcgtgttcactccctgcgacttcgctttccccacagacggcaagcgtgcggaagccactccgaataccgaaatgattcttgtgtcggatgtggatctggacttgctgaatgaactgcatacctacggcagtgtacgcaacctgaaagaccggagaggcgatttgtacgaggtgaagatgaaaagatgactttcccgaatgccacactcggttgcctccaatgccacaccttattctccgaaatgccacacttcatcgtccggaatgccataggtttcggacaacggagtgtggcatttcagctgctgaagtgtggcatccgggacgatgaagtatggcatttcggatggtaattccatagtttatccgtatctttacaaaacttttattctaaaaaacagaaacaatggccaagaaagctctctctgctcccgaaatacctctctgcatcaatgtgttgcgattacttaactaccgtctggctcccgacgagctgattctgttcgactggcttacagtaaaacagatttcttttaaatacaagcctttccattactcccaggcgcgtgtagaggaagaaacccgtatccgccgtacccggcaggaagtcatcattaagcaattctcggccttgggcttcttgaaaaccgacataaaggtcaattccgtcacccgtggacgtgtccgctattactccgtggacttcagtgtacttgccgacgtggatgtcctggtagaaatcatcatgccccaaaccacgctcttccgtgacttcatcctctactttgcctaccacgccactatgcagaagaagagcaaggaagaacaactgaagcctgcctccgccataaatcatgaggctgccgcccgaatctatcaactgctgagccaagtctatgacgagcgccgccaatactataatgatgggggactgaccggagatgtgaagcctgaacgctcgaaatctgccatgcaattgcagcataacaaacccatagaacgtaaactggcaaagttggcagactactacaacgataacagcatcaaaaacgcctttcttgcctatgtggacgaaatcctgacccaaaagaaagaacccgaaaacctgatgtattactttctctctttcgatgagacatcggattgtttcggagtggtgaatcattaccttaattatttcaccttgcattatagttacagcagcaacagttgaagtctatccgctgatgatgctgttattatttcttttaatataatactttattattctttcccatgctgttctctgcacgcttattgctgattgcggcaatagcattcgcagaattctacataccatttgttgaactcagcaaaatagccctctcatttgttgttttcaacgtagttttcaggtcgcttgtttgagctaattttacgttttttgccgtttttgcttagggaacccgtggattttggcttattttgagaaacgtgattcgctcaaactaaaacggcaaatcataaatggagacttctttttcgtgtactgacattctctctgcattattcaaaagagaaatatctttaatctttttatgatatagagaaaattttgcaatttgttctatttcttttttacggtttttactaaggattagatattcttcttctctatcaattcctaaaaaacggcgtcccaaaagattggctgcaattcctgtagtgctgctgcctgtaaatgggtcgagaatccacgcaccaccacgagttgatgccaaaataatacgcgacaatacagataagggtttctgagtaggatgtttgccacatgatttttcccaacgagctatggccggtaattgccatacgtccgtcatctgcttgttgctgttgatttgcttcatgatactataattatagtagtgtgttattttagcagacttgcgtgcccaaataatgaactctgttgagtgtgtaaaataacgacatgaaatattaggtggcggattggtctttgcccatgtcactacattcaaaatcttaaatcctaattcagtcaggatattggctattgaaaaaatattatgatatgtaccgctaatccatattgttccattttccttcagtttattttggcattcgcttatccatgctcgattgaacgaatctatgtattcaggagtacctcctttatcccattcccctttatccacgcataccatcttcccactttgcacacttatccctccattactgagaaagtaaggaggatcggcaaatatcatatcgaacttgaaactgaattgctttaataattcgatgcagtcaccatgcaggagggtaaaggcacggtcggaggatttgaaataaggaatcataatttagcaataatctcttgatattccttccaggacattaaccgaccttctccagtgggataattgacatcttcctgcccccatatccatttatatacttttattaaagcctcaggagtttcaccggaagcgaaatttaaagctcttatttcatttataaaatcggaaggttcttctccattatatgttttttccattaaagtcagaaatacttttgctttatctttgttttcctgaactttatttattacatcttctaagatttgtttgtgagatatttgccatagtgtattatcattgggattatagatgaatactaaaaaatcttcttttttaggtcttccatatacagatttaccaccaggcttcgtgataacgattttcctaccatcagagagttcttcgacttcataacctcgatatggtaaatctataagtttttgtgagaaagtagctttatccgcattgtttatacgaataggctctagttctatattatgttgatagatgtttttcatcgttctatttatttcatgattttacttataatgccgttctccatatcattaatattgtatatatgttcaagtacatcaaaagtttcttccaaatttcgacgcgcactattccatccttttccatccgtaaaccagacaaatgtaaaatctgttaggtctttggtttccaaggttatcgttttgtaacttcttgctgtttcgttaagcttagagccactacttccataaaaattggtttctataccatataccatggtaggtgtttttacgacaaaatcaaatcgtttctctgccttaccttggttagatattgaagataaatcaataccccatttcttttcgatagcatgaatatacatttctttgaagtaggtgataccttttacaaacccagccttctgtatatatgattcgacgaggttctccatcaggtgtccacctctattttttcttccattagaatcaagcccagtttctattcctgtaacataatctacaagacttccgataatgcgattctcaatcaagttgaaaataccagttttgcgcataaatattttatattgctctacactatagttcatttttttgaaattataacagaagctgccttcttcatctatagcttctatatccatttcacgctttgctatcagaataggaatacactttagaatactagggtatttacataataaattatcaaaatcgttttctatatttttgctgccaataagagaattcataatattcaattccactttaatagcatcaacattagagaaaactttgtcaaagtatgtataatattggtagttcgcaatacttgtacgaaacagtgcaagccattgtttaaaatctctttccatacaaatttatctataattcatgctaatattagaaattataagttcggacagtttccctcttttttcaggattggcattaaccattcgcgtagccattactcgctgaatatggtattcgttataaatctcatcaaagaaattatcattttcgtctttgcctttcacatccgaattacttaagatgaaattagttttatattgaactatcttgtgacaaaaatcgcgtagccgtatttgttcattatcgtcaaactcatctttggcatacgagttgaaagaagaagttttgcttaaaggtttatatggaggatcaaagtagaataaagcatcaggagaagcgtaagctattgttttctcgaaatccccacacaaaatatctaccttttgcaaaatcttagaatctgcaagaattgtatcttcatcacaaattctaggattggcatattttccatggggaacattgaattttcctttagaatttactctatacaacccattgaagcatgtcctatttaaaaaaatgaataaagcggcggtctctatttcagacaaggatgaagcgttatatatgtcgcgcttatttaaataatactcttttctgtcttcttctcccaaggggatatacttttcttgaagttcttttaattgttcaatcaatttatatggttgttccttaataactttatatgtagttatcaaatggggatttatatcattaatcacagctttttgaatattgggaaattgctgtaatatccaaaataaaacagccccacctccaacgaaaggttctacataaataacgttttttttctgtgagaagtcagatggtaaggtacgctctatatctcctaaaagctgcgtctttccacctacccattttacaaaaggttttgcagttctatatattctatgttgcatatttggtctaaatatcattcttctaatggcaaagatagtgaatctcttcaagttgtgcgaatatattaggagtctttctttttattttttgaattctatgtctaaaaggatattaatcactcttattatccctcttttcatccttaaataaaacattttactgcacttatccagctttttctacctaaaaagtctcttgtatttaagttttttgtaaatttgcacccttaaaatggagaaggtagcttttgacgtaccaaatgcctatcaagagtatcttcaatcgtaaattgtaaattgtcaaatagtaaatatcaagatgggtaagaagtttgccgaatattcgaagctcgacctttccgaagtgaacggaaaagtgttgaagaaatgggacgaaaaccaggttttcgccaagagtatgacagaacgtgaaggttgtccttctttcgtatttttcgaaggacctccctcggccaatggtatgccgggcattcaccacgtaatggctcgctccattaaggacattttctgccgttacaaaacgatgaaggggttccaagtaaagcgtaaggccggatgggatactcatggactgcccgtggaactgggtgtggaaaaagcactcggcattacgaaagaggatattggcaagactatttccgtagcagaatacaatgctgcctgccgcaaggacgtcatgaagttcaccaaggaatgggaagacctgacgcacaagatgggctactgggtggacatgacggacccgtatatcacctacgacaaccgctacatcgaaaccttgtggtggctgctgaaacagctctataagaaaggactcctttataaagggtataccatacaaccttattctcctgctgccggaaccggactcagctcgcacgagttgaaccagcccggatgttaccgtgacgtaaaagacacgaccatggtggcacagttcaagatgaagcatccgaaaccggaaatggcagagtggggaactccttacttcctggcatggaccactactccgtggacgttgcccagcaacactgcgctctgcgtcggtcccaagatagactacgtggccgtacagacttacaacggatatagcggtgagaagatgactgttgtcttggcaaaagcactgctctacactcacttcaacaaaaaagcggaaggcattgcattagaggattataagccgggtgataagctgatacctttcaagatagtaggtgagtacaaaggccccgatttggtaggtatggagtacgaacagctcatcccttgggtgaaaccgatagacgttgccgaagacggtagctggactcccagcgacaaaggtttccgtgtaatttctggtgactatgtgacgactgaagacggtacgggtatcgtacacattgccccgacctttggtgcggacgatgcttttgtggcacgcgctgcaggtataccgtccttgttcatgataaacaagaagggtgagacccgcccgatggtagacctcaccggtaagttcttcttgattgacgaactggacgaggatttcgtaaaggcatgtgtcaacgtagacctctataaggactatcagggcaagtgggtgaagaatgcctacgacccccaattcactgtagacggcaagtacgacgaacaagtcgcacaagctgccgaatcgctggatattgaaatctgcatgatgatgaaagccgcccgccaggcattcaagatagaaaagcatgtacacaactatccgcactgctggcgtacggacaaacccgtattgtactatccgctggatagctggttcatccgcagcaccgcttgcaaggaacgtatgatagagttgaacaagaccatcaactggaagccggaaagcaccggtacgggacgttttggcaagtggctggaaaacctgaatgactggaacctcagccgttcgcgctattggggtactccgctgcccatctggcgcacggaggacaatagcgaggaaaaatgtatcgagtctgtagaagagctctacaacgaaatagagaaatccgtggctgccggcctgatgcagtccaacccttacaaggagaagggcttccagccgggtgtatataccaaagagaattacgacaagatagacttgcaccgtccttacgtggacgatgtcatccttgtttctaaagacggcaagccgatgaaacgcgaaacggacttgattgacgtttggttcgattccggtgccatgccttatgcacagatacactatccgttcgagaataaggaactgctggatagccaccaggtatatcctgccgatttcatcgccgaaggggtggaccagacacgcggttggttcttcacgttgcacgccatcgctacaatggtgttcgacagtatttcttataaggctgtcatttccaacggcttggtgctcgacaaaaatggtaacaagatgtccaagcgtctgggcaatgccgtagaccccttctcgaccatcgagaaatacgggtccgacccgttgcgctggtacatgatcaccaactcttctccgtgggacaatcttaagttcgacgtggatggagtggaagaggtgcgccgcaagttcttcggaacactctataacacctattcattcttcgccctctatgccaatgtagacgaatttgactacaaagaagccgatgtgcccatggcagaacgccctgagatagaccgttggattctctctgtactgaatacgttggtgaagaacgtggatacctgctacaatgaatacgagcccacgaaagcaggacgtctcatttccgaattcgtgaacgacaacctctccaactggtatgtccgcctaaaccgcaaacgtttctggggcggtggtatgacgcaggacaagctctctgcattccagacactctatacatgcctcgaaaccgtagctaagctgatggcacccatcgctccgttctatgctgatatgctctattccgacctgattgcagctacgggacgcgacaatgtggtttccgtacaccttgccaagttccccgaatataaggaggaaatgatagacaagggattggaagtccgcatgcagatggcacaagacgtcacttccatggtattggcactgcgccgcaaggtgaacatcaaagtccgccaaccgcttcagtgtatcatgataccggtagtggatgaagaacagcgtgcacacatcgaggctgtgaaagcacttatcatgaacgaggtgaatgtgaaagaaatccagtttgtggacggtgctgccggtgtactggtaaagaaagtgaaatgcgacttcaagaagctgggaccgaaattcggtaagcagatgaaagccgtggctgctgctgtggcagaaatgtcccaggaagccattgccgagctggagaagaaaggctcttatacgttcaatctggacggtgcagaagccgtgattgaaacggcagatgtggaaatcttcagtgaggatattccgggatggctggttgccaacgagggcaaactgaccgtggctctggaagttaccgttaccgaagagctgcgccgtgagggtattgcacgcgagctggtaaaccgcattcagaatatccgcaagtcgagcggttttgagataacagataaaataaagattacattatcaaaaaatcctcaaacagatgatgcggtaaatgaatataatgactatattcgcaaccaagttttaggaacttcactgacgctggcagacaacgtagaaaatggtacagaactgaacttcgacgatttctcgctgtacgtgagcgttgtgaaagaataattaaatactaaccctgattaacacgtaaaagttatggcagaaaagactagatactcagatgctgaattggaagaattccgcgctatcattatggagaagttagagttggcacaacgtgactatgaactgttaaaggccagcctgacgggtgcagacggtaatgacaccgacgatacatctcctacgtacaaagtactggaagaaggtgccaacaccttatccaaggaagaaaccacacgtctggcccaacgccagttgaagttcatccaaggattgcaggctgctttggtgcgcattgagaacaaaacatatggcatttgccgcgaaaccggcaaactgataccggcagagcgccttcgtgcagtgccccatgccactttgagcatcgaagctaaaaacaacggcaagaaataaaaatgggtaaattctttacgaagggccggatagcctgccttatcatattttcggtattggttatagaccaaattatcaagatttggataaagacccacatgtactggcatgagagtatccggattacggattggttctatatatactttaccgagaatagtggtatggctttcggtatggaaatattcgccaaactgttcctgaccttgttccgcattgctgcagtcacggtcattggctggtttctgtacaagttcgtgaagcaaggcatgaagaccggatttatcatctgtgtgtctttggtcttgacgggagccttgggaaacattgtcgacagtgtgttctatggcgtgctgttcaacgaaagcacccattcgcagatagcctccttcatgcctgaaggagggggatatgccccgtggttccatggcaaggtggtggatatgttctatttccccatcattgatacaaactggcccgcatggatgccgtttgtcggtggagaacatttcattttcttcagcccgatattcaattttgcggatgcagcaatcagttgcggtatcattgctttgctgttgttctacggcaaggacttcaatgatgcctatcatgctgccataaagaaatcatgaaaggaataaatcgaattcaatggtgtagcgtagtccttctggtgttcagtctgacggcttgtaaggtgaaaagacctgaaaccgtccttccggatgccaagatggaaaacgtgctttatgattatcacatagccaaagctatgggtgaagaagtgccgtataacgaaagttataagcgggtgctatacattgaatcggttttcaagaaatatggcattactcaggccgattttgactcttctatggtctggtttgcccgtaacccggaagtacttaccaaaatctacgagaaagtgaatgtacggttgaaagccgagagagacggtatcaaccacttgattgccctgcgtgacaacaagccgaaagaatcacttcccggagacagtatcgacgtgtggatatggcagcatatctatcagttgacgggtatgcccctggacaacaagataacgtttacgttgccatcagacaccaatttccacgaccgtgacacgctgcgctggagcgtgcgcttccgtttccacaacggtgcaccggacagcatacatgctccgttgatggcgatgcagattctttacgaaaagaatgacagtgtcatcagtgccattcggaaagtacaagacacaggtgtggaaacgctcaccttgtttgccgatactttaggagaaatcaaggaaatacgcgggttcatctattatccgcagcaggagactccacagcctttgctggcagaccgtatctcactgatgcgctatcacgccacggacagcttggtcattgccccaaaggacagccttcagcaggcgacagactcccttcgcaaagacagtatcggaaaacctgagaaattgaaacctctggaaattcaggagcaggaaaataccacgactcccagaaccatacgtccccgtccgaaagcatgaaacgctacgcttcccattttctgtttcttcccgggcatggctatctgaaacaatatgtggtggagataggtgaaggacaatgtgtatcacgtatcttcccattgacagaagaggtggagaatacggaatggctaccgggagtcatagctttgcttacggaggtggaaacagactatcctcattttgatacgtgctgcaatatactgacggcaatccctccggttatcgaggaagaattgccttatttgattccctggttgttttttccttttgattttactacaatgcagcctggcgccggaactcagcgcaaactactgctgtggcaatagccacgttcaatgactccgaggtctcacggctggcgggataattcggtatgtatagtttgcggttgatgagtgcctccacttcttttccgatgccatttccttcattacccatcacaatcagcccatttttcgaaagcggttgtccgtacatattctctccgtccaggaaagtgccgtaaacgggaatatccttcagtgagcggatgaactcgggtaggggagtataatgcagtctgacgcgtgcgatacctcccatcgttgcctgcacagttttgggattatagatatccaccgtgttgggcgaacagaaaatatgctctatcccgaaccaatcagcaaggcggacaatcgttcccaggttaccggggtcttgcacatcatccaaagccagacagagggagtggctgatgacggaaatatccgtctcctcatccggctgccggaacacagccagcacttgttggggagttttcagcaggctggcacgcgaaagttcctcctccgatacttccgtgacatccgttacggtggagagagggcggttccgggaaagccattctgaagttgccagcaagaactgacaaggaaaatgtcccaacaaatcccctacgagtttaggtccttctgccagaaataccttgtcggccttccggttctttttctgctccaacgagtggatatatttaatgcgatttttacttaatgccataggacacacatgttatcatttgacaaaaatacgtgattatttcaatataatcaaaaactctgcactcttccggcgttttttatttcgggaacaaaaaaatacaagtatatttgtagctgtttatgcgcaattaatgactcggtatgaataaaggtttccgctacgcgatacttactactatcgtacttttgttggcttcctgttcttctaccaaatatgtgccggacggctcgtatttgctggatgaagtgcgcatacatactgataataaggaagtaaaaccatccaatctctccatgtacatccgccagaatcccaatgcgaagtggttcagcctgataaagacccagttgtatgtctacaactggtccggacgggactctacacgctggataaaccgtacattgaggaaattaggtgatgccccggtcatatacagtgaggaggaaaccaaccggaccagggaagaaatcactaaggctgtgcagaatatgggctatatgggcgccctggtggaaccggtacgccaagtcaagaagaaaaagatgaagttggtctataaagtgacaaccggcaagccctataaagttcgtaccttgaaatatgatatccaggacagtaaaataaaggaatacatgcggcaggattccgcagtaaccttattatccgaaggcatgtattttgatgtcaatgtactggatgcagaacgccagcgcatcacaaacaaactgcttcagaatggatattacaagttcaataaagagtacatatcctatactgcggatactgtccgtaattcttatctggtagatttgacactgcatttggctccatacagacagcataacgaggatacgccgcagaatcaccggcaatacactatcaataaagtgagtttcattaccgattataatgtgttgcaggcatccacccagaacagcatcgaggtgaatgattcattgcattacaaaggctttcccatctactacaaagacaagctttatctgcgccccaaagtgctgaccaacaatctgcgcatcactccgggaactctctataacgagcagaacgtgcagcgtacctactccaactacggacgcctgcaagccctgaaatataccaatatccgtttttttgaagtgcaacagagtgacagtgcaaagctcaacgcctatgtgatgctgaccagaggcaagcatcagtccgtatcttttgaggtggaaggcacaaactctgccggcgatttgggagctgccgcttcggtggcttttcagcaccgcaacatgttcaaaggttccgaaacattcatgttcaagctacgtggggcatacgaggctgtgtccggtttgcagagctccttgaatcaagactacatagaattaggtgcggaagcaaccatcaacttcccacggtttatgtttccctttgtatccagcgatttcaagcggaggataagggctactacagaattcggattgcaatataactaccagatgagacccgaattcacgcgcattgtagcatctgccggatggagctacaaatggggggtacaacaacagcgttcgcagcatcgcattgatttgctggacatcaactatctgtatatgcccagcatagaccagacattcaaagaggattatctggagaaagacgagaactacatcctcaaatacaattatgaagaccgctttattgtccgcaccggctatagctatatctacaacagtgccggaagagcattgatgaataactccggtatcggaaattcctataccatccgcctcaattttgaatcggcgggtaacttgttgtatgctgtggcaaagctcggaggaatgaaaaagaatgcatcgggggaatacactttgttgaacattccttttgcccaatacctgaaaggcgattttgactttgccaagaatctggtcattgacaaccgcaattcattggcatttcattttggtgccggtattgccattccatacggcaatgcaacaatgcttccatttgagaagcgctacttctccggcggcgccaacagtgtgcgcggatggtctgtacgtgatttggggcccggttctttccccggcgataataacttcatgaaccagtcgggagacatcaagctggatgccagcattgaataccgcacacggttgttctggaaattcagaggagccctctttgtagatgccgggaatatctggacaatacgggattataaagaccagccgggaggtcagtttaaatttgacaagttctataagcagattgccgtggcatatggtttgggattgcgtcttgacctggatttctttgtattgcgtttcgacggaggtatgaaggccatcaatccggcttatgaaaagaaaaaagaccgttatcccattattcatcctaaattcagccgcgattttgctttccactttgctgtgggatatccgttctaatgaaagttgaaaatggaaagtgagaaatgcttattgggcatctatgtaccagccactttccattttcaattttccattttccattaattaaaagcgtagtacgtgccaatcatcgtcgcctgacgtgctgctgccacaccttgggcatccagcgtcactgtcatttcctcaccgttcggaagggtcatttgtgcagtgccgtcattgttcatttgcagcaattctgtgctgacaccatcggcaacaacattccaagtattcaactctttgttgtaaatgagttccatagaagcagtctcaccttctttggtgatagaatagccgttttcaagtgtctctaccaggtagtcaccgttttcgcctttcactttctttacatcaccaatgctggccatagggtttgaaccactccagaattcgatggagttgatgaccaatgcatcggccagatagcaaacgccatataccgggataatattgaatgccagataaaccagttcgtttacaaacttggtaccaataccttgattccagctgaccagtttactatgcagtccaaaagaaccgatacaagaactgaaaagaaacgagccgcaaatcattacggtcgcagccatcttcaaattgaactttttcataatcactcttttttattttactgtgtttaattagctttatagctcatcgagttattttaagcatccgcaaatataggattttttacgaaaatacatcctatttgagcttaaaatctgttttcagtaaaacggaagtgtctatttacgagccttttggaaaagagcttttcttatccagcggtcaacggcaaacttgcccggacctatgatatacatcaatatgaacactaccagatatacaaaagccaactctttcgtggcaaacgggtcattaccatgaattacaaaaaaggcaacagccattgtaaacaccattggtatcatagccaaacgatagagaaaacctataatgaatgccatggaacatgccaattcaccaaagatagccagtcctaaagacagcggactgcctacacccagcgggtcagggaaaacggccgacagctcttgaaagttagtccacttctggataccgtggttcattaataatataccgaatacaattcttgcaatcaatagcatagcagatgttgccgttccgtccggtttggcgggaaataaaagttgttttaacatattcattcgtttttaagttcgtatatgaactataacaaatattactcaataaaagtttactcccgcttcaagggtttgatgataatccgtaaagacgggtcataggtaaagtaactccacatccagtctacgaagatgaaaagacggttctttacacccacaatactcatcaaatggatgaatagccacacagcccatgccggaaaaccgccaaaacgcagtttcttaagctcgactacggcatgattgcggccaatggtcgccatggagcctttgttttgatatataaacggctgtaacggcaggcctgtttctgcacgctgcaagttccttatcaagttgcgggcctgctggatggctggttgcaccacttgcgggtgtcctttgggatactcctcagaaatcataagggccgtatccccgatagcgaaaatattgggatattgagaaagacggttataagtgtccaccttcaagcggtttcccggtccataggcatcggcaggcaatccttgaaggctgtttgccttgacaccggccacccagaatacatttttggtatcgatggcagtcccgtcattcaatgccaattgataattctcgtatcccatcacccgttggttcaatttgatttccacatcacgcttcttcagataatcggccacttctttggaagactcttctgaaaaagcagacaagagccgggaagagccatccaacaagatgatacgcatctcattgatattcaagtccggatagtcttgaggaaggacaaacttcctcatctcggccaaagcaccagccaactctattcccgtagctccaccgcctacaatggcaaaggtcatcagacgcctgcgatcttctttattaccggtgttctgggcttgttcaaaactatccaatatctggtttcggttgaacaaggcttccgaagtattctttagtgccatggtctgtttctccagcccgtcgtttccaaaataatttgtgttgcagccggtggcaatgaccaaatagtcgtatgccagcgtgccgatggaagtctccagcagattgtgttccgggaagacttgctgtgcttcacaaatacgtatatggaaatgctctctttttttgaagatttttcggtatgggaatgatatggcactcggttcaatacctgctgtggccacttgatagagtaacggttggaagatgtgatggttattcttatccagtaaaactatctgaaacttgttgcttttcaattttcgtgccagctttaatccgccaaagccgccgcctacgattaccagtcgtttctgtccctctttatcgggaatgtccattgctgttttcataattcaatatcatgttgttctttgtaatattaaaataacagtataaatcgaggaaagttctataaatgatgtagttaaaaagagtaaaccccacatgcaatgtagaaatgaacattaaaagagaaaaattggaaacaaaaagaacagtaacattgttgtaatgaagaacataaaaactaactttgccacggaagttttctacaagtaaatggacactaaattgacaaaatggatattaccaatattgatgctgattacagaaacggctgttcatgcacaaacacaccttgcagaagcaaaaaactctgtggactcaatttctacgtatccgatagactcgcttcccaagaaacgcagttttttcggaaaaattttgaattacttcaacgatgccaacaaagaaaagaaaaacaagaaatttgatttcagcattataggcgggcctcattattccagtgacaccaaatttggaatcggactggtggcggcaggactctaccgtaccgaccggaacgatagtattctccctccgtccaatgtctctctgtatggggatgtctccacagtgggattctatttgctgggagtacgtggaaaccatctgtttccccaagacaaataccggttgaactacaatctgtatttctattctttcccaagcctttactggggacaaggatatgacaatggagccaatgatgacaatgagagtgaatacgatcgctttcaggcgcaggttaaggtggacttcatgttccggatggcacgtaacttttatatcggtccgatgacaacatttgattacgtgtatggacatgactttgaaaaaccggaattatggaaaggaatgaaagcgcgtagcaccaacgtgagcttggggttttccttgttgtatgattcacgcgattttctgacaaatgcctataaaggatattacctacggatagaccagcgcttcagtccggcctttttgggaaataaatatgcattcagcaatacggaactgacgaccagctattaccagtccgtgtggaagggtggggtgttggcaggccagttccatactctgctgaactacggaaatccgccctggggactgatggcaacattgggaagttcctattctatgcgtggctattatgaggggcgctaccgtgacaagtgtgcaatggatgcccagctggaactacgccaacatgtatggaagcgaaatggagttgccgtatgggtaggggcgggaaccatattcccgaatttctcggaattggaggccaggcatattcttcctaattatggtttcggctaccgctgggagttcaaaaagagagtaaacgtacgtttggatttaggttttggcaaacaccagaccggatttatattcaatatcaatgaagctttttagagacataaaaaaatggttcgacaatcaggaacatttgttctatctgtttctggtcattctgatagtgcccaatgtagtgctatgctttacagaacccatatcatggacggcaaagatatgtaatatcctgctacccctttctatatattatgctgtaatggcttggtcgagaaactgtggcaggacattctggctgctatttccgttcatcttcttcggagccttccagcttgtattgctgtatcttttcggtcagtccattatcgcagtggatatgtttctgaatctggtgacaaccaattcgagcgaggcgctggaactgctggacaatctgatacctgccatcgttattgtggtagtgctctatatacctgcattaattctggcaaccatatccattgtacacaaacgcagactgtccgaagcattcatccggcaagctcgccgtcgcactctgtatgtgttgtctgccggaatattatccttaggcactgcttatttgacagataaccggtatgagccgaaatccgaactgtatcctgccaacgtatgctacaacatagcacttgcttttcaacggacggcccagacgcggaattatcacaagacctctaaagattttacctttcatgctagaagtactcatcaggctgatgaaagggaagtatatgtaatggtggtgggagaaacctcacgggcatgcaactgggctttgtacggctacgaacgggagactaacccgggactgtcgggcattggcggactgacagctttcagccatgtgctgacagaatcaaacactacccacaagagtgttccgatgttgctgtcaccggtcagtgcttccagttttgattccatctattatcaaaaagggattatcacagcattcaaggaagccggttaccagaccgcctttttctcgaaccagcgctataaccactcatttatagacttcttcggcaaagaagccgacacgtatgatttcattaaagaagatgtgggggattccaattacaacccctctgataacgaactgttgaaactggtagcaaaagaactgggcaaaggagtttccaggcaatttatagttctccacacttacggttctcattttaattataaagagcgctatccggcagagcaggctttcttcctgccggacatgcccgttgatgcggaagtgaaatacaaagacaacctgattaatgcctatgacaattctatccgctacacggataattttctggttcgtctgatagatatgcttcgagaacaacatgtcaattctgccctgatatacacttcagaccatggagaagatattttcgatgacaaccggcatctctttctgcatgcttcaccggtaccttcctattatcagatacatgtgccattctttatttggatgtccgacaactaccggcagagatacccatcgttattggaggccgcacaagccaataggcagaagaatgtatcttccagtgcctcattcttccagacaatgctggaaataggtggagtggagaccccataccggaatgactctttatctgtcaccagcgctctgtttatcgaaagacccagagtctatctgaacgaccacaatgaagcccgcacactggatgatgtcggtatgctcaaggaagacttcaagatgctggaagagaaaggcatcaggtaatcagggaaagagagcaggctgttgctattttgccctgattcttgatataaaattctgaatcaccggatacatctcctctaccgtattcagctccatgcaagccgtctccaacgggcaccagccggtcttgtcacggttaatgatatggggaacctcttgggcaaaagtcgtttcaattcctgcttcgcacagcaatgccagcgcaggagtgctgattatatcggcatagaccgttttaaagcctcccagtaccatcaaagcagcggcacctttccctataaccttatcggcaatggcagcccccttcataaatgcagaatctgcctggtacaaatcatacaaatccgctactccccgttgggtgaaagtacggacttcctcccggttcttcataacacaagagtatcctcccttgtgcagtatgtcaatgatactctccattttataaagtctcttgtttcaactgttctacaaatttgtcaatacgatgcagttctttgggaatatcaatcgtttgcgggcaatgcggagaacactggttgcacccggtacaatggtcggcctgcctcagtttgggtacacttcggtcatatcctacgagaaaagcacggcgtgctttccgataattctcatcctggctgctttccggcacatttccttcattgacacatttattgtaatgtatcaatatggcaggaatgtcaattccatacgggcaaggcatgcagtacttgcagtcgttgcaaggtatggtggggtactccatcatcaaatctgccgtatcatacagatactgagtttcctcttccgtgagtggtaccaatggagagtaagtacggatgttatcctgcaaatgttccatataagtcatgccgctcagcactgtcagtacatcctggggagaaccggcataacggaatgcccaagacgccacactgcgttcgggttcgcgctgcttcagccgtgccacaatatggtcggggacattggagagccgcccacccagcagaggctccataatgacagcagggatcttacgcttggccagctcgtcatacagatactctgccttgaagttgctgcccgaagcatgtttccagtccacataattcaactgtatttgtacaaagtcccaatgaacttcaccacggtcatgcatctgcaaggcatagtcatagacttcgatatctccgtggaacgaccatcccaaacggcggatgcgtcctgcttcacgctccttgacaagaaaatcaatcataccgttgtctatgtagcgtttgcggaattgctccatgccaccgccaccaatcatgtgtagcagatagtagtctatatagtccacctgcatatcctcgaacgacttacggtacatggcgatggaaccctcgcgagtccaggtatcaggatgaaaattggatagtttggtggcaagatagaacgattcgcgtggatggcgtttcagagctattcccgtagacttctcactccatccttgtacatacatcggagacgtatcgaaataattcacgccatgggcaatggcataatccaccagttcgtttacagcatcctggtctatcatttccccttttccatccggagcaggaacggtaggccagcgcatacagccgtatcctaaaatagaaactttgtcactccccaaaccaggaaaactacgataggtcattttatccgtcggaatggggcccaatactttactgccttcactgcttccttccttagaaccacatccatagagggcagcagtagatgtggcggttgtaattcccactatcttcaagaaatcacgacggttcatattgtttttatgatgttcttccatacttatagaaattctactttgttatataattcgatgtctttcatgtccttccacatagatggcactgaacggacgggccggacaaagattctcacatgccccgcagccgatacaacgctccacattgattaccggaatctttggagaatccttgtcttcaggtatactcggcaccatttgtatggctcccgtcggacaatggcgtgcacagttgccacactgcacaccatccgtcagtggtatgcaatttttctttacccacacggcatgccctatctgaacggatgatttatcagctttggttatcggacggatagcccctgcaggacatacctccgaacattttgtacattccggtctacaatagccgcgttcgtatgacatttccggttgcatcaatttccttaagtctgcagaaggacgaagaacctgattgggacatgccgacacacagagctggcaggccgtgcagtgttgcgccatattgcgggcactcaatgagccgggaggagtgaggggagtgcttcgctcaagaatcttcttatcttcaatggctgccagtcctccgtctactttcttttcctgcgcttttaaaacagaagtggctgcaaccagagccgttgctgtgaaaaaactgcggcgggtttcgtttatctgttccgaatctgccttgcccgcagcaggtttaccgaaaggatgatacttgtaggaaatggctccatgcttgcacttctcaatgcagttcatgcaaaccacacaccggcttgcatcaatctgatgctccttaaagttgatgcaggctgccttgcagttgcgtgaacaaagactgcattggttgcacttttccgaatctattgtgatgcggaaaagcgaataacgtgaaaggaagcccaagaccgttcctaccgggcaaatcgtattacaataggttcgtccgttgcgtccggccagaacaacaagcacagccaaagtagcggcagcaataataaaagtcggcaggctcttcaaccatacatccgtttcataaaaggcataactgtctgcccgttcagccagataagcaagcagattgttgccccattgccatataggttgaaaaagattattggcaatacgtccgtatgcactatagggtgcaagtagagcagccaatgaaccaattccggcaatcaaagcaatgataaacacacccaatacgccatagcgcagccaagataaggccggagaataagagtaaggaagcttcctgcgttttttaggttgccggcccagccatgccagtatatcctgaaatacccctaaggggcaaatcacagaacaatagatacgcccgcataccaaagtgagaattacaagaaacaatatcactcccacattcagcgccaatacagccggcaaaaactggattttggctaaccagccgaaccacccatgcaacgttcccgtaaaatcaaggaacagcaaggtgatgagtgcaaaacaaatcattgcaaaagtcagtctaatcttccgtaacatgataatcctttattttgagttcctaaacattctatatcagcgatatgagtacaaaacaactgccgaaatagtgaaattttctttatgcaaaaataaagaaaaaaagaaagatatcatcattcaatggaattaaaaacgaaagaaataaacggtgcagaatgcctttactataatccaagcggtctacagaaagaatcaacttatgatttccgaaaaatttccgtgtacggtctatcgcccgccgtacttccggtctggaagaagcattgtgatacagtccgtagttgattcccataggaagagcatcggtctcaactactctattcccgagttgtgcttcgtccagtttaaagtcaatacgcagtacccgtttgacagcactgataaaatgccgcatatagtcataagtatggaaagctataaagtcagcatccaataatcctttcaggatttctgcacgttccggtaatatccggaaaagttcataggaagggaaagggatatgatggaaatatccgatattcaaattcgggtaaaccttccgaagcattccgggaagcagcattggctgatagtcttgaatccacaccttgtcacctggatgtatcacgcggcaaatggcatcgcagaacaactggttcacttcctgatacgattgccagaaagagttccgatatagcgtataaacaaaaaagtagtgacataatggccaaatagtactattactatagccttcataataattctttatctgtgtttcggacaagaatactgggtgaaaatttattccttccaatctagaagtgatttcctttttactttcttcgttgtcaacgcatattccaggccatccaatccaatgtttttcgtaggaaatctgaagtgagtccaaaccggtagccagtccaccttcacttcatgaaaacacgaacgtttcatcctctttggtaaccttaacgggtaatctgtttgatataatataaaatttcatgtatgagttaacacaagaaatatgccaactcatacaatattttatttattgcttataatcaggattttagaaaaagataaagagaaaaacaaacattcaaaaaatgaaaaagaatgttccatttcgatatggtcctactattaccaattatcactggaaatgtctttcttcaccaatgcttcaattctttgcttatagcaatttatcccttctgctatatttttactagcttccgaggtccccattccatagactataagaggagtttgccataccattccggcatgtacagcacttacttgataaggtcttaacaactcatccaccgtaaaacgatttcttcctccgcttctataagcatcatgttcagagccggcagtagtgaccaccatcaatgtcttaccagccacagcaggagtttttgccagataagtaaatacttcatccaaccatctcttcaataaagaaggagccgacatccaatagaacggaaactgaaatacaagcgcagatgcatgcgatatgatagtgctccatatctctgcattaaaagcatcttccacacgcatctcatataaattgtatatggccacctctcccatgtcactaatagcatccatcaatgccttgttagctcgcgactcttttatattgggatgtgtcagaagaaccactacttgctttgaatctttatccatattgtttttcttttagtttaaaatcattgatgtgtgtacaaatatacaaaatatagatatacgagtaggaggaaataaaagttttcttcctactttcattttctgacatatattttcgaatgtgacgaaagaggcggaaagcgggtgagggcaaaggtataaaaacaaacttctgaagaatttattatgcggactaacgaaaaataatgtatcatccccatatagatttactagtgattccgtatgaggagcttatacccatcaaagcatgttcttgttaagacaaattaaaaaaggaacaacagtagttgttccttttttaagtacaccctcagggattcgaaccctggacccactgattaagagtcagttgctctaccaactgagctaagagtgcattccttatttcttgtttgcgggtgcaaaagtagtccttttattttattcgtgcaaacaaaacggtgtattttttgcgatgaaatgggattttttattcaaactcgtataaatcagaaggagtagtacgcttcaaagcacacaactgtacatcctttcctacgataattcctttttcccttaatttccattccactgttttatatgccaattcaggatgattgttgtccttgctcaaatgacaaagccaaatatactgtaaatgttccgtcatattttccgaaagaaattcagcagtagcaatattactcatgtgtccggtgcggctggtaatccgttctttcaggtattgggggtaggtacccatgcgtaacatttcctcatcgtagttggcttccaatatcagataattggcctttctgatatattctgcggccgtaggagtaatttcaccaaggtctgtaagaaaggcaaacacttttccgtctatctcaatgcaatagcccacattgtccgtgccatcatgaggtacctcgaaagattcgatatgaaaatcttccaactgcatgggttgctgcttttccaggtaacggacagacgaatataacttttctgtcatgcaatagctccggttgatgccctcatgaatccgggcggttgtataaataggaatattcagtttttcacccaatccgcctactgctttgatatggtccgcatgatcatgcgtaacaaataccgcacgtatcatttccatgctgatacctgcttctttcagtcctttttttatcgtccgtactgcaatgccggcgtcgatgagtattccatatttttctgtgcctatataataacagttgccgctgcttccactggcaaggcttataaattttactttcatcctaatctccttaattacaaaaaagccgtcgcttttaaaaaaagtgacggcaaatatacaaaaagtatgcaatatataaaccttatgccttcttctttttgtcgatgaattcggtagttttggcaaaaacgaataacgctatcgctgcaaccaatcctatagcagcgaaataataccagatataatgtgcattgacactggctgcttcccacgcttcgcgggtttcaaacaagactggatcaggacaatattttgtcagaagtacccccgcaataccgaacccgaaaatagaagagaggaatgaatgaagatgactgaaaccgaggtacataccttcttcgcccttgggggcctgcaaagagaagtactccagataacgcggtgagataaaacattctgccaaagcttgcacaacaatgccaagcaccatcatcaaagtaatattgctcatgccggaaataatatcgttgcccagcaaattaccgcatgccatcagcaatgccgataccggaataagaaacatgcctatattcatagaagtaatagctgtgcgctttgccatccaccgggtgataaaacttacacagcaaaccactacaaacgggtttacattggctatccaccccggtttggctgtttcacccgccatacggatgacatatttgggcatagttgcatagagctgttgctgcaccatccaaaagccggttacgatgaggataagaatcaacaaacgccaattagtgataatacgcagaaaaccttgcccaatttcacgcatgcttttcccttcacctgctgtatgtgccgatttatacaataagatgacagccaataatgccagcaccgtcatggcagccgagaagtaattgatataaatataagcttgctcaccgataacattccgtagagggtcgaccaccgtttttccggtaaaagctcctatattcaccatcatatagaagatggaatagccgcgagcacgggtagcctctgttgtttccttagccaccgatcccgatatgatagacttgatgaacgaacctcctaccatgataacaaacaatacggggacaatcatccagcggtcattactatccggcaatcctgaaaaacgggttgtctcgccatactccaccagaccggctgtttccagtagggtgggaagcaatcccaagcccaaatacccgatggaaagcagtgagaaagcaataatcatcgactttcggaaacctatcttatcggcatatgcgcccgtaaagataggcaacaaatagagccctcccgaaaacagaccggaaatcatgcttgactcaaaatcattgaaacctaaaatattggaaagataaatggtaagaacaataaatacagcataatatgccatgcgttcgaacagttctactgtactgcttacccaaaaagctctgctgaagcctttggaagcgggttggggtgatgtcatcatccttttgtacgattaaaatttatgtattaaatgaaaaaataaatgcaaaaataggaaattaatatcgtgtttgcaagatattaattttctgcaaacacaatattaataagttgcagacaagatattaacttcccatttatcactatttatcttttcatttatatagaatactccgtatctttggacgcttttataaaacgaccattcatgaaagataaaatcgaatttatagcttttgacgctgatgacacactgtgggaaagcgaactttatattcaggagttcgagcacaaattctgtaaccttttaaggcaatatctgcctgcttcatccatatcacaaaggttttttgaaacagaaatgaagaatctgcatatgtatggctatgggctgaagagcataatgctcagtatgactgaaaccatctgcaaagtgacagacggaaacgggaatatgcatcttatagaagaagtaataggatggggacaagagcttctgcagaaaccggttacactactggaaggcgtgaaggagaccatatcgtcacttcatgggaaatataaattggtgttggccactaagggggacttgttcgaccagaaaagaaaaatagaagcttccggactgcgagaatatttccatcatatcgaaattatgagtgacaagaaaatcgatgattaccagaggctgattgatacattgggctgtccgcctgaaaaactcctgatgataggtaattctgtaaaatcagacatacttccggtattggaacttgggggatacgctgcccatgtaccataccacgtgacttgggcatacgagcaacatgaaggggaaatacgacatcccaattttatacgattggatagtatcaaaggaatattagataagctataagttatgggtgaaactgcataacttatagcttactattgctttttagaattggaagaaattcttagcgttataatagctgatatcttcaatcatctggtttacgcgttccatctcggaaataggaatttcaccattttctacatcacggcctacaagattacacaatgtacggcggaaatattcatggcgcggataggagaggaaggaacgggaatcggtcagcataccaacaaatcggctcaataagcccagtacagaaagggcattcatctgcttttccataccatccttctggtcaaggaaccaccaaccggaaccgaattgaatcttaccggcaaccgtaccatcctggaagttacccagcatagtagcaatgacttcgttggcgcatggattcaaattataaagaatagtcttggtcagcttaccattggagtttaagcggtcgagaaatttagccatagcttttgctgtagtaaattcgccaatggaatcaaaaccggtatcaggacctaacagtttgaacatcttactattgttgttgcgaatagcaccataatggaactgttgtgtccaacctttctcccaatccatttcgccgaacacaaccagcatggccgacttgaatttcagaatttcctccttcgtcaatccagtaccgccatataccttgttaaagatagccttaacttccgctcctgtataatcctcggcatagaattcttcaattccgtggtcagacagtttacatccttgtttcgcgaaaaaatcgtgacgcttacgcaaggcagcaaccatatcgtcaaagcaggaaatagccacatcgctcacttcggccaacttttctacatatgcgcgaaaatcggcaggaacttccaccgccattgccttatccggacgccaagtaggcaacatcttgatttcaaagccgctctcacgtgtcttgatatggtattccaaggaatcaataggatcatctgtagtacaaaccacttccacatgataacggcgcatcatgccacgggcggaatattcaggctgtttcagcttctcattacattcatcataaatttcacgggccgtatgaggattgagaattttatcgattccaaaagcggtcttcaattcaaggtgggtccagtgatacaacggattacggaaagtataaggtaccgtttcggcccacttctcaaacttttcccaatctgtagtatccttaccggtacagaaacgttcgtccacaccattggtacgcatggcacgccacttgtagtggtcacctcccaaccaaatctcagtcagtgacttaaattgatagtcttccgccaccatttgaggaatcaagtgacaatgatagtcgataatcggcattttagccgcatgctcgtggtacaacttctgtgatgtttccgtttgcaacagaaaatttccgtccataaagtttttcatcttcttgtgttttaagtatctaaaaatattactttctatttattacacctatatagtattgattgtaaagctaataggtcgtataattgtttttagttttattaaccgttatcgaacacaaaagtagaaattttacttggagaaacaaaataattcgtatctttgcggcgaatatttataatatttaagcttcagacgtctcacctttactgccttaggcagcatacctcaagatggaaaacaagaactataccattaaagacatagcacgcatgtccggcgtctctgccggcactgtagaccgcgtactgcacaaccgcggagacgtatccgtttccagtagggaaaaagtccagaaagtactcgacgagatagattatcatcccaatatgtttgccatcgggctggcggctaaaaagcactatcatattgtctgcattataccttattatatagaacatgattattggtatgctgtagcagcgggaattgaccgtgccgcacaagaattacggccgttcaatgttggagttagctatctgtactatcggcatgcggacaaatcctcctataaagaagcatgtgctgtgctccgggaggaaaatgccgacgccgtacttgttgccccgaatttccgagaggagaccataaaactcactgcttatttggaggaagcggatattccctatgcattcatagacttcaatattgaacagacgcatgccttgtgttatatcggacaagattccaaaaccagcggatacatcgctgccaagattctgatgcgtagctatgaaaaagggcaggagcttgtgttattcctgaacaatcagaaaaacaatccggcagaaatccagatgcaacgccgcctcgaggggttcatgcaatacctttccgaggaacataaggatttgattatccatgacattgtgttgcacaaggaagatactgacggcaacagacggatgttggatgctttttttaaagaacatccccaagccgtactgggagctgtttttaattcccgtgtttatcaggtggcaaattatctgcacgaaaaggggcagaagctggcaggacttgtgggatatgaccttttacacaaaaatacagagttcctgaaaaccggtgaagtaacctttctcatcggtcaacgcccaggcctgcaaggctattgtggcgtgaagactttatgcaaccacgtggtatttaaaagaccggtcactgcagtgaaatacatgcccatcgacatattgatgaaggaaaacatagacttttactttgagtttgaataatcaaaaaattacatatcaaccatttaaatcattttttaaatgaaagcattaaacaaagaaactgctcccaaagcacaacgcccggaacgcattatccagtttggcgaaggtaatttccttcgcgcatttgtggattggattatttataacatgaatcaaaagaccgattttaacagcaatgtggtagtagtccaacccatcgataaaggtatggttgacatgctgaatgcccaggatgacctttatcatgtaaatctgcaaggtctggataaaggagaaaccatcaacagtctgactatgatagatgtaatcagccgtgccttaaacccctatactcaaaacgatgagttcatgaaattggccgaacaaccggaaatgcgttttgtcatttccaacacgacggaagcaggtatagcctttgaccctgcttgtaagctgacagatacaccggcgtcttcttatccgggcaaactgacacagctgttgtatcaccgcttcaagacattcaacggcgacaagagcaaaggactgattatcttcccttgcgaactcatcttcctgaatggccacaagttgaaggagacaatctatcaatacattgaattatggcaattgggtgatgagttcagagcttggtttgaggaagcctgcggtgtgtatgcaacactggtggaccgtatcgttccaggattcccccgcaaagacattgccgctataaaagaaaagatacagtacgatgacaatctggtagtgcaggctgaaattttccatttatgggtcatcgaggctccgcaagaagtcgccgaagaattccctgccgacaaagccggactgaatgtattgtttgttccttctgaagaaccttaccacgaaagaaaagtaaccttgctgaatggacctcataccgtattgtctccagtagcctatctgtcggaggtaaatattgtacgcgatgcctgccagcatcctataatcggacaatacatccataaagtgatgtttgacgagctgatggaaacgttgaacctgccgaaaaacgaattgaaaaagtttgcagaagatgtattggagcgcttcaacaatccgtttgttgaccatgccgtaaccagtattatgctgaactctttccctaaataccaaacccgtgaccttcctggcctgaaaacctacttgaaacgtaaaggagaactgccgaaaggtctggtattgggactggctgccatcatcacgtactacaaaggaggtacccgcgcagacggcacagaaatcatcccgaatgatgctcccgaaatcatgcagttattgaaagacctttgggcaacgggggatacccgcaaagtggcagaaggcgtattggcagccaaagaccttatctggggggaacacggagacttgaataccgttccaggattgacagacatgattacctgcttcttaaaatccatccaagaaaaaggcatgcaggaaacagtaaaaggtattctttaattcctatgattttaaacaagcagaccgtacaaaaggagtttttatacggtctgctttatttataccacatttgatgggaaataattaagtcacagttttcttttttgtctaaaggctttcctgctctgctgcccgcaatataaaagtagtggcaccaatagttacaatggctccatcctcaatgcgaatacggtctttgtcacccaaaatttcattattaaggaaagttcccgtcaggctgggagcatcgcgtaaggtataaatcaacactccctgcttattacgctttacattaatgatacagtgacgccggtccatactcatatccgaagtctcaatcggcacatcgataacattccccacgcaacgccggcctatgatattgtcaccttcttgcaatggaagtacctgcttaaaaccaaacacgttctcaatgaccgtgatgctgccaaaagcctctttaaactccgcttcatccggacgttcttccttttgaggggctttcatctttgatttacctaaacggatactgaactgcttcttacactggtcacatacaaagaccagtgattggccttcggtatacttggtttcatcgaatgttaagtaattctcacatttgggacaacggatacgcttcatgatagttaaaaattaaagaattaaaaaataaagcaagggtagattactttctacttctttaatacccaagcgttcttatacgtttcattctggcgaactctgttcaatgcctgatatgcttctgtttctgtgccacaagactcaatgctgacacgcattttaccatctccaacaattgcttttgcatgagggtaacctttttcaatcagttgctttgccattgcttcggcatccttctcagtacctacactggcaatgatgacgtggtatttctgtgcagagacaagtgacggggcgacagtccctgctgtggtcttttgaatttcactctttgttgttacagatgttgaagaggacacttctgccgcctgctgcttaggctgagaaacaaccggagcattctgcgcgttagcttggcccaccttaacctctcttacggcaaccggaaccacctttttctttgccttctgccccgtgtttttttgagccgacgctttcggagtgtcggccttccggctaacaacaatcggattaatggcaagggattccttttctatcatctcaaaaagttcattcggaagtaattgcgcataatttccttcaaccacttccgtattctctatcggtgtagacaaaaagaaaaacaaggcaaccactgcaatcatggcaaccgcattcgacaaataggaacggttgaatttaatctcaaaccttcgctttttgtcttccggcacaactggaacagaataacggatggtcttttccatgtacggtttcttcagttccgccagttcctgcatttcaaaactatccaacccatataagtaaggagtggttatcttgtggtcatagggaacaaagtcataaataccatgaatggagtaacgcaattcgccaatgttgggcaaatccaccttaccttcttcatggagagcagtgaatatatgcgccacttctttttctacaatccgcgtagcatcagaaaaatcagtatcatagacagccatataggattgtacaagtaagccgtcattcatcttcagttgaggattgaaaccgataatacgggtagggggcagaaaaacattctcttccgctactctcattgccggagtataatgagctacaaatcctcccaaaccgggaacaatgacacaatcgttctccaataacaatacttctatgtgctgtgctaattcaatcatgctacaaaagtagcggaaatatcggatatacgctagtttcagagcttttttcttatcaacaaattatgaacattgcacattgaaaatgtatttgaaaaaggttttttggcaagagaaggaatttttaccggaaaaatttctacttttgtaccgtttaactatactcgtcaagaatagaaagacaattgccctcgcaagagtatacaaacctaaacacttaacaaaagactattatgcgtattattttctgtctgatggttttcttgttcataggaaagaacacgatgctggcacagcagctgtcctcattcgtagaatatggagcagccctgcataccggtgacaatactcctctttggcaggtcagcaaccagcaaggactcacttcgctcgacaacaatacttacatacgtggaggaatatcctacaaacaccaacttggaaaatggaagtttgaagaagcactggatttggttgcagcagccggattcagcacgacctccttcattgtacagcaggcttacgtagacatccgttacaagtggtttggattctttgccggaagccgggaacagaattctccattgctgaatcaagagctgagcagtggcggcatgacctggtcgggtaatgcgcgtcccatcccacaagtacagataggcatacccgagtatgtacagttgctaccccgtttaggcctgaaaggagaaatctcgtacggatggtttacagataacaaataccagcgggagcaagtcggagaaaaatactggtacaccaagagtatcaaataccatcataaagaagggttcctgcgtatcggtatacccaaaggaaaatggcaactggaactcggaatgaccctcgacacccaattcggaggatacaagattggaggttccgaattgggagacttgggcaacggatggaaggattacgtacgcgtattcttccccggccacgggcgtgaggacggaccggtaggtgaacatctggctttccaaggcaattttctgggtagcgaatatatcaaaatgacttatcgtcctaaggaagatttctccatcagcgcctatctggacaatcattttgatgacttctccgccatggccaaactcaacggttgggatggcttatggggtgtggaatataaatccaaccatagacaagccatcaacggaatcgttatcgaatatctccagactaccaatatgagcggtccactgcacggtttgcaaaattctgtagtaggtaagaccggaggagccgacaactactacaacaacggttactacccaggatgggcacattggggtatggcgatagccaatccgttgatagcatcgcctatctataataaggatggcgatatgagtttcaagtacaatcgcgttaaggccctgcatctgggatggagcggcgacatcagcagtgagtggagatatgtggcaaaattgtcccacaacagaacttggggaactcctcatcgtccaatacccgatatattagaaaatttttctacttttgcatcgttttactatattccccgtaaatggaagggctggtgcttcaacgcgtcccttgcattggatatgggagagatatatggagacaattttggattccaactgaaagtacataaaacattttaagaaaatgaactacatacaaacagagattgacggcgtatggctgattgagccgaaagtattccatgatgcccgcggatactttatggaagcatttaaggaagaagagttccgtgcacatgtcggaaacgttcacttcatccaggacaatgagtccaaatcctctttcggtgtattacgtggtcttcattaccagaagggtgattgcagccaggccaaactggtacgtgtcattaagggaaaagtgctggacgtggctgtcgacttaagaaaatcttctcccactttcggaaagtatgtcagtgtggagctaagtgaggagaacaaaagacaattcttcattccgcgtggttttgcccacggttttctggtgctgagcgatgaagctgtctttacatacaaggtagacaacgtatacgcaccacaatccgaggcatccatccgttttgacgacgaagccatcggtattgaatggcccgttgctacggaacagcttctattatcagataaagacggacatgccgtatcgttcaaggatgcggtctattatgaataaaatatgaaaatagccattgtcggtacaggatacgtcggtttggtaaccggaacctgctttgcggaaatcggtgtcaacgttatttgcgtagacacgaacagtgaaaagatagagtcactgaaaaagggtgttattcctatctatgaaaatggactggaagaaatggttagccggaatgtgaaagcaggacgcctgcaattcaccacgtctctggagagttgtctgaatgaggtggaagtggtattcagtgccgtaggtacaccacccgatgaggatggaagtgccgacttgagctatgtgctggaagttgcccgcaccattggacgcaatatgcagaaatatgtgttggtggtaaccaaaagtaccgttcccgtaggtactgccagaaaagtgcgggctaccattcaagaagaacttgataagagagggatgaacattgacttcgatgtcgcttcgaatcccgagtttctgaaagaaggtaatgctatcaacgattttatgagtcccgaccgtgtagtggtgggagtagagtccgaacgagccaagaagataatgagcaagctctacaaaccattcctgctgaacaacttccgtgtcatctttatggacatcccttctgcagaaatgacaaagtatgcagctaactccatgcttgccacccgcatcagcttcatgaacgacattgccaatttgtgcgaattagtgggagcggatgtaaacatggtgcgcagtggtatcggttcggatacccgtatcggacgcaagttcctctatccggggataggttacggcggttcatgcttccctaaggatgtaaaggcactgattaaaacggctgaactgagcggctacaagatgcgtgtactccatgcagtagaggaggtgaacgagaaacagaagagtatcttattcgaaaagttgcagaagcatttcaataatgatttggagggaaagaccattgccatttgggggctggcctttaaacccgaaacagatgacatgcgtgaagccccggctctggtattgattgacgagttgctgaaggccggttgtaaagtacgtgcctacgacccggctgccatgaacgaatgccgacgccgcataggagaaagtatttattatgcgacagatatgtatgatgccgcactggacgcagatgcactgatgctggtgaccgaatggaaagaattccgcctgccttcatgggcagtcatcaagaaaactatggaacagccgttggtattggacggacgtaacatttacgacaagaaagatatggaagaacaaggtttcacatatcattgcatcggaaaataaagttgcagaaaaaagaaaagaaataaatagggacgttatgacaataaaaagaagtgcgattctcattgtacttgttgtctcattggcatcatgcagcaacagacaaaacggggaggtttccgtcaaggaagaccttactgcaaaacaactgttgcaaggcatctgggtgaacgatgaaacagaaatgccgttgatgcgcatcgaaggggatacggtatattatgccaacccgcaaagcgctcccgtacctttcaaggttgttcacgatacaatctacatatacagcaatgaaccggtggcctataagatagaccgtcaaacggaatacagcttctggttccactcgctggccgacgaagtaatcaaactgcataaatcagagaatgcagaagattctttggttttcaccagtcgagaagtggaggtcatttctactactccggaagtaataaagaaagacagtatcgtaacatacaagaatacaagatataggggatatgtatatatcaacccctcaaagatgaaggttttcaagacttcctattctgaaaatggaatcagtgtggacaatgtgtattatgataatgtaatccacatctgtgtatacgaagggaagaagatgctttatggccaggacatcactaaaaagatgtttgcggatatattccctaccgaaatgctggaccaggccattcttgccgatatgaatttcatgggtgtggatagtaaggggtaccattatcaggcaaccctcggcatacccgaaagttccgtatacaatttggtaaatatgattattggttttgacaatacaatgaacatagaaaaagcggaataaatccgctttttctatttcttttcttcaccacaatgtttatttcttctcgctgccattctgtggacgtttggctctgggctttccacctttactgttgttacggccgttcttgtttcctcctggcttacgtccgtttccatggccgccccgtcttcctcctccgtcaaatgctctcggcttgtattcgggtgcttcacccagctcttcgggaaccggtattttatagatgtccctatccaggaatttttcgatattcttaaagctaccttgctccttttcggaaacgaaggtgatggctacgccgtcattattggcacgcgccgtacgtccgatacggtgcacataatcttcactgtcgtggggaacgtcatagtttatcaccagacggatgtcatcgatatcaatacctctcgcaacgatatctgtagctaccaggatattgatacgtcctgccttgaattcgtacatcacttcttcgcgctgtgcctgctctaaatcggagtgcatttcaccaacgttcagtttcatctgcttcaaggctttggtcacttccttcactttcagtttggaagaagcaaagatgatgacgcgttccggcgtctcctctgcaaagaggctacggatgatgcccagcttctgattctcgtagcagacataggctgcctgcacaatcttttccgctggtttggaaaccgccaacttcacttcggcgggattgttcagaatgttgccagccaactgttgtatcttggcaggcatggtagcagagaacataatggtctgccgctctttagggagaaacttgacaatctgcataatgtcatcatagaatcccatatccagcatccggtctgcttcatccaaaataaaataagagacacgggaaagatctacataaccaaggctaagatgggctatcaaacgccccggggtagcaataacgacatcagcacccagtgtcaaccctcttttctgctgctcgaatagtattccgtcattaccgccatacacggccacgctggaaaccggcatgaaataagagaaaccttccatctgttggtctatctgttgcgccaactcgcgggtaggagccatgacaatgcaattgatggcatcggcagggtgtccgccctctgaaagcttgttcaatataggcaacaaatatgcggctgtttttcccgttccggtttgtgccactgctattaaatctcgaccttcgagtatgacgggaattgatttttcttgtatgggggtgcactcttcaaagcgcatggcatccagtgcctccagtacattgccatttaaatgtagttctgaaaacttcatgtatctcttttaaatttgcgtacaaagataggaaaaagacttataaaatagactcttacagtaaaaaaataagcccttgggacaataattatctcaagggcttgcaaatttgtttcaagcatctgccttcaacggggaatatcaatgtatgaatccttaaatcccagaaagtaaagtacgccatctaagccgatggtattgatggattgcttggcattggcaactactttgggctttgcatggaaagcgattccaaggccggcaattcccagcatgggcaggtcgttggcaccgtcgcccacagcaatagtctgcgcaatatccactttctccacctgagctatcaaacgcagcaactccgccttacgcttaccgtcgactacatcaccgagatagcggccggtcagtttgccatcctctatttccagctcgttggcatacacatagtctataccgtacttcttctggaggtactgcccgaagtaggtaaaccctcccgaaagaatagctatcttgtaaccgtatttcttcaaaacatacatcaggcgatccacaccttccgtaatgggaagattctctgcaatctcctgcatcacggactcatccaatcctttcaacaaagccactcgttcgcgaaagctctcgatgaaatctatctcaccacgcatggcacgttcggtaatggccttcacctggtcgcccacacctgcacgtatggccaattcatcaatcacttccgtttcaatcagcgtagagtccatatcgaagcaaatgaggcggcgcatccggcggtacatattgtccaactggaaagagaaatccatttccagttcggttgccagtttcattaactgttcttgcatggcaatacggtctttcggagtgccacgaacggaaaattcgatgcaggcgcgtgtacgcgattcgcattcgtccagcgggatacgtcctgtaaggcgcttgatggcatcgatattcatgccttgctctgcaagaatacgggtaacggcagatatttgacgggcagacaacttacgccccaataaagtaagaatatagcggttctttccctgcatattcacccaatcctcgtactctttggtagtaatggggtagaaacggacagtcacgcccagggaggaagccttgaaaagcagttccttcataatgaaccccgagtgttgttcttccgtcttgcacaaaatgcccaacgaaagagtattgtgaatatctgcctggccaatatccagaatggtagcatcatatttcgccagaatttccgtcacggaagctgtcagtcccggacggtcttcacccgtaatacgtatcaggatgagttcagtgttcaatggttgcataagtcatctttttgatagaataataggctacaaaagtaaggaaaattcccgctatttatgctaaataacataaaaatatgcccctaaaaagtgagaaaaatgcttgtttatttggaagtttgtttaggaattacttacctttgcacccgatttcagaattaaaagctttgattatcagcatctttatcactattcaaggctttgacaagacgatgttccgggaagaaatcactgttgaaggacagtcccggatagtattaaccaaaaccgtgccgcatgaaatatgcaaaatggatttttgttgtattactaataagttccttgacttcttttgtagaaaaagacaaacctaccggaggtttgaatgtgggtgacatggccccggatttcaaaatccaaaccatgtcggcagagcaatcccaaaccgaactttcagacttgaaaggaaagtatgtgttgctcagtttttgggcaagttacgacgcgcagtcccggatgcagaacgcaagtttgagcaatgcgcttcgctctactgcccgcaacaatgtgaagatggtttcagtttcattcgatgagtatcagtcaatctttgaagaaaccatccgtaaggaccaaatagttacgcccacttgtttcgtggaaactaaaggcgaatattccggcctctttaagaagtatcgcttgggccgcggattcactaactatttactggatgataatggtgtaattattgccaaaaacatctctgctgcagaactttccgcttacttgaattaagcttgctgatgcccggtgcatacaacagcaacttaaagaacctgtaagacgaaagtgagggtgttccctagaaaccgacatctctttccggcaaaaaagggaacagaacaaaagaggaaaatgaatacaacaaaaagcccctcccgcacttgtacaacgcaagagtgggaggggcttcttattttaatgggcttccagagacaaacatcctaaacctctgctttagtacgccaaacctcaacttgagcaagctgaagtagaggtttagaatgcttatttcggcgctttcctatatagatagaatgcgatgaaggcatacattatattcggtatccatacagcgatgaccggaggcatgttgccgttcaccgcaaatgtggaagcaatggtctgaaatagaatataagagaaactcaatgccaagccgatacccaaatgcaatcccattccgcctttcgttttcttggaagacaaagacactccaatcagtgtcaggataaaggaggcaaacgacatggcaatgcgtttgtggtactcaatctcaaattccttaatgttggcaaagccgcgttgccgctgcctgctgatgtactcgctcagttgagggctggtcaacatctcctgctggttcttcataatcaggaagtcggcaggctccataaaaagggtagtgtctatgcggtcacccttcgtgatactctccttcatgccatccatctggcgaatcatataatccttgattttccacttatgcacggccgtcgtgtcgtaggtaatggaacgggccgtaaggtgggagaccagttgcttgtcattgaacttgtccaaagaaaagcgataaccggtcttgctgtagtcttcaaaacgttcgatataggcaattacccccgaatccacttccagctggatgttccgtgccgtattcgccttacggggtttgtagtacttgtcctcaaaattgatacgtgtcacactgcctttgggaatgacataggacccgaggcagaatgttactaccgcaatgattgctgcagacaccatgtaaggacgcaacatacgcttgaagctcattcccgtagagaacatggcaataatttccgagttctccgccagtttggaagtaaagaagattacggcgataaacacgaacagcggactgaacaagttggcaaagtaggggatgaagttcagataataatcaaagacaatagcattccacggcgcttcatgagacatgaagcggtccatcttctcgttgaagtcgaacaccaccgcaatggagataatcaatgcgatggcaaagacatatgtacccaggaacttcttaatgatgtaccagtccagccgcttcaggaatttacctctcggcagctttatattcttccatatcctccagttcatttttctcataatcttgtcgatacgcgtttcaccatcatcggtttccaggtagcaaagtcgcctgcaatgatatgcttacgtgcctcgcctgccagccacagatagaaagccaagttgtggatagatgctatctgcatggcaagcagctcttgtgcatggaacagatggcgcaagtatgccttgctgtacatggtatctacgtaggaggcaccgtctgcttcaatgggagagaaatccatttcccattttttgttgcgcatgttcatgatgccgtccttggtaaacaacatgccgttgcgtccgttgcgggtaggcatcacacagtcgaacatatcgacaccgcgttcaatgccctctagaatgtttaccggggtcccgactcccatcagatagcgaggcttgtctttgggaagaataccgttcaccagctcaatcatctcgtacatcttgtctacaggctcgcccacagccagaccgccaatggcattaccgtcagcacctttagaggcaacaaactctgccgactgctcgcggaggtcgcgatagacgcacccctgcacaatgggaaataaggattgctgataaccgtacttaggttctgtttcgttgaaacgcttgatacaacggtccagccagcgatgtgtcaatcccagtgattttttggcatattcgtagtccgaatcccccggaggacattcatcaaaggccatcatgatgtctgcaccgatagtccgttctatatccatcaccttctccggcgtaaagatatgcttgctaccatcgatgtgtgaacggaattccgcaccttcttcgcgcaacttgcggataccggacaacgagaatacctggaaaccgccgctgtctgtcagcataggacggtcaaagccgttgaacttatgcagtccaccggctttctctatcacttccagtcccggacgcagataaagatgataggtattacccaatattatctgcgcctttatgtcctctttcagctcgggcagatgcacgcctttcactgttcccactgtacctaccggcataaagataggtgtctcaatctgcccgtggtcagtagtaatcagtccggcacgtgcattggtcttgctgtctgtatattgtaactcgaatgtcattcctctttcttttcggtcttttctttctttacggacaagtcgatggcatcggctactttttcatcagtcagcgcaatggcaaacacttccttaatatctttcacatagtggaaagtcagtcctttcagatatatatcctgtatctcttctatattcttgcggttctcgtcactcaagataatctccttgataccggcacgcttggcagccagtatcttctccttgatgcctcctaccggaagtaccttaccgcgaagtgttatctctcccgtcatggcaagattggccttcacctttttctgggtgagggcagaagcgagggaggtagccatcgtgataccggcagacggaccgtctttcggaatggcgccttcgggcacatggacatggatgttccagttgtcaaaaatctcttcgtcaagattcagcagggaggcatgcgccttgatgtattccaatgccagcatggccgactctttcattacatcacccaaattgccggtcaatgtcaaacgtccacccttgccacggctcaggctggtttccacgaaaagtatttcaccacctacggcagtccacgccagaccggtcaccacccctgcatactcattaccctgatacttgtcccgggtatattcgggtgcacccaggaattcatacaagtctcccggttttatttcggtcttcgcaaaataaccgtccgtagcatattggcgtgcagatttacggagtatctttccgattttcttttccagttcgcgcacgccgctctcacgggtataattctctataatggcttccagtgtgttcttcggaatcttgatatcattctttttcataccgtttgcctccaattccttcggaaccagatggcggcgggcaatctcaatcttttcttccgtgatatagccgcttacctcaatcagctccatacggtccagcaacggtccggggatggtattcagattattggcagtagcgatgaacatcactttggacaaatcatagtccacatccagaaagttatcatggaatgtagtattctgttccgggtcgagcacttcgaggagggcagaggaggggtctccctggcggtcggcactcaccttgtctatttcatccagaataaataccggattggaggagcctgcctttatcagattcttgataatccgtcccggcatggcaccgatataggttttacgatgaccgcgaatctcagcttcatcatgcacgcctcccagcgacatacggatatacttacgcttcaaggcggcagcaatggaacgccccaaagaggtttttcccacacccggagggccatacagacagatgatgggggacttcatatcgcccttcagctttaatacagcaagatgttccagaatgcgttccttcaccttctccaaaccataatggtctttgttcagtgtcttttctgcattgacaaggctcagattatccgtcgtataaatgccccacggtaaactaagcatcgtctgcagatagttcagctgcacgctatagtcgggagactggggatgggtacgttccaacttatccacctctttcaggaacgtagccttcacctcatcattccatttgatggtctccgccttcttacgcatctcctctatttcctgctcttgaccgccgccacccagctcatcctgaatggttttaatctgctgctgcaggaaatactcacgctgctgctggtctatatcctcacgtgcacgcatctggatagactctttgatttcggcaagctgcacttcacgattcagaatctcaagcaggcggtaggtacgcgcccgcaaagagtcgatacggagcagttctatcttttcgtctttcttgagtggcaggttcgtacagataaagtctaccaaaaacattggattggtaatgttcttgatggcaaatgccgaatcctgcggaaacatatcggatgacttgatgtagcgtactgtcaagtctttacacgcctctaccaatgcatggaattccttgtcattcttctccggaagttcttcattcagcgtagctatccgtcccttcagataaggagtcgtatccgtaatctccttcagttccatacgtttggagccttgcagaatgactgtagttgtctggtctggcatttcaagcacacgtactatcttggcaactgtaccgatggtatgtaaatcctcaaacagaggtgtctctgtttcagccaccttttggcatacaacagctatataagaatttttcttttctgcttcacgcaccaatttgagggaagattttcttcctacagataccggcataaacaccccagggaacaataccatatttcggagaggcaatatcggtaaaacctcttctacctcaatgtccatcaattgttcttcattcccctcaaaatcagcaattacagagaaagcgtttccgcttctatcttcgacatcactcaggtaatttcttttcttcatttctttctttttagtttatgtcatattggcaggccaataaagcgcctgcaaagttaagctatttcttcataaataaacgttcttcaccctttaaaaagacaaaaacagtgccaattttatgacaaatatgcaggctttgattatttttgagcccaattaaagaagataaacatgccaaaatcatcttttaagtttaaacaatttaccatatttcatgataaatgcgccatgaaggtcggcacagatggtgtactacttggggcatgggccccggcagacaaagcaaagcgtatactggacgttggaaccggtaccggattaatagccttacagttagcgcaaaggaatccgcatgcccggattactgcaatcgagatagatgcggctgcagccggacaagccacagaaaatgtatctcactctccatgggccgatagagtagagatcatatgtcatgatttccgagattatcagccggaaaacagatttgacctcatcgtttccaatcctccctattttatagatgcgttgaaatgtcctgacgaacaaaggtgcacagcacggcatgcgggcaatttgaattacgatttactgtttcatcgttcggcatctttgcttgaagagcaaggagtcgtaagcatcattattccagcggaagctgaaaaaacggttgtggatacagcttggaaccataagttgtttccattgcatcgtgtgcaagtcttcaccaagcccggaaaaccgtgcagacgggtattgctgaactttggttttgaagcaaaagagtgtagagaagagaaactctgtattgaggtgaatcacaatgagtttacccctgaatatgtagctttaacgaaagatttctatctgaaaatgtaattttaattgcataaaacttgcctaaatgtttggttggtatcagaattgtttttacctttgcactcgcttttcagaagtaaagtattcggggtgtagcgcagtccggttagcgcacctgctttgggagcagggggtcgtgggttcgaatcccgctac

SEQ ID NO: 4437 - DNA, 24243 bp, Unknown
  gut microbiota DNA sequence
tgtgtctacctatatcaggataagacaaagaactccgttcctttcatactacacctggtttccattatctttgtcccccggacaaagactaaaatatcatggaacatccactttcgcaattcaaatattgtccgaaatgcggttcagcccatttcgaagttcataacgagaagtcgaagcagtgcgccgactgcggtttcgtctactacttcaacccctcttctgccaccgtcgccttgatactgaacgagcgcgacgagctgctggtgtgccgccgcgccaaagagcctgccaaagggacgttagacctccccggaggcttcatcgacatgaccgagaccagtgaggaaggcgttgcccgcgaagtaagagaagaaaccggcatgaaggtggcaaaggccgaatatctcttctccctacccaatatttacatctattccggcttccccgtacacacgctggatatgtttttccgttgtacggtggaggacaccttgcacttcgaggcgatggacgacgcggcagacctcttcttcctccccttaaaagatatccgtacggaagagttcggactcggctccatccgcaaaggagtgggtatcttcctggaagacatacggaagaacaaaagtgaatgattattcgttcctattatggtatatatcctaaaaaagccaaacaagtgtaacatttccgggttaaaacccgtatttttgtaaaacacctattttaacaaaagaagatgaaacataaaatctcccgaatattgtgcacagcactctgttgcgcacctttactcgcctcagcacaaacaagcgagaagagtacttctcccaagcgactctaccaggaaggacagacgttgttccaacaaaaggcatacgccgccgccatctccccgttgcaagcctatgtacgccagatgaatgcagacggcaagcctctgcccgataccggcgagcggcaagaagcggaatacatgctggtatgcgccgcatacgagctcagagaccccaaaagcatagacctgctccgcgccttcctggacgaatatcctgatactccccatgccaaccgcatctatgcattaatcgcctcctcctatttcttcgaaggcaattatgacgatgccctcgccatgttcaactctgcccgcctcgaccttctgggtaccgaggagcgtgacgacatgacctaccgccttgccacctgctatctgaagacgggcaatgtaaaggaagcagccatctggttcgagaccctgcgcagcaccagcaggaaatatgcagcggactgtgcttactacatctcttatatccgatatacccaaggacggtatgacgaagcgctcagcggtttcctgcctctgcaggacaatgccaagtacaagaacctggtcccctattacatcgccgaaatctacttgctgaagaaacagtacgacaaggcggaaattgtagcgcaaaatgccttgtcaacccaccccgacggtctgagctacacgcacacggcagagctgaaccgcatcctcggtacagccgaataccatttcgggaaataccacgaagccataaagtccttcgagcaatacctggagcacaatgccgaatctgccactcatagaagagatgccctctacatgctgggtatgtcctattatcaatgcggcgtgtattctcaagttcctgccatccttggcgaagtgactaccgagaacgacgctctctcccaaaatgcctacctgcacatgggactggcttacctgcaactggccgacaagaccaaggcacgtatggccttcgagcaggctgccgcttccaatgccgacccgagaatcaaggaacaagccgcctataactacgccttatgcattcacgagacctcctattccgctttcggcgaatcggtgaccgtctttgagaaattcctgaacgaatttccaaactctccttatgccgagaaagtcagcaactacctggtggaagtatacatgaatacacgcagctatgatgccgcactcaagtccatcgaccgtatctcccatcccagcaaagccattctggaagccaaacaaaagattcttttccaactcgggacccagtcttttgccaacacgcagttcgaacaagccatcggttacttcaaccaaagcgtcacgttggggcaatacaacctccagaccaaggcagacgccctctactggctcggcgagtcttattaccgcctgaaccggatgagagaagctgcctgcaatttcaacgaatatctgtcactcacccggcagagggatacggagatgttcgcccttgcctactataacctgggctacatcgctttccaccagaaagactattcgacggcagagaaccgtttccgcaactttgtccaactggagaaaggtgaaaacccgaccgcattggcagatgcctacaaccgtatcggtgactgcaacctgcacgtccgccgcttcgacgaggccaagcaatactatacaaaagcagaaagtctgggaacacctgccggagactactcttactatcagctggcccttgtagccggcctgcaaaaagactattccggaaaggttactttactggaccgtcttgccgtcaaatatcccaattcgccttatgccatcaatgccctttacgaaaaagggcgctcctacgtacagagcaacaacaacccccaagctatcgccgccttccgcgaattgctcggcaagtatcccgagagtcccgtcagccgtaaagccgctgccgaaatcggtctgctttactaccagaacgatgactatgaccgtgccatagaagcctacaagcatgtggtcacccaatatcccggaagcgaggaagcccgccttgccatgcgcgacttgaagtccatctatgtagatgccaaccgcgtggacgagtttgccgccctcgccgcccagatgccgggcgaaatccgcttcgaacccagtgagcaagactcgctgacttacatcgctgccgaaaagatatacatgaaaggcgagtccgcacctgccaaagagagcttcacccgctatctgcaaagtttcccgggaggcgctttcagcctgaatgcgcactactatctctgcgtcataggcaaagagcagaaagatgacgaggcggtattggaacatgccggaaaactgctggaataccccgataacccatattctgaagaggctttgctgatgcatggagaaattctgttcaaccgccagcaatatgccctggcattggccgactacaagaaattgcaggccaaagccaccacggcagagcgccgccagcttggcgctatcggtgtactgcgctgtggagcactgatgcatgatgatgcggaagtcatcaacgccgccacagccttgcttgccgaagccaagctgtctccggagctccggaacgaggcgttgtactaccgtgccaaggcatacctcaaccagaaagccgacaagaaggcaatggatgaccttcagctgctggccaaagacacccgtaccctttatggagccgaagccaaatatctggtggcattacaatggtacaacgccggtaattatgcctctgcagaaaaggaaatccttaatttcatcgaccaaagcacaccgcatgcctactggctggcacgcagtttcatccttctgtctgatgtatatgtagccatggacaagaagctcgatgcacgccaatacctattgagcctgcagcagaactaccaggccgatgacgatatagcaagcatgattaacgaaagactggagaaattgaagtaagaaatatagcacattatgaaaaagatacaatatatcctcgcaggaactatgcttgtctccctctctttgggagcacaagcccagacacaaccccaagacaccaccatgaaccgtacggtagtcgtggaacaagaatataatccggacatcatggatgcctccaaagtgaacgtgcttcccaaggtggaacctcctaccgtcagcaaaaaggcggtggaatatgacgccaccctgatgccggcaacccatatcccggcaggtatcatgcaagcctataccggaaaagagacgcaggcgaaagcgctgcccggatatgtacgcttgggatacggtaactacggtaacctcgatgtacgcgccaactacctcttctctttatcccccaaagaccgcctcaacctgacattcacaatggatggcatggatggcaaactggacttgccggataatggcgggaagtggaattcattctactaccgtacccatgctgccatggattatgtacatgccttcagcaaagtcgatttgaatattgccggaaagttcaaccaaagcaatttcaacttcctgcccgacttcgtcagcaacaaacagaaattcgtttcgggtgatgtacatttcggggtaagttccacgagcgacgatatgcctctccaattccgtgccgaaaccaatttgttggtctaccagcgccaacacgacctcatggtgagcaatatcaaagaaaatatcgtgcgtaccaaagccgatgtcaccggttccatctccgatgagcagaccatcggcatggcttttgccatggacaatacattctacagcgacggacgtttcgagaatcacaccgacgtagacttcaatccatactatctctttcagaatgacgactggaaaatacgtctcggcgcacacgtcgacctggctttcggtttcggcaagaagttccgcgccgctcccgacgtagaaatacaatacatcttctcggacagctacatcctctacgcacaaggtaagggaggacggctacagaacgatttccgccgtctggaaaccattacgccttatggcattacaaaccagcagcttgacaatacctacgaacagctcaacgcagccgtcggcttcaaggcaagcccggtcagcggattgtggttcaacctatacggcgggtatcaagatttgaaaaacgacctgattgacactccgactgtcaagtccgacgggataagcaatgttttcctcacagaagacaccaagaacctctacgccggagccgacctgagctacaactacaaggatgttttctatctcgccgccaatgccgtctatcgccattggacaacggactcagacggttctgatgtcgtagtaagtttcaaaccggccgtagaaggcaatctcaatctcaaggtacgccccatctccccactgcttgtcggcatcggctatcagcacatctcacgccaaggcgtggagggcaacaaggcggaccccgtcagcaatctctatctgaacggcagctacgaactcttcaaaggtatctccgtgtatgcgcgcgtgaacaacttgctgaacaaagattaccagtactactggggatacccttcagaaggtctcagtttcttaggcggagtaagcttcctcttttaatagaggcagcacaagccgaagctctaatttgaacaaaaaaggtcatttttgctaaattctccttatattataaggtgggaagaatctttttttcctacttttgcgggcgaattcagtggcgggagtcactaaaaaacagaaatttatgcagaaaaaccttgtcatagtcgagtctccggcgaaagcaaaaaccatcgagaaattccttggaaaagatttcaaagtcctttccagctacggccatatacgtgatttgaagaaaaaagaattcagtattgacgtagacaaagacttcaaaccgcattacgagataccggcggataaaaagaaactcgtaacccagctgaaagaagaagccgagcaggcagaaaccgtatggctggcttccgatgaggaccgcgaaggggaagccatcgcatggcacttgtacgaagtgctgaaactgaaaccggaacacaccagacgtatcgtcttccatgaaatcaccaaaggtgccatcctgaaagcgatagaaaatccccgtgacattgacatcaacctggtcgatgcccagcaagcccgacgtatcctggaccgtatcgtaggttttgaactttcaccggtattgtggaagaaagtgaaacctgccctttctgcaggccgtgtacagtccgtagccgtccgtctcattgtagagcgcgaacgcgagatacatgcattccaaaccgaagcatcctaccgtgttaccgccgtattcctcgttccggacactgacggcaaaacagtggaaatgaaagccgaactggcgcaccggctcaagacaaaggcagaagctcggaaattgctggagagctgtaaagcagctacgtttaccatcagcgacatcactacccgtccgctgaagaaaactcccgccgccccgttcaccacctctaccttgcagcaggaggctgcccgcaaactgggattcaccgtggcacagaccatgatggtggcgcaacgtctgtacgaatccggattgataacctacatgcgtaccgactccgtcaacctttccgaacttgccgtcaacgccagccgtgaaaccatctccaacctgatgggcgaacgttacgtacacaaccgccacttcgccaccaagaccaaaggagcgcaagaagcccacgaagctatccgccccacctatatggagaatgccaagatagaaggtaccccgcaggaaagaaagctgtacgacctcatctggaaacgtaccatcgcctcgcagatggcagatgccgaagtggaaaagacaaccgtaaccattgctatcagcaacgagacggagactttcactgcaaccggcgaagtggtgaaattcgacggtttcctccgtgtctaccgcgaatcatacgatgatgacgtagaaacccaggaagatgaggcacgcctactgccccctctgaaaaaaggacagaagctcgaacatgaaggtatcaccgctaccgaacgtttcacccaacaccctccccgctacacggaagcaagccttgtgcgcaaattggaggaactgggtatcggacgtccgtctacctatgctcctaccatttccaccatccagcaacgtgaatacgtgataaaaggagaaaaagctggtgaagaacgcacctacaatgtgcttaacctgcagggtaatgaaataacggacaacaaccatacagaaatcaccggagctgaaaagtcaaaactgatgccgacagacaccggtattgtggtcaatgacttcctgatagagtacttcccggacatccttgactacaacttcactgcgagcgtcgaaaagcaattcgacgaaatagccgaaggtgacaagcaatggaccgccattctgaaaacattctataaaaaattccatccttcagtagaaaacacgcttgccgcgaaaaccgcccacaaggcaggcgaacggattctgggaacagaccccgtcagcggaaagcaagtgtctgtaaaaatcggacgtttcggcccagtagcacagataggtactgccgaagatgaggaaaagccccgtttcgctcaggtgaaaaaagaaatgtccatcgagaccattacgctggaagaagcgctggagctgttcaaacttccccgtactctcggaaagtacgaaggtaagaatgtagtcgtaggtgcgggacgtttcggaccttatatccagaacaacggcttgtatgcctcgttacccaagacaatggacccaatgactgttacgctggaagaagctattgaacttttgcaaaagaaacaagaagcagaagcccagaaacatatcaagaagtttgaggaagaaccggaactggaaatcctgaatggacgctatggcccttacatcgcttataaaggcagcaactacaagattcctaaagacatcatccctcaagacctgaaccttcaagcttgtctggaaattgtgaaactgcaaagcgacaaggatacgggcaagtctaagcggactgcaaaggcggtgaaagcaacgaaaacgactaaaacaaccgccaaggcaactgccaaaacaagcaagacaaaataggacttagtctacacgtataaaatgggagaaaggagacgataatttaaacttctattatttataccacaagaataaatattgcactataaaagaataagcccgaagaagtatcttcgggcttattcttttatagtgcgatgtttacatcctatccggcacctcaatacccagcaatcccatacctaagcgtaccaccttggctacattctcggacaatgcaaggcggaataccttcactgcttcgttctcctcacgcaaaatgctgaagtcatggtagaactggttatattccttcacaaggtcatacgtatagtttgcaatgatggacggactgtaatcctcacctgcctgcttcacaatagcggcaaagtcggcaaccatctgtatcagtccctcttccttctcactcagttcaatgccggcaggtaactgggcagggatttcgataccggcctcttttgccttgcggagaacagactggatacgtgcataagtatattggatgaacggccccgtattaccattaaagtcgatggactcttttggattgaatgtcatgttcttgcgggcatccactttcaggatgaagtactttaaggcacccagaccaacgatacgggcgatattgtctgcctcttcctttgtcagaccatccagcttacccagttcattgctggtttccttggctgtatcaatcatctccgccatcaggtcgtcagcatcaactactgtaccttcgcggctcttcatcttgccctcgggaagttccaccataccgtaagagaagtgcaccaaccctttaccccattcgaagcccagtttgtcgagcaggatggacaatacctggaaatggtaattctgttcgttgcctaccacataaatcatcttgtcgatgggataatctgcaaagcggagtttggcagtacctatatcctgcgtcatgtagacggatgtaccgtccgcacgcaacagcagcttgtggtccaacccctcacccgtgaggtctgcccatacagagccatcttctttccggtagaagaagcctttctccaggccctccattaccttctccttaccttcgaggtacgtgtttgattcgtaatatatcttatcaaaagttacacccatcatacggtaagtctcgtcaaaacctgcatacacccagtcgttcatcttcttccagagcgcacgtacttccgggtcattggcctcccactttaccagcatttcacgagcctccttcatcaaaggagattcagcttccgccttggctttggcttcttcctcattcatgccttcgctttggaacttggccatcagttctttcacttccgctttataatgcttgtcgaaggaaacatagtaatcgccaatcaagtggtctcccttcttgccggatgattcgggagtttcaccattcccgtacttctgccatgccaacatggacttgcagatatgaattccacggtcattgacaatatttgtctttactaccttattaccgttggcagccactatattagccagcgcatttcccaaaagattattgcgtacatgacccaaatgaagcggtttgttggtgttaggagaagaatactcaatcatcaccaatggagagttgtcagtagcagccatgataccgtactgcttgtccgcatgaatgccattcaacaattctatccacgcagaggaggcaatggtcaggttcaggaagcccttgatgacattaaatgctgcaaccgaaggctcgtttgcctgcaagtattcaccgatttcctgggccgtctgctccggtcctttcttggacatacggaggaaagggaatacaaccagcgtgaggtgtccctcaaattctttcttggttttctgcaactgcacttgtgcggcaggaacatcctgtccgtaaagcgctttcagtccgccgatgacggacgataccagtttctgttctatattcatgattcaaatgtattttcctgcgtgcaaagatagcgtaaaccgaaatcagtacaaaacaagcaggcttgtttttatggcctcacaagatattcaacatacaaagaggggacgctctttgtaaaacgtcccctctttgtatgttgagtatactgttcttattcagctgtcaattccgtacctggtttgaatttaacaactttctttgcagcaatctcgataggctttttagtagaggggttgatacccatacgcgctcctctttccaccacactgaaagttccaaaaccaaccaatgatactttatcaccggccttcattgccttagtgactgacgcgataaatgcatccaatgctttctttgaatcagtctttgacaaaccagactccgctgccatagcgctaataagttccgccttattcataatgcttaaaattaattaatatgttacacaaaagatatttttacttttcatcacaaacctccacaaaaatagagcaatatttctgaatatcaaataaaaacattaaaaaaatattggaaaacaacgaaaaagaaggaatagaatctgctttttctgttatagaacagaatttattcgtatttttgccggagaaagcaaaaacagacaactgtttttgaactgtaaaatgaattgaaacaacagattatgaatactatacctactgtaaccaaaaaccttttaatcattaatgtgctgatgtttttgggcaccattgtcgcccaaagctacggcatcgacctcgcccaatatctgggattgcattttttccttgccgaagatttcaatgcagcacaattgataacatatatgttcatgcacgccggattcgcgcacatatttttcaacatgtttgctgtatggatgttcggacgtattttagagcaggtatgggggccaaaacgatttctgttctactatctggtgtgcggtataggagccggaattatccaggaggtggtacagtatattcattatgagacagtactttccgcctatgacagcgtaaatactggcatggccatcatcccgatggaggaatatctcaatatgatgactaccgtgggagcttcgggagcagtatacgccattctgctggcattcggcatgttgttccccaaccagcaaatgttcatcttcccgttaccggttcccatcaaggccaaatattttgttatcggatatgccttgattgaactttatgccggatttgcaaacagtgcaggagacaatgtggctcacttcgcacatctgggtggtatggtattcggctttatcctgattatgtactggagaaaaaagaacagaggaaatggctactattataactgatttgaaagaaaccttccgtagggggaacatttatatccaactgatttacatcaatgtagcggtattcatacttactacgctaaccgaagtcatgttccagttgttcaaccggagcatagcaggcgtattcgaatggttggaactgccggcatcagtcatacgcttcatcctgcaaccatggtcactactgacatatatgttcatgcatgcaggattcatgcacattcttttcaatatgctgtggctttactggttcggtgcactgttcctgagtttcttctctgcaaagcatctccggggtgtatacattctgggaggaatttgcggcggtctgctctatatggccgcctataacattttcccgtatttccgtcccatgacagactattctttcatgctgggtgcttctgcctctgtacttgccattgtagccgccaccgcctatcgcgagcccaactatccgatacggctactgctgttcggaaccatccggctgaaatacctggcactcatcgttataggcaccgatttactgttcatcacctccagcaatgccggtggacacatcgcacatttaggaggtgcgctggcaggggtatggtttgccgccagcctcagcaaaggtagtgacctgacctcatggataaacaaatgtctggataccttagtttccatcgtcaacttcaaacccagaaagccgaaaatgaaagtacactacggtactggcaaacaaaaagattatgattacaacgcacggaaaaaagcccaatccgacgagatagaccgcattctcgacaaattaaagaaatcgggatacgaaagccttactacagaggaaaagaaaagcttgttcgacgcgagtaaacgttaaaccaatggaaaatggaaaacggaaaatgaaaaatgagaatataaccgccactcttattttcagttttcacctttcaattttcaactattataatgaagcatctcggtaattttgtcgctctcctgattttagcggtcaatgccttatttacgggcctattactgttcaccgcctatagtccgcacatccagccggtcacacatccggtgcaatcgtgcctggggctgacatttcccgtgttcctgatgataaatgccggcttcctcattttttggctggtcatccagcgctataggtcggctttgctgcccctaatagggatgttgctctgctattcgcagatacgcacctatctgcccatcaacttccatacagaccacttaccggaaacaagtatcaaactgctctcctacaacattatgggatttgacggtgccgccaaacaagatggcaaaaacccgatattgacctatttgaaggaaagtggcgccgatatcctctgtctgcaggaatattccacagtacaatcctcaaagcatctttcgcaaaaagacgtagagcgggaactcaaggcatatccataccaccgcatcaacacagtgggtagcggaaagggacataccaacaagatagcatgttactctaaatttccgattctctcgtcacgcatattggattatcccagcgaatacaacggttcggtactctatgaaatcaagattggggaagacacggttaccctcatcaacaatcatctggagtccaacaagctgaccaaagcagataaagtcgtgtacgaagacatgctgaaatctcccgaaaaggaaaaagtgaaaagcggcgcacgcctgctcatacgcaagctggcagaagcatcggccatccgtgccccgcaggctgacactattgcacatgaaatagccgcttcaccgcatccttacattattgtatgcggcgatttcaacgatacccccatctcctatacccaccgcaccatcgcccaggatttggacgacgcattcacccaatcaggacgggggctgggcatctcctacaaccagaacagattctatttccggatagacaacatactgacaagcaagaacctgagagcctacaattgtacagtagaccgctccatcaaagagtcagaccactatccgatatggtgctatatcactaagagatattgaaaattaatacttaaacatttaatacttagaaaacaatgttcaaaaaatgtattctaattttagcagcaagttgtatgatgtactcctgtgccacccagacggaaagcaatccgttccttactgagtttcaaacacccaatggcgtgcctccattcgataaaatcaagttggagcactatgaacccgcattccagaaaggtatagaagagcagaacgccaatatccaagccatcattgacaatacggaagcccctactttcgaaaatgtcattgttgccctcgacaacagctctcccaccctggaccgtgtaggcggtgtatttttcaacctgacggaggccgaaactaccgatgaactgacagccctttccatgaaactggctccgacattggccgaacacgaagacaacatctccctcaaccaggagcttttcaagaaagtggatgctgtctacagccagaaagatgctctcggcctgacccgcgaacaacaaaggctgctggaaaaaacccataagaaatttatccgttccggtgccaatcttccggccgacaaacaagcccgtctgcgtgaaatcaacaagcagctttccacacttggaatcacgttcagcaacaacatcctgaacgaaaacaacgacttcaagctttatgtaggaaaagaggaggacctcgccggacttccccaatggttccgcgaaagcgccatggctgaagcccgtgccaccggacaggaaggcaaatggctgtttaccctccataatgcaagccgcctgcctttcctccaatactccgccaaccggccgctacgcgaacagatgtacaaggcctacatcaaccgcggcaataacaatgacaagaacgacaacaagaaaatcattgccgacatcgtacgcctgagacttgaaaaggcgcaactgctgggtttcgactgttactccaactttgtattggacaatacaatggcaaagaattccaccgccgtgatggacttcctcaacaacttgtggagttatgcactccccaaagcaaaagccgaagcagccgaactgcaaaagctgatggacaaggaaggcaaaggagagaaactggaagcatgggattggtggtactacaccgaaaaactccgtaaggagaaatataacctcgaagaagaagagattaagccctacttcaaactggaaaacgtacgtgaaggcgcctttaccgttgccaataagctctatggcatcacgctgacaaagctcgaaggtatccccgtctatcatcccgatgtagaagtgtttgaagtgaaagccgcagacggctcacaagtaggtatcttctatgtagattacttcccccgtcccggcaaaagcggtggtgcctggatgagcaattaccgcgaacaacaaggcagcatacgtccattggtatgcaacgtatgcagcttcaccaagcccgtaggcgacactccttccctgctgactatcgacgaagtggaaactttgttccatgaattcggccatgccctgcacggattattgacccaatgccagtataaaggtacttcaggcaccaatgtcgtacgcgacttcgtggaactcccctctcaaatcaacgagcattgggctaccgaacccgaagtgttgaaaatgtatgccaagcattacaagaccggcgaagtcattcccgacagcctgattgaaaagatactgaaccagaaaacattcaaccagggtttcatgactaccgaattgctggccgccgccatcctcgacatgaacctgcataacctgactgataccgaaggtcttgatgtcgttgcatacgaaaaagaagcgatggaccaactggggctgattccggaaatagctccccgctaccgtaccacatacttcaaccacatcatcggcggttatgctgcaggctactacagctatctctgggccaatgttctggacaacgatgccttcgaagctttcaaggaacacggtatcttcgacaagcagacagccgacctcttccgccagaatgttctggaaaaaggagacagcgaagacccgatgactctctataaaaacttcagaggaactgagcctcaattagacccgatgttaaaaaatcgcggtatgaagtaagatttgtgaaaaaaaagctatatttgcagccttgtatgcaacagaatttaattaaaaagtaatcataataaactaaaagtaacatgcaaaacaaaggatttgtaagggtttttgcgatattgctcacactggtgtgtgtgttctatctctccttctcttttgtaactcgccattacacaaataaggccaaagagtttgcaaaaggcgatgtgaaagtagagcaggactacctcgattctctggctaatgagaaagtgtatttcggcaattggacgctgaaacaatgtcgtgagatggaagtcagtttaggtttggacttgaagggtggtatgaacgtcatccttgaagtttccgtacccgatgtcatcaaagtattggctgacaacaagactgacgaagcattcaaccaagcattggccactgccgccaagcaagctaccacaagccaggatgacgtgatcaccctattcgtcagagagtatcacaagcttgctccgggtgctcctctttcacaactgttcgcaacccaacaattaaaagacaaggtaactcagaaatctaccgacgcggaagttgagaaagtattgcgcgaagaagtaaaggcagctgttgacaactcctacaatgtacttcgtacccgtatcgaccgtttcggtgtagttcagcccaatatccagagtctggaagacaaaatgggccgtatcatggtagaacttccgggtatcaaagaacctgaacgtgtaagaaaattattacaaggttccgccaatctggaattctgggaaacatacacagcaaaagacgttactccctatctgcaagctgccgacaccaagttgcgtgccatcgttgcaagcgaaactccggcagaagaggcagacagcgcagctaccgaagctcctgccgtagcccaagctaccagcacagccgacagtcttgccgctgctttaaagggtgaaaacaagacacaaaccgctgaccttgcacaaataaagaaagaacacccgctgttcgcaatcttgcaagtcaaccccagcggacaaggtcctgttgtagcctatgccaactacaaggatacagctgaaatcaacagatacctttccatgccggaagttcaagccgaaatgccgaaagacttgcgtctgaaatggggagtatctccttatgaatatgatccgaaagctcagactttcgaactttatgccatccgttctacagaacgtaacggcaaggcgcctctggaaggtgatgtagtggttagcgccaaagacgaatacgaccattacggtaaacctgccgtaagtatgtccatgaacactgacggtgcacgccgttgggctcagctcaccaagcagaatatcggcaagagcatcgctatcgtgctggacggttacgtttactccgcaccgaacgtaaacaatgaaatcactggtggtaactcacagattaccggtcactttactccggaacaagcaaaagacttggcaaacgtattgagatcaggtaagatgccggctcccgcacatatcgtacaagaagacatcgttggtccttcactgggacaagcttccatcaatgccggtatcatgtcattcatcgtagcattgattctgctgatggtttacatgtgctccatgtacggattcattccgggtatggtggccaacggcgctctggtgctgaacttgttcttcacgttgggtatcctttcttctttccaggcagcattgacgatgtccggtattgccggtatggtgttggcgctgggtatggctgtggatgccaacgtattgatttacgagcgtaccaaagaagaactccgtgcaggcaagggtgtgaagaaagcattggctgacggttactccaacgccttctctgctatcttcgactccaacttgacgtctatcatcaccggtatcatcctgttcaacttcggtacaggtcctatccgcggttttgccactacactgattatcggtatcttgatttcgttctttactgccgtgttcatgacacgtctgttctatgattatttcatgggcaaagacaaattgctgaacctgacattctcttccaagatttccaagaacctaatggcgaacgtacacttcgacttcatgggcagaaacaagctgtggttgaccatcaccggagctgccgtagttgtatgcatcgctttcctcgctacccgtggactgagccagagcatcgacttcaccggtggacgtaacttcaaggtacagtttgagaacaaagtggaaccggaacagattcgtgaacttatctccagcaagttcggcgatgccaatgtcagcgttatcgctatcggtacagacggcaagactgtacgtatcagcacgaactaccgcattgaagaagaaggtaacaacatcgactctgaaatcgaagcatatctgtatgagactctgaagccggtattgactcagaacatcactttggaaaccttcatcgaccgcgaaaaccatacgggcggaagtatcatcagttcccagaaggtaggtccgagtatcgcagacgacatcaaggtttcagccatctggtctgttgtacttgcattgattgccatcggtatctatatcctgatccgtttccgcaatattgcatacagtatcggttcagtagccgcactggcgtgtgacaccaccatcatcctgggtgcctactccatctgttggggctggatgccgttctctctggaaatcgaccagacctttatcggcgccatcctgacagctatcggttactctatcaacgacaaggtggtaatcttcgaccgtgtacgtgaattcttcggtctctatccgaagcgtaacaagttccagttgttcaatgactcattgaatacaactttggcacgcaccatcaatacttcactgagtaccttgattgtattgctgtgtatcttcatcctcggtggtgactctatccgcagcttcgcattcgccatgattctgggtgttgtattcggtacaatgtcttctctgttcgttgcatctcctatcgcttacatactgataaaaggcaaaaagagcagtgaacttaatgaagtttcagaataaaaggattttactataataatatccctaattaaggggctattcgaaaatagatagccccttaattagggatattcagtaaatgtcataaaaaagtaagatggcatatgcagatgatttgctcctaccatctcatatgccattttattgtattttctctctctgagctaaaatcttatccgtttggaagaagcctaacaacttcctctataggatttctgttttcctgttccgtactttaattttcgatagtgagtaatactgtttttgtgtaccgaaacggccttcgagcctggtggctttgaaaattctataaacagaagttacttaacacctattcaatacaagcgatgatattcaattctaaaacttgaagcataattgtaaacttcagcatggccaagcgaagggttacatttgccaagttgagattgataggccccggtacctttcactgaaaagatctcttaatcaagcttcatatcagaatgagaaacacgagacctaaacaatgccagctaggcataaaactgattggtcatttcgactcctccttgtgattaagccatcagacaaacgttacttatgaacatttttaagtgttttcccagggacatcatgcagtttcgggcgacttggacgtacgttatagatgttcatccatttctcaagaatatcgcgtaattcttgcagtttctggccatatgagttttccattatcaggtttctcatttcccctctgtcattttgcatatcaaacagctgttcgcgatatcttcctttatcgtaaagcacatatttataacgttcgctacgtactacccagcccctcgtcttgctaccgtcaaaccgtgtttcggtgatgatatattcttgatgtaaagcttgcggatttccttcctctgcaattttccggaaagactttcctgctgctcccttcggcattttggcacctgcccagtcacacacggaggcaaagaaatctacaccgttactaataagctggggtaacactttgcctgcattcttcttgcctggcagcgttacaataagagggatattgataatctcctcatataaagcagacttctggttccaacgatgggcacctataccatcgccgtgatcgctggaaaagattaccactgtattttcccaaagattattccgatcgatggcatcaataatctttcctatttctctatctactttttctaccaagcgataataagtatatcggtacatacgccagtcttcgggggtaaaaccagcggttggatatacattgtagttattgattctttcactttcaatgacgtcagcatcatacgggtttttggcaaaattggcaggcaatcccggacaatcccgtatatcaggtatatcaatatttccataagggaagttctgacgacgtgcatattcgcagatattatgtgggttgtcataggaagccaccaaaaaaaacggctttttatgtttgcgcgagagatattcggcacaagcttctgccagcccatcatcactatgtttatatatattgtcgaagccatattctttgtctggaacttcgagtaaaggaagatgccatttaccgccataggcacaatcataaccggcattctttattaaagtgcccagtgtttgtgccttaagagagtcgggcatcggtgatccgttgacagacagccctactgcatccggatagtaccctgtaaacatagctccacgtgaggggccactgagtggagctgtacaataagcgttattaaatagtataccggccgctgccaaacggtcaaggttgggagtgtgcagatccggatttccggcacagctcatggcgctggccgtttgctgatcggtgaagatgtagatgatgttaggacgttcgatggcagaagccatagaagagcataacaacgaaaaacaagccaaatacttcattgaattttcttttaccatattatttcaataattcaattttgttttaaagtgatatcatatttcaagttccggtaaggcatcaaccagccttttttctactttctttccgtctacccgatctatgatggtcgtagcacctttgtttgagtcataattgaagtccagcgaaacaccgttctgtttattctctatatacaagaacgcattaccttcaccttccagattacattcgataacccattcttctactgttatgcggttcctttcacgattaattacagcatcggcacggttgtttccatgtacatcaatcacattgagaaaacagattttgctgcaagaagctgtcgttgctgtaaaatgataatgattggagagagttttgccaagtcgttttttccaatcaacagcagccacaaaaaaggtgtctgtttgcgcataagtcattttctgtgaggagaacagatgagctatagatactccgtctgccttgttctttcctaagatgcgcaatccgtctttctcttcagcgacttccatgggcagttctaccgtatgcagcagataattccattctaccggttctttaccaaccagttcgtcataaacaacgaacaaacccgaacgtcccagctgaacaatatgtcttcgaaaaaaatccagtttattctcatcccaacctttctccggtgtatactgagtaccagacaagcgcccacgttccagccacaacggagaaaccacttttccataagcgttagaagcatcacctacaacgtaggagatttcttctccttcataatagcgaggaatccatccataaccttccgttccaatcttttgtcccataccattcaccaatatggaattatgggcgcgagtattccgataagcatacatgcaatggtcatctgtaaagccggtacgatgtccactgctatagaaaattgcctttccaccaaagaaagtattgaaggcgttttgattagctaaagcatgggaagtggcaccataggggctgctacggaaagagagcatggcattgttggtgtgatgtcctatgtctgtgttcatcagtgcagtgcctgtctggctgaaaactttggactgaggcagctccaacagcttgctactataagcaggcctctccttttttgtcgtacaacgataccaggtcaagtccgccggtttggcttcaaaagctttcgacagaatatcagggtcttcctgcataatttcgtgtacataagctgccgcccacggattgttacattcgcgtgccagcgcatctgcatatcctacgcgacctccattcggagtgcgctgtccctcatgcgaattgccatgtcctccggatttggaaaagggaggttgctggtaaatgacatataaagcattgttgttataccacggatcggcaaagaaattgaaaccggatatacgggagaaaaaggccggtacctctatcagcgtgcgtatatttacatgaaaatatgaatctccattatgccaagcaccatccttattcagtcccggaagacgggagatccattcattatagcaataatctgcccacacggatgcttccggaatctcaccaactgtggcaaaggccgccattgtaagaatgcggaaagtcatttgccatacatgattgtctgcaatacggttctccagatgattaacgtattcattatagaatttattcccgatattccggatattatctaataataactgtttttctgacggagacaacaggttgtagaacccgtcgtacgccgatgtgctcatagagagcaaagtggatagattgaagtcacctgcaaagtatttgcttgtttgccaggaaaggatttcactcaaccggttgatgccttcacgataatacttcttgtctttcgtcagcagataggcgcgtaccaatgcttccacattggcttcttctctatccacaatcttacggctctcgcggataagggctgactcacgctgtactacattggttaatgtaactacatttgttgtatctatctcttcctgaagatgcttcaacggatgagaaatgcaccgggaagctttgtccatataggcctgagcttccggattatttttattcttcgttataatttcctcccaatcatccgcatccaataatacgcgtgggtggtgagacgtatattttgccaagactttctccaatgtgggcggattaaattccggtgtatctttacctatatggaattgataaaccggtgaccattcttctttacctccaggagtgacgtaagcatattgccagtaccattttccctgagccaggcactggaaaggattgaaaaaagcccaggcgcgttccccaatcaacacttccttttgaaagttcttgtcctgagaaatacgaatccgatagactactttcggtttttcatccacttgtcccggaactccatccaataccggacctaaatgcgggaatttatccggccacataaagcgcggcggattcatcttaacgcaagcaccattcgcaggagagggagttgcacgaacttcgtgcatcaatgtctcgtcggaaactgttatgacagcagattgctcggaactgccacatgccatcaataggcaaaaggcgggtaagcctaataatatctttctcatttcagtattttatttttgtttttgaaaccaaccagttctttcaggctgactgtcttattgttgaccagtggatgtgcccaaaaaccgataaacgtaatatatcccatgaaaaccaagataaggagcattcctatgcgtaatgaagtggtatcggatagcagactgacaaacagcggacctcctgcgcctcccacaattccggagcaaagaataccggcaaaagaaccgtgattctgggctactgtgttcagagccagtgaaaatacgatggagtacatcattgaaatgcagaaaccgattgccggaaatgcacataccgcaacttttgcagaaccgaacaatgcgatcaagagtaaactcatggaaagcagtcctgatatttgtaggagacgtttactgtctatcagcttcagcaagaacataccaaataggcaaccgacggtcatcgaaccccagaaataactgatactttgtgcaccgacagtttttggatcaatgccatgatactgttccaagaaggtactcataaaaatagagacaccctgttctgtactgacataacagaagattcccaaaaagaaaagccatacgtatttttgacggaacaattttttataggaagaggaggaaccactgcgttcatcatctttcaattcaatgcgcggaaaatgaacgaatgacacaacgagcagcatagccaacaacagtgctgtaaatacccaatacagagaaacccagggaagagtaaccggagtaacttttgccagaatatccagcaaaaagttctgtccctgctgataaacttccggttccagtgcatgtatcagccaagtgtaaaccaagggactgataaaagaggctactccgaatacaaactgtgccaactctgctataaacgcataattctcctctccgccgacaacacgttgcaaagggttgattacagtttgcaacatggccattcccaaaccaatgatgaaagaagacagaagcagtatcaggtaaaaagggaaacatgcaaacaaggtagtacctataaatggcattaggaagccggtaaatagcaccggcttttctccat

SEQ ID NO: 4438 - DNA, 56335 bp, Unknown
  gut microbiota DNA sequence
acattccaagaaccgtctactgatatcggttataaaaagaaaaagcgtctagctaaatcaggaaaagacagcagattatatttaccggatgtttaccctataatgtaaaagccgttactccagaatgtaacggcttttacattatgaagtaacgacgtttaccatagtatgtaaaggcgtttactgtagtatgtaaaggtgtttactgtagtacgtaaacggagtttcttaaggcggtaagcatttcaacctctacttgcgccttcttctccctatttatccctccttaaactccagtatatcccccggctggcaatcaagttccttacagattgcttccagtgtagagaaacggatggccttagcctttccggttttgagaatagagagattggcaggcgtaatatcaatcttctccgccagttcgcccaaagatatctttcttcgggccatcattatgtcaaggtttactataatcatataattgtgttctatttatcaattattcttttcccactcacaccaccagtcagtgtaccgtttcgtcaaccggtaataaccatatatgcacagatacatccacggcattacaatatagactttccacttcccgtcaaaggccggaaacaagaggagaaaatagacaatacttgccaacaataaaaccgccacaagtccgacaacgaaatacagaccatatttcacacttttcttcatatcgcgctcttcacttttatttaaatcgtcaactcttgttcctcacgcatacgaactcccatcttaaaaagatagcccataaagatgatgaaaactcccaataacacgaatatccgataagaagtatcagtcggtactccttcgggagtaaaccaggagagagttacctgaaaaagcccattcaatgctatcagcaccccaatggtttgtatcaaagatgaattctgataaacaaacacttcctctttcttcacattgcggagaatgagaaaaatacacaagccacatattgtcatcaccagcattgttactgattcgggtaatatgtgccagataaaattagcagtatcatcctttcccaactcatagcacaatgtcagattacgaacaatgccgccaccaatacatagtccacagaaataaaacagcacattcataataagcgctatccgtctctttggttcctttggttccttttgtttcataagtgtcataatccctcctctcacttttaaatagtcaagtcctgttcttcctttatcttcaccccggcggcaaatatctcggtgaaaagaattataataaccagggatgtgaaatccgtatcatgcgatgcaaccacttcatagcccagcagagccacttgcttcactgcttcaagatgattcagccaatcgtgcaaagtcatcaagccgtacaatgcagcaaacgaataagtaaagaaacgcaaccgggctacattatccgaagtaaacacttcccgctttgagatggataccagcaaacgtatcagacaatagattcctacaaagaaaggaatgatggcaaacatggcaaagaagttcactatggaactccagacagtggggacaatcacagtgcctattctctttacctgataaggtactgacttatcggcaaaacgattcgtcaaggaatcgactgctgtcgtttccaaaggtcttacatccacatataccttatcaaataaaccggaatactccggctgtggagttcccgaatgcacatttacactattgtaaccctcaagaaaactattcttcatatccacccagcccgctatcattgcataggcaaactctgcaacaatgaccaatatagccaggatacccaatatacttatctttttcataatcctccccccacattaaaccgttaaatcctgctcttcctttatcttcacgccgatggcgaatatctcggtgaacaatgccaacagcatataattgaaccaagcatacttgaaagaataaggcaacacctcgtatccctccagctgcacttgagaagccaagtcatgatagatgccccattgctgcaactcgaataaaagactcaccgaaatcagcgcatagacaaagatgcgcatccgacgcacattcttgcgcacaaacacctcgcctttcgtggcagtaagcaccagccgcgccacactatagaacccgtaaagcgcaaacagtcccgcaggaaacagcaagaacgatacccaccgccacttcgtactacggaaaccttgcaccgatacctcacttgtattgcaatacatgggcgtatcctgtgccgcactaatcaaagtatcggcaggcagcgtatcatctgcccgcaccaaaagtgacacggagggtaaggcatgaaaatccttctggtcgcccgcctcattccagccgtccataaatccactaaacatatccgttacaacactaccaataaacactaccaaagccaggaaggcacatactctgattttattcatatctctgtccgttcttcttattattaaatcgtcaaatcctgctcttccttcattttcaatccaatggcaaacacttcacctacaatcagcgaacaaagcccaagtaccagcgtggtagtgctcaccaattctgagaggctcagctcgtaaccatgcagcgagaatacggtatcgatacctataaaatcaagatatgatgacgcaaaggtacagcagaagctgacaaccagtgccattcccaaccgacgcagccgacgtacattccgccagttgaagatgtcggacttgttgatagagattatcaagcggataaacaatactaccgcccaaagggaaaagcccaaatgcagatatatcagcaaatactttgccaccactttcccgacagaatcatgagaatctacgctgaccatcaacgaagagtaggctgcaggcacataactcctgcttttctcattgtagacggaatccctgaagaaatcaaacgactccatggaagaaggtatcaggttgacaaccttcaggttcatcagttccttgtaggcagcaatgtcactccctttctttcccagctccagtccggtctgcgcccccatcttggctcccagaaagatatagtacccctgctccaataccgagtaactcagtacaagcattaccaccaggcagagaatgttcaatcttcttttcataattcagttgttgttgtattagtatcagatatattatatttattcagttgtttcaaggagagtagaagcaacaatatgaaaaccactgcccaaaccagtacatacgggttactcagcagatgtgtcacatcctccatttcaggatgtttcaggctcagatagacagacaagccgttattcatgatatgtatcagaatacatgccataagactccgtgtcttataataaagccaggcaagcaagaaaccgatgaggcaagcacctattatctgaaccggattcagatgaaagataccgaatatcaacccggaaaacaagatagcctttgccgggctatatctgcgaagcagctccttggtaatggcaccacggaaaagcagttcttccagtacgggtcccaaaacagaaatacagagaatacccagccaaccggattgcagtatatcaaatgtctggtccaacaaattgggcaaaaaagtaagttcggacatcagaagacctattatacatatggaagtcattccggcaagcaggctccatgccagataagggactgacaccggagaatacagatgcttgtctcccgtcaggtagttcttgcgccacaagtacagtcccatgaaaacaaagcccagcagcatggtaggcgccacagcaatctgaccagccttgtccatgtcgaaagttccataagcgaaatacgtatacagcagacagaaaggtcctgcaaacagtgctcctacaatctgcatcaaaaagtaaatcaatactagttttattgccgttttcattgttctattcgtctaaaagttcgcaaagatacacattttctctgtcaatccgtcaagctgtggcaacaagtcccatcagcagcaccatcactgtagaaagtgacaataccaatagtgtaatactcatgaatgctcttctcataacctaaacccctccctcatttctatattgttcttcatttattttactgccaggagcaatacgtcttcctccgcagtggcatgttccaccaacagattccagtcgttgtccttcttactccatttgtaactcaagtagttgatgtcatctcccgcctgcagataaacagctttttccttcacatcgaagtaggcatgcgtcttgttgtcccacaaggcatattccacatccgtaccggcttctgtataattgtagttcaagcaatagaagcgttcaaacgcctgctcaatctcgttccatttcaacgcttccttctgtatcgtacgcccttgggcatcatagatgaaattgtatttcaaatggttctgcagaaacttaccgttctctactttatatacaatctgggactccacctgatttccgttcatcacttcattataggcaaagttttcctggatattaccaccaaaagcatttatcactactgtcactacaaagattgttgtcattactaaagttttcataccgttattgttttattagttctttattttgtttttcgataatcatttatcgtttttcgatatgcaaataaaagacctttttttggtatgacaaagaaaaacagaaaatatttatcgaaaaacaataaaaaaacgcgttttacgataaatatacagaaagcaaacacttcaaacgggaaaatacatagaactgcaaggagataaatgaccttatcgccttatgtttataaagaaagaatggatttaatctccacctcgtcacggtgaagctgggcaataagttcttctatactgtcgaatttcagttcaggacgggtgcggcgcacaaaggaaagacgcatcggctgctgataaatgtcagcatcaaaccggaatatatggacctcaatactgcgatcggggccgttctccaacgtaggtcggtagccaatgcttagcataccgccgtactccttgccttcaacacagacacggacggcatacacaccatcgcagggaatcagcttgtcagaatcggaaacacggagattagccgtaggaaaacctattttacgccccacttgatagccgccgacaaccgtaccgtccaaaaagaaatcatatcccagatactcggcagcttccgaaacgtttccctcctgcaacagacctcgaatagccgaggagctgacagtaacctccgttaccgatgcttccttactataagaatacgcgcgcgcaagaagcacctccatacccaattcgcgaccatagtgcacatagtcttcaaaaccctcgctgcggttatgcccgaaacgatggtcgtatcctactaccaaagcttgtatctgatagcgatccttcagtatggacatgaattcccgtgccgaaagccgggctatttcaggagtaaaatcaagcatcatgcaataatccaccccagtcttggctagcagggaaactttctcatcacaagtggtcaataacttcggatgataatcggcctgcatcactttacgcggatgtaccggaaaagtcacgaccgacgaagcaagcccacgcccggcagctaccgcacacacttgctctatcaggtagcggtgtccccgatgtactccgtcaaagaaaccgatagtggctacacttggacgggaaccaatgtccgatgtttcacaaaacaactgcatgtctccaatcctcatgggcctttggcgtataggtagaaatacccaacgcctccgctgtccggcaattggcctcagaatcgtcaatgaaaagagtctcgttgggaagaataccggtctcatccagtactttctgaaatatatcggcatccggttttgccatcttcatctcataagagagatagatatgctcaaaaaagtcctctgcacggaaagccttgtagcgaaacgcgtgcagacacgaccattgccaatggatttcattggtgttgctcagcagatagacaacgtattttttgcgcagttccaacagtaaatccaatttaaaagtaggaatactcaccaggaaactgttccaggcgtcatctatctgggcatcagtcaccggtttccctatctttccacgaatcacttcccggaactccgcactggtaatcaaccctttttcatatttctggaagaaatcctgctggtgatagaggtccaacatgacttccacgtccggcaatcccagctttctgaaattctctaaacagcgctggcggtccaaatcaatcagaactccgccaaaatcaataataaggttcttgattcctcttcttttcatcactatttctgtgttaaacgtcggataaggcgaaccagttcacctatccacaaaacaaacgaggtagaaacgacaatcgtcatccaagtcataaaatcgagcggcactgtgcggaatacagctccaccaaactgtacaatcagtatctgtccgcccaaaatggcaagtataatcagctccatgccataagatttggaaatgcccttgaacgccgagtccgaagtgccgaacacacgtgcattgaacaagttccagaactgaagcataacaaagaacgtgaagaacacagtcaaccgataggtagtcatccccccctcttcactgttaaaccagaagagcattcccataagtaacaccaggaaggcagaccccattcccagaatgtaatacctcatggacttggttataatgaaatccgtactcttacgcggtttttccttcatcacgctctcactgggtggaatggacgccagggccagggccgcaaacgtatccataatcaggttcacccacaacatctgcgtgacggtcaaaggaagcgtcgtacccaccagtgaacccaggagaacgataaacaaagccacaaaattgatagtcagttgaaaaacaatgaaacgctgtatattcttatatagagaacgtccccacatcacggccgtacctatactgttgaaggagtcatccagcaacgtgatgtcgctggcctccttggcaacggaagtcccggtacccatcgaaagtcccacttgcgcatggttcaacgcaggagcatcattcgtgccgtcacccgtcacagccactaccgcacctttctgctgcaacagttgcaccagacgctgtttgtctatggggcgtgcacgcgacattatcttcaagtccatcacacggtccaatgcctcctcatccgtcaattcggcaaatgcagctcccgtaatgcggttcttttccgtatcctccggtttccacagaccaatctggcgtgctatctcggtagccgtacccggtgtatctcccgtcacaatcttcactccgatacctgccgactggcatttggcaacggccgcaggcacatccggacggatagggtcactgatggcaaccacaccgaggaacgacaagtcattttcagcaaccaatgacacacaatcagacgcttccgcatcatccacaatcttgaatgcaaagccaagtgtacgcatagccatattctggtagttgagcaactgagcctccactgtagaacggtattccaccgcatccacacgcttgccgtccaacatgacatccttgcatttacccaaaacaatctcgggagctcccttcacatacagcaccttcttcccaatcaggggggattgcaccagggtagccatgaatttcctttccgtagagaaagtcagctggtcgataaccgtagctttctcacgcagcgccagatagtcgcatccttggctgttcagccaaagcagcagtgccacctccgtggggttacccacccctttcggcttctcgccagtcacctcttcttccaggaaagcagtggagttagcactgataccttccattaccagcttgctgaggtcatcattccccagctgcccgttattcttcaaaccatagaaattgggttcatgcacctgcatcagattttgggtcaatgtaccggtcttgtcggtacaaatcactgtaatggctcccatcgtctcgcatgcatgcatcttgcgcaccaggttgttggtggagagcatgcggcgcatattcaacgccagactgagtgtcacgctcatcggcaagccttcgggcacagccaccacaatcagggtaactgccatcataaagtattgcaaagtagcctgcaaggccggcagccaatcacggaaggtatgaaatgaagaaaagtcataaaccagtaccacatcctttacaaagaaaatgagaaaagccagacccgctacggaaaagccaatctttccaatcagattggccaatttggtcaactgaatattcagcggagtaggttccgtattctgttcggtactttgacgtgccactttaccgatttccgtagcatcgcccacagcctccacacgcatggtgccatgtccgtccaccaccgttgtaccgcgcaaaatgcggttggaagcatacgtagcctcttcgtcaaagtcagcttctacggtagttttcgtcactaccggctcaccggtcagattcgattcgttcacttgcagggaaatggcttccagcaattcaccgtccgccggaacctcttcaccggtttccagcaccactatatcacccaccactacatctttacggggaatctcctgcacatgtccgttacgaattactttcaccaaagtttcttcgttcactgcattcagcaggtcaaacttctttccggcatcatactcaaagaagaaaccgataccggtagccagcagaatggctactataatgccgatagtctcggcatattcattctctacaatggaaataatcaaagaaaacagagcggcaaccagcaatacccttactacggggtcctcaaacttctccagatacaatttccataaggaaggccgtttaggaggcgtcaataaatttactccatgttcgtcgcggctcttccgcacttgttcgtcggtcagtccgacatgataataatcatcctttattgcagtcatgcaagtctttaggtttaattttggaacgcaaaaatacaataataatccgggaaaacaatacctatataatgattagtgattaattgactgtcattgattctctttttccctcaccagtttcggtctggttgcaggctcccacggcaatgtgaaccagaaagtcgaacctgccccttcttccgattccacgcctatttcgcccccaatttgcggacaatggtctggcaaatggagagtcccagtccggtaccgttcttttcctgcttcagcttgacgaaacgttcaaaaacatgtggcaacttttcctggggaataccggttcccgtgtcttttacgtagaaatagagaccttcctcatagggtctgaatccgagggtaatactgccttcctgggtgaacttcagggcattcgtcataaaattggataccacttgtgcaagccggtttctgtctgtatgcatggtatattccttctcagaagcctcccggacaatctgcactccactacccagctcagccacccgcatacggaactgttgttccaaatcgaacatcatctggttgatgtccacatccgagaacacaaattccaatgttccggcttctatcttcgagaggtccagaatatcagcaatcagctgttgcagcatttcattgttactttgcacaatttccaggaactgtgtcttctcctcgtctgtcgatgcagaggccagcaattccgagaatccgacaattgcgttcagcggggtacggatttcatggctcatattcgccaggaacaccgatttggagcggtcggcattctctgccttctcacgtgccagtttcaattcagcttccacttgtttcagtcgggtaatgtcatgcacggtaatcaccatgcagtcgcggtcctcaatctccatatactcgccggaaacataagcattgcattccgtagttctgccttcgctatccctaagattcagaatagctgccaaatccgtgaagttcttttgcaccacaaaggcattctctatggcattccgcacggggcagtgctcacacaaatcgtgagtgccgcaacctcctgctgccgacaaggcattgttacagcgcagaatatctcccacccgtccagtttcggcaggctttacagctccggtaatatcgtagtaattggtgtagaatacagtgaagtcgcggtttatcagcagtacataggcgtgcagattccgcataatcgccctgaacagcttgtcggtcattttcataaaatgttgttttaatagagaacaaaaataaactatttttgttcaacaatagaacaaaaagggcttttaaacgttattataggagaataaacctaaaaaagaaatttatggaaaagtacatttgcactgtatgcgattatgtctatgaccctgaattgggcgaccctgaaaatggaatagaaccgggaacatctttcgaagaccttcccgaagattgggtttgccccttgtgtggagtaggcaaagaagaatttgagaaagcgtcctaagacgctttcttttcttttatatcgctgctggcttccactacattcaccacatagtcgcccagcttttcacattccgcaatgatgtccatatagtaaacacccatctggtaatcatattccttgttgttcacatccaaaatattctggttcttcagctgattgcggtaattattgatttcgttctccaaattaaaggacttgttcacatccgcgcctgcatgctccggatgttccaccacgacaatcatctgctccaaggcatcatccgtcagcttcatcatgaaatggatatgctcgtactgcttctcggtgaaatcctgattggtctggcgcttgcggttgatggtacgtgccaggttataacagctgtcgccgatgctctctatctccgtcacttcacgcagcatggcacgtatctgcaacttactttccgaactcaggcgcccttcggacacttgattcagataattggcaatctccagctccatgctgtcactgatattctcgtacttctccacacggctgaacactttgttgaaatcatcatccttctccgtatgcagcaagtcctgcaccattccgaacatacggcgggtacgttcggcaaaaagatgtatttccttgcttgcctgcaggatggacagctctgccgtagaaagcataccgcccgagataaaacgcaagcgatattcctcgtcctgctccttcattggaataatggcacagaccgtacgttcgataaacttcacgaaccatatcaatatcagcacgttgcagatattgaagcaagtatggaatgccgaaagcttgaaggatacggccacagccggatctttagtacccatcacgttctctacgaaccatgacacagcctcggtaaagggggtgaaaagacacaacacccatatcacaccaaacacattgaataccaaatgagccaaagcagcccgccttgcctgcgtattaccggtcagcgccgcaaggtttgccgtgatggttgtaccgatattctctcccaaaaccagtgctgcccccaattcgaaactaatccagccgttggcgcacataataagcgtaatggccatagttgccgcagatgcctgcacaatcatggtcaacaccgtaccgatacccacaaaaagaagtatggagataaagcccatgtcggtatagtcctgcacaaatgacagcatatcaggattttggctcaagtcaggagcattgtttttcaaataggaaagccccatgaacaagaatgagaaaccgaaaataaattcaccgacagacttgcggttacttttttgagagaagaggagaggaatgccgaaagcaagaagaggaagagcaaaggcggcaatgtccaccttgaaacctaaagctgaaataatccatgccgtaacagtcgtaccgatattagcacccattatgacacctatggactgtgaaagcgttaacaaccccgcattgacaaaacttacaaccatcaccgtggttgcagaggaagattgtacaagtgctgtaatcagcacgcccgtcaacacaccggtcactctgttggttgtcattgcggtcaatattttccgcagtctgtcaccggcaaatttttgaagcccctcactcataatcttcattccgtaaagaaacagtgccaatgagccgagtagctttaaaaaatcataaaaagaatattccatctttaattatttaaggtgtttcattccttcacgtgttataatgtcctatatttaacgtgtcaacccactaaaaacgagacatcatgaaacacatgttacaaatttgttgcaaaaataataatatttctaaagaattccctatagggagctcacttttggatatttattacggttttaatctaaatttcccctatcaggtagtcagtgcaaaagtcaacaaccgttccgaaggactgaatttccgtgtatacaacaataaggatgtagagtttctcgacatacgtgactcctcaggcatgcgcacttatgtccgttccctctgcttcattctttacaaagctgtcagcgagctgtttccggaaggaaaactgttcgtagagcatccggtatccaaaggttacttctgtaacttgcgcatcggccgttccatagagctggaagatgtgaccgccatcaagaaacggatgcaggaaatcatcgccgaaaacatcccctaccatcgtgtagaatgccacaccaccgaggctgtgcgtatctttagcgaacggggcatgaacgacaaggttaagctgctggaaacctccggctcgctatatacctattattacacattgggcgacaccgtagactactactacggcaacctgctgcccagtaccgggttcatctggctgttcgacatcgtgaagtattacgacggcctgctgctgcgtatccccaacaaggagaacccgaatgtactggaagaagtggtgaaacaggagaagatgctcgacgtattcaaggaacacctgcgctggaactacatcatggggctgagtaacgtgggcgacttcaacctggcttgcgagacaggccatgccaccgacctcatcaacgtagccgaagccctgcaggagaaaaagatagcccaaatagctgacgacatctaccaccgcggcgaaaacggaaaccgggtgaagctcgtactcatctccggtccatcgtcctccggaaagacgactttcagcaagcggctcagcgtgcagttgatgaccaacggcctgcgtccctatcccatctcgctggacaactacttcgtagaccgtgaagacaccccacgcgacgaaaacggaaactacgactacgaatcactctacgccctcgacctcgaactcttcaacacccagctgcaggcattgctccgtggcgaagaagtggagctgccccgcttcaacttcaacctcgggaagaaagagtacaagggcgacaaacttcgcatcgacgagcacaccatcctcatcctggaaggaatccatgccctgaaccctgaactgacaccacagattcccgccgccagcaaatacaagatttatgtatccgccctgaccaccatctcgctggacgaccacaactggattcccaccacggacaaccgcctgctgcgccgcatcatccgcgacttcaactaccgcggctactcggcacaagagaccatttcacgctggcccagtgtacgtgccggcgaggacaaatggatattcccctaccaggaaaatgccgatgtcatgttcaactccgccctcttgttcgaatttgccgtgctccgctgccacgcagagcccatccttaccagtgttccacggaactgtccggaatacgcagaagcctaccggttgctgaaattcatcaaatatttcacccccgtgcaggacaaagaaattccaccgacatccttattgagagaatttttaggaggcagtagcttcaaatactaagtttttattctaactttgtgagcaaataaaacaaacgtacacatgaaaaaaattatttcgatacttctcttagcgactttctgcatctttactcaactccatgcgcaaaaccgtgcagacgaattgatgaaacaagcacaagaaaatcttacgaaaaaagaatatatcaaagcccgctatctattcctgcaagcctacaatgcctttgccacgcaagacaagtatgcccaggcagtggaatgcggcgtcaatgccagcgccctctaccatcgggagaattactataaagaagcttttgaactgctgcgcggtgccgagcaagtggtggcaaccggcgaacagaaaacgggcaaggccatgcccaacctacgtttccgcatcaacaaggaacgcctgcagatgtacatcaacctgaaaaatcccgcacgtgccaaggaacagctgaccaaactggaagagaccgccaaagcctctcacaacgactctctgagcaacgacctgctttatacgcaggccaactattactacaccttcggcatgaatgcgcaaggtgatgccgccaccaaccgcctgatagggcaatataaggaacagaagaactacgccaaggtagacgaatgctacaagactctcatcagcattgcccgcaaggcaaacaatgccggactggtggcacgcacctacgacaagtatatcctctggaccgactccgtgaaagcgcttaccgcacaggacgaactgaacgtcctgaagaagaagtacgatgaaagcctggccaccatccaggagaaggacgactccttgagcgccaagcaatacatcatcatcggactctgcgtactggctgccatccttgccgcagtcctgatattcggtgctatcgtattgttgcgcttcatcgtccttacccgcaagcagaagaaagccatcggtatcgccaacgagcacaacgaactgaaaacaaaattcatccaaaacatctccgcccagatggaaccgacactggacacgctcgacgcttcgctgccgggagtaaaggccctgcatacattctccaaccacatccaggaactgtccgaattggagaacaccttgtccgaaccttacgaaatgcaagagaagaacatctccgccttctgcgaggctatcatggacaagattaagggaaaaacccgggaagacgtttccctggccgtcaatgctccaaagctgaatgtaaaaatcaatccggagcaactggaacgcatactgctgcaccttttagagaacgccgccgaatacactcccgccggaggtaagatatggctcgacttcaagaaacgcggtgcacacacgcatcagttcatcgtcagcgacaccggttgcggtgttcccgaagagcaacgcgaaaacatcttcaagcccttcaccgaagtgaaggacttgacactgggcgacggcttggggcttcccatctgctcactgatagccaccaagatgaacggcagcctgacactggataccggctacagcaagggggcacggtttgtactagaactgcatgcttaacggcaggttggtacagaatagagtggaattcagcagcaagcgagaaagaaacaagaagttatcaaacctgccctcactgccctcaccgcttttctgaaacgccctgctcatcggcattgcagcggcgagtgagagcaaataaaaagagtgagggcaaaatttgccctcactcttttcagttacccggttacttgctgccactccccctcagtacgcacgggctttcgtccgcctctcccccgtcttttattaagaaaagcatatacatttcttgtgctagacacagtgtattgacaacggctcactatagtggtctgttcagctcactgtagtggtctgtcttgttcaccttagtgagccgacttgttcactgtagtggagcattggcaaatcaaaaggtttctcggaagaaacacgcatgcggagcacaacgaaaccatagcctttacatccatactgaccgtgctattggcagcctgcactgaaacgacaagttacaaaacggctaaaaagcatgataaacagcactccttccgatacatgagacatgtatcatgcaaaatgagacaattcacctcaaaaatgagacatgctttattgcgcaatagataaaaattggctaactttgccataagcccaaaagcaaaaagcatgaaacaagtcttgtatcttaccgcttcaaccgtattctttggaataacaggtacaaccatcccccctcccgctccttattcaataccatcataaattaaaatcttgtacttatgaagtatttatgtatcatcctttttctggcaataagcatttcatcctgccagcagcaagccgtcaatgaaaaatgcgagaagaacattatagtatgtttcgaccattatcatcctaaaccatacaagacgccgggaggagtgggacacatgccgatgcctaaagtcctctataccgacagcataggaactcttgtggaatacatgcccaacaaagattccgataccctgaccatctattccactgaacacttcaaggagttgggtctgaactatggagattttgagttcaactactacccattaatgaaaggagataccgttattatttccatggatagccttggctaccccattttaagcagcaagcatcatcccggatatagcagaatctataacatgaactatgagttgcgcaaagggaagacccatgcaggactggaagcaaagacttgtcttgggggtgactgggtgcggattgccaaatcgattgatataatacgggcaaataactggacttcattactaatggattactgccctttggattcattacaatccatgttcgacagttacaagaagaactatacagataccatcaattcctttaaagaacagcaacttatctcaagcgagatacacgaccgttatcaatgcctgctcaagctgaaagactatgaatcccggagaatgctgaatgaagacaccgccttctaccgtcagatggaacccgaaatagctgacaaatatatccgttatccctcctaccgtgaatttctggactactacctttggttcttcaaccagcatatcccgacgatacgcaaatcccagggaggaagcaaggactggcgtcaaaccttcgatgagctatctgcgaaaccgttccagccaaaatccaagcaagccctgcttgaacgctgcatcaaagaaatcggcgagaacttttcggcacaagacgtaaacagctatcttgacaaatatatccacatcacccaagacacactgctgcccgacaggataagagaccaatacaacttgtctgccgatgccaaccagctattgctgaaggacattcatggaaagcctgccaacctaaacagattgctggaaaagaacaggggaaaggtcatttatgtggacttttgggcaagctggtgtgtgccctgccgggaagagatgcctccctcggaaaagctgagagaactgtacaagggaaaagatgtggtattcgtctatctcgccttcaaggaccaggaaagcagttggaaaatggcggtagagcaggagggcttatcagaagtacccgacaatttcttcatcacaaatccaaagaacagcaaaatgctggaaaagctaaagctggaattaattccccgatacatcattttcgacaaacaaggcaatattgttgaaatgaatgctccaagaccaagtgacaaacaagtgacaacaacaatagacaagtatctaaaatgatacatcagcaaaagtttgaagtataattaaaacttttcggtatatgaactttccacaaagcctgccgcatcctcacacaagatgcagcaggctttatcattctatatcttaacggattcagcgcaatgcctccacctcttccggcgtcagtggaattttcttacccagacggcgcgctcccgtttcggtaaccagataatcctcctcattgcggatgccaccgaagttgcggtattcttccaccttatcatagtcaatgaagtccataaacttcttctctcccctccacaaatcaatcaactcgggaatgaaataaatgcccggctcaaccgtatgcacaaagcccggttccagagggatggcaaggcgctggctctttcggccgaactgcgtactcttgggctggccgtcatagcctacccaaacttcaccgaagttctccatatcgtgcacatccattcccatcatatgccccagtccgtgaggatagaacagcgcatgggcaccttcgcgcaccgcatcttcggcattgcccttcatcaagcccagctctttcagcccttccaccatcacttgggcggaaagctcgtacaccttcatataaggaatgcccggacggagggctttgacagactccaagtgcatggcgttctggatttcgtaaacggcacgctggcggggagtaaaggtcttgtccgccggcacggtggacgacatgtcgccacagtaacccgaaggaagctcggcgccggcatcaatcaggaagaggtcgcccggctttactttatttccatgatagtggttgtgcaaagtctgcccgttgatagtggcaatcgtggcaaaagacaactcgcagttgttcatctgggcgatgcggttcatttcggccacaacctcgtattcgtacatgcccggacgaagcactttcattgcggtaatgtgcatgtctgcagtcacgtcgcaggccttttctatttctgctatttcttctgccgacttgtagttgcgctgtgccaccaccgcacggataaacggcacggacccttcctgacgtgccggaggaacacccagccaatccatcagtttcaatttatgctcggcacgataagggggcaaataatggatggtctgtcccttctgtacagccttgtgcagataaccgacaatgtcggcaaaaggacgggtttcggaaatgcccacggcagaagctttttcgtgaagggtgggctggatacccatccagataatatggtcgatggtcaactcatcgccgaatatgatttctttatcttcgtctatgtcgatgagagccgacagcccggcaaacgacaagccaaaatagtagagaaaagtggaatcctggcggtaacggaaagtattgtcctcatagttcaacccttgttcatcgttacccaaaaacagtaatactccggagccaatcgtttttttcagccgggccctgcgctgcacatacgtttctttagcaaacataacgttccattttttagtagttatatggcaaagataggaacaaaaaagcaaccaagctcccgttttcttgttaaatatcataagagaaggtttcgcgttcccgaactattcactatttttgcggtagaaatttcccttattcgtaatttgtaatttataaagtatggcacaaggttcccgacaagtacagactcaagcgcaacagcagatacaaacactgtcgccgcaacagattctggtggtaaagctgctggaactccctgccgtggagctggaagaccgcgtacgtgccgaactcttggaaaatccggcactggaagagggtaaggaggatactcccggcgacgaataccccgacactcctgatacggaaaccggaacggaagacggtggagacaccagctatgattctttaagcgattatctgaacgaagacgatatccccgactacaagctgcaggagaacaaccgcagcaaaggggagcaggcagaagaaattcctttctccgacgccacctccttctatgaaaccttgcgccagcagctcggcgagcaggacttgactccgcaccagcgcgaactggccgaatatctcatcggctcgctggacgacgatggcctgctgcgcaaatcgctggacagtatcagcgacgaactcgccatctacgccggtatcgacgcttctcccgaagagctggaagaagtattgaagattatacaagacttcgaccccgccggtctgggcgcccgcaccctgcaagagtgcctgctcatccagattcgacgcaaggaagcgcaacggcccatgccctcgcctccacaatactatatagaagaagatattcttacccagtgctacgaagagttcacccgcaagcattgggacaagattatgcagaaattaggtatcagcgaagataccctgcaacaagccgttaaggaaatctgcaagctgaatccccgtcccggtgcctcgctcggcgaagccatcggcaagaacatgcagcagattgtgcccgacttcctggtagacacttatgacgacggtaccatcaacgtgacactgaacaaccgcaacgtgccggaactgcgcatgagccgcgacttcaccgagatggtggaagaacacaccaagaaccgggccaaccagtctaaggaatcccgcgaagccatgatgttcctcaaacaaaaaatggatgccgcacaaggtttcatcgatgccgtgaagcaacgccagaatacgctgatgaccaccatgcaggccatcatagacctgcaacgtcctttcttcctcgaaggagacgagtcattgctccgccccatgattctgaaagatgttgccgaacgtaccgggttggacatctcgaccatctcccgtgtgagcaacagcaagtatgtacagaccaactacggcatctacccgctgaaattcttcttcaacgacggctacacaaccgaagacggcgaagagatgtctgtacgcgaaatacgcaagatactcaaagagtgcattgacaacgaggacaagaaaaagcctctgaccgatgacgaactgaccgagctgctgaaggagaaaggctatcccatagcccgccgcacggtggcaaagtatcgccaacagatgaatatccccgtggcaagactgagaagatgagagaaaaggatgagcgattagggattaaggtttaaagattagtgcattcaaatagtaaattgtaaatagtcaaatcgtaaataaaattaggttgtggaagagcatattatagcagataaaactttaatcagaacagcgaaagtgatttcggcggtattcacaccgttctccatcccttttctggcttttctggttctgtttatattctcgtacctgcgcatcatgccgttgcagtacaagttgatagtattgggcgtggtgtattgcttcaccatcctgatgcctacactgactatcttcatcttccgcaaaatcaacggtttcagtccggaagaactggtggaacgaaaaaggagatacattccctttattctgaccatcacttcttatgtattctgcctgctcatgatgcaccggctcaatatcccgtggtacatgaccggtatcatactctccgccctggtagtgatgataatctgcgttattgtcaacttaaaatggaaactgagcgaacacatggcaggcgccggagccgtaattggcggactggtagctttcagcgccttgttcagctacaatcccgtatggtggctatgcctctttatactggtggctggcgtgctgggcaccgcccgcatcatcctgcgacaccacacactgggcgaagttatgggaggctttgccgtagggcttatctgctcgttgctggtactccacccgctgagcaacatactgttccgaatcttcctcttttaagagccttgtttaatttttaattttcaacttttaatttacatagtatcaacccttaaaaactaatgatcatgaacttcccgactaatgtaaagtacaccaaagaacacgaatggattcgcctggaaggtgatgtagcctatgtaggtattaccgattatgcacaagagcaactgggtgacattgtgtttgtcgacatcccgaccgaaggtgaaacattggctgccgacgaagtgttcggtaccatcgaagtagtaaaaaccatatcagacctcttcctgcccgtaaccggtgagattctggagcaaaacgaagcccttgccgaccagccggaactggtaaaccaggacccatacggcgaaggctggctcatcaaaatcaaacccgccgctgatgccgacttcgacagcctgctggatgccgaagcctacaaagcgctgataaacgaatgaaatgaaatgaaaagattagggattaggggttagcgattaacaccggatggaatgatagcgcagtccctaacccctaatcgttaatccctaacccttataaaattaaccctttaataatttaatgattcatgtctccaatcgttagcatcatcatgggcagcacttccgacctccccgttatggagaaggccgcgcaattgctcaatgacctgcatgtaccgttcgaaatgaacgctctctctgctcaccgcacaccggaagcagtggaggaatttgccaagaatgcccgccaacgcggcattaaagtgattattgccgctgccggtatggctgccgccctgcccggcgtcattgctgccaacaccacactgccggtaatcggggttcccgtaaaagggtccgcactcgatggcgtagacgcactctactccatcatccagatgcctccgggcataccagtagccaccgttgccattaatggtgccatgaacgctgccatccttgccgtacagatgctggcattgagcgattcctcattggctgaaacattcgccgcctataaagaagggctgaaaaagaaaatagtcaaggcaaatgaggacttgaaggaagtgaagtacgaatacaagactaattgagggattagggattaaggataagggattagtaagatgagatatagtcacttatcccttatcactaatcacttatcactaaacgctaatcacttattaccgtggatttattcaactattcccgacgggaaacatcagaagtaaacatcggagccacccctatgggcggctccaatcctatccgcatacaaagtatgacgaacaccgctacgcaggacacagaagccagtgtggcgcaagccaaacgtattgtcgacgccggaggagagtatgtacgcctcacggcccaaggcatcaaagaggctgaaaacctgatgaatatcaacataggcctacgccaggacggatatatggtgccgcttgtggccgacattcacttcaacccgaaggtagcggacgtggcagcacagtatgtagaaaaagtacgcatcaatccgggaaactatgtggatgcagcacgtactttcaaacatttggagtataccgatgaagagtatgctcaggagttgcagaagatacacgaccgctttgtccccttccttaatatctgcaaggagaaccatactgccatccgcatcggcgtgaaccacggttcattatccgaccgcatcatgtcgcgctatggcgatacaccggaaggcatggtggaatcttgtatggagtttctgcgcatctgcgtacaagagaatttcacggatgtggtcatttccatcaaggcatccaatacagtggtcatggtaaagacagtacgcttgctggcagccgtcatggagcaggaaggtatgcgattcccgctgcatctcggtgtaacggaagccggagacggagaagacggacgcatcaaatcggccttgggcatcggcgccctgctggcagacggcttgggtgacaccatccgggtttccctgagcgaagctccggaggcggaaatccccgtagcccgcaaattggtggactatatcgtgcagcgccacgaccatccttatatccccggagcagatgtgccggaattcaattatctctctcccacccgccgcgagactgccgccgtacacaatatcggcggagacaatctgcccgtggtcattgccgcacgcctggacggggacatggacttcaatccgcaattcgtgccggactatatctatacgggacgttccatccctaaacaacttccggaaggcatgcaatgcatcatcgatgccgatgtctggatggaacaaagcaacagcgagacaaaaccggacaatgcctggcccgcctttaaaggagaccagcttcctttcctaagcagttgtggcgcttccttgaaattcctcttcatcacgtatatgggattgaatgacgaagccatcgcctgcctgaagtatcatccggaagtcgtattgatttcgcaaagcaatcatcccaaccggttgggcgaacaacgcgctctagtacaccagatgatgaagaaaggcctaaaaaacccggtagtcttctttgagcactacgcagagagcgaactggaaaatctgcaaatcaaagcggctgcagatatgggagcactcatcttcgacggtctgtgtgacggtatccttctcttcaaccagggagaaaccataagcggcaaagtagtggatgccactgctttcggtatcctgcaagccggacgtgtacgtaccagcaagaccgaatacatctcttgtcccggctgcggacgcaccctctacgacctggaaagtaccattgcccgtatcaaggcagccaccggccatctgaaaggactcaagataggaatcatgggatgcattgtcaacggtcccggagaaatggccgatgctgattatggctatgtaggcgccggacgaggcaaaatcagcctctacaagaagaaggagtgcatcgaaaagaacattcccgaagaagaggcggtggaaaagctgatagaactcattagggacaatggcgactatatagagaaataaaagaactataatatggattatcagaaaatactgaaaggtattcatcaggaaatagagccttatgccactattggcaagcaagctgattacattccggcactcgccaaaatcaatccggaccagttcggaatgtgcattcacaccatacaaggcgaaaccttcatgcatggagaagctactaccggcttctccatacaaagtatttcgaaagtattttcccttgccatgtgcctaagccttgaaggagacaatctatggaaaagagtgggtaaagaaccctcgggcactgctttcaactcgctagtgcaactagaggtagaaaaaggtattccccgaaatccatttatcaatgccggcgccattgtgatgaccgacattctattgagccatttaaagcatccaaaagaggaatatatccgttttgtccgttcactcagcagaaacaaccagattgattataatgaagaagtagccctatccgaacgcgaaaacggctacctgaatgcggcaattaccaatctgttgaaatatcatcataacataaacaatgacatagaacgcgtactccgcttctatttcctgcaatgctccatagagatgagctgttatgatttgtctaaggcatttttacctttcgccaaccataaacaagcctttgcgttcgaaaacatcactctgacctcctctcaggtaaaaaggatcaatgccatcatgcaaacatgtggtttttatgacgaagccggagagttctcttatctagtaggccttcctggaaaaagtggtgtaggaggcggcatagctgcagtttatccactgcgttattcagtcgcagtatggagcccaagactgaaccagaaagggaattccgttatgggcatcaaggctttggaactgctgaccacacagacacaggaatctattttctgaaaaatttcagcgtagatatttatcaaagtccacctctctgaacttaaagttatgatgttcggaggggtgataggctttattccaagtcgaataggtcttcacatctatctcccttgtcttccggttaaaagttacaatgcgtaagtagccctcacctcccaatctactgccttccacaccacgctgatagtttgccagcatctgatacactttattcccctctttccctatagagaccagcgtgccaactccgcttttcaagacatgcccacaaaagacagctatcacattgcgatgtctgagaagcaatttcttccagattccagcgccatcgttcactgtgcgcccgagctctttgccgatgccatatccttgaggacgccaccagtctttcccgtcatgcaacgtactgtcacaatacaaataggcgtgtgtattcaatatgacaagcttatccggatgaatacccactatggaatcggcccattgcagagcctcatcagaaggtccgaattccagattcaagaccatccaatcggtatcgcccgacctgaaatttatgtaatagttatccaatgtctttccatccgcactgcctccccaatagttcttctgcatataatcggaaagaggaaaatacttgttggccattgcagtgttatgcacgtccgaaaacttgccgggcttactgccaatatcatgatttccccacacgacagaataaggtattcccgcttggctgatacgataaaaagctttctgcatatacgcccattccaccggagaattatcttgtgtcaaatctcccacttggaacacggcatctattttcttacggttggcaaccaaccagtccacttgcgactcgaagacctccggacattgttccagataagtctgcgtatccggcaataccacaaaagtacttacccgaccggaagtggtgcaagaagttaaaaaagcgccccctaaaaagagcgctccgataacagacaatatcctcatcattttttcttctgattaaacagccactccataaaaccaggatagttgaaagccggattccaactaccatgattacaaccaggaaattcaatatattccacatcggcaccaatagctttcaaggcccgatatgctgcacgcgatccttcaggagttactacattatccgcatctccatgaaaaatacgaaacttgaccgatttgccagccttcaaccgtgccggattcactgttccacaaataggtattgctgccgcaaaaatctccggatagcggacagccatgtcaaatgtacccattcctcccatagaaagtcccataacatagatacggtctttgtctatctgcggcatggccagatagaaatccaacaactctttcaacgtacggaaaataggagaaacaggcacttccaacggcatatctgccggagcaaaagatgaagggcgctccgtatatgcccaatatccggtttcaggacactgcggagccaaaataaacgccggatacttttcgcggtttacaggattaagccacatctgcccaccatgaaccaattgtttctcattatcattgccacgctctccggcaccatgcaggaaaagcaccaaaggatacttttcatcaggtttcatcacctctggacgcaacaaacgatacaacaatgtatctccacgggaagagatataagtttccttttgaaaggtttcttgtgcaaacgaaaacaagaaaaagaataatccacaaaggatgccgattatacgtttcatcttattatttattttacatgtttaacttccgaacataaagatacaccattttcattgaaagcctccacacaaaaataataatcctgatcagcagtaagggttttcatcaataaatcagtcttatcatagaccatccaagagctgtaaagtttgtccggtgcaatgccccaaagtatgttgtaaccttgtgcacctttcacagcctcccaacggatggagatgtcacgacggtctgcttggcggtcaagtaccaactttttgggttgttgcggtgccttccccgtacccaatccaaagacgcgaagttcagatatagccagattcggtgtcggtatatctatatttttataacggatataacgggcagacttgggtaatgccagttcaacataatcattcggagtatccctataactttccttacggtccaccaatatatcccaattctcaccatcaagagaaccttcgatgagataacggtgatggagtccttcgtagcgaccgtacatattactttgataatcgtgatagtttatctgaacagcatacacatcagcaggtttctctaaatcaatcatcacccactgccgttcgtcattagcctcggcaagccaaaaagttttagtcagttcatccgttagggcatctgccttaaattcgtcttttgtagtaaaagccgtcaccggcttgccatacgagagcaacatccagccacggaactgtccagccttgcccggtacggcaggtgcataacggggatagtctccgaaacgggtatctacatacataatgccatctttatcaaaccctgccggaaacatacaaaggcgacgttcccaattcacattgatagagagtgacatcgaagcaaaatgccaatactgccccccaggaccaagcacggtacttccatgtccggcaccgttcatataaccacccggcttgtaggacaccggattatgcttttggtaagtataaggccccatcggataatcggccacataaacaccatcggcatagacattgaattccgttcccggagcaccgtattgcatatagtatttcccattatgcttcgtcagccaaggcccctcaatatatccgcccaatacagtatccgtatggttttcaccgaaacgttcccagccatgtttaggcatatccaaattgaagagttctttcgtttctcccttcttgatgaaacgccggttcttgtccagttccattcccctgataggatacacattggaagaaccccagaacatatacgctttaccgtcatcgtcaataaacaaatcgggatcttgcagattatgcaaaattgccggaacagcttcccagtttcctgaagccggattatccgtataaaggatactcatggaaccggaaggatcaccggtcacataaagtaccgaatctttgtaattatgtgccgccggagcattacacccttgcggataccagttcctgcccggacgtacaaactcccagttcagcaaatccctggaacgccaataaccgtgtgaacgggtgacaaacatataatattcaccccgaaactccaccacggcaggatcggcaccggaacggtaggagatactcttatccgaattataaatcatatacgtgtaatcgatattcaaaggattacaataagtatccatacgcatgtcctgtgcagaaaggaaattcgccaaacacaacagcagcaccagaccacttaatcttttcatcatattatccacatttatatttctaaatattcatttatacatcacgaaatatgcactattatttgcacagagattcaggaacatcatattcttcctgcaggcgggcaagttccgctttcaattctgcagcaaccttctccatccctttttcaccatacaaattatgcatttctgccgggtcctccttcaaatcataaagttcccacttgtcatccacataaaaatgcatcaatttatagcgctccatcttgacaccgtaatgtgcacggacactatgaaaaccggggaattcataatagtgatagtaaagtgacttcctccagtttcgtggagtattttctccctctaccaaccgacgaaatgacactccctgcatgtcttcaggaatctcaattccacacatatcgagaaaagtgggagcgaaatcaatattttgagttaatcctgttacctgcgttccaggcttaatatgtcccggccagctcattaccatcggcataccgaaagactcctcgtacataaaacgtttatcaaaccaaccgtgctcgcccagatagaacccctggtctgtagtataaacgacaatcgtatttttatccaatccggtacgcttcaaataatccaatatttctcctacactctcgtccacgcttgccacacaagccatataatcctgcaaataacgctgatatttccattctgccacctctttgaaagtacgctgtttcgaataaaattcattgttccgttcacgataggcatccataaaacggcggcgctcatccggctccatcgtaccaagaaaagcatgaggccacgggtcgaatagcagactgtcgctattcatacccgcaaccatcttcaagtcgtgaccttcgtacatatcacggtatatattcatcttctgcatttgtgccgcataacgtccttcgtatgcatcataataattgtcgggtaaagggaactgcgtgtgttcgtacaaatgataatgccgttcggcaggcacccaattacggtgaatggctttgtgatgcatcatcaggaaaaaaggtttattcttatcctcgcgcccactcatccagtcttcacaatattgagtgatgaggtcagttacatatcctttatgccgagtggtatctccctcggtaataaaatacggattataataatctccctgatcattcaaaatcatccaatggtcaaacccggtaggctttgaaacaagatgccacttgccgataatggctgtttcataaccgtttgcttgcaatatcttcggcagtgtctgctgcgaaccgtcaaatcctttatttccattcctcataaaaccattcttatgactatgcttaccagtcagtatggctgcacgactgggaccggaaatggaattgcaacagtaattattctgaaataccgccccttcatgcccaatacggtcaatatggggagtaggagctattttacctatgggatgtccatatatactcattgcttgtcgggcatggtcatcactcatgataaaaataatgttaggacgcctgtttcctattccttgtttctgttcttgtccttgcatccaaaccgaaggaacaaagggcaacaaggcaattccccaggatagtttatttttcatgtattcattatttgttgtaatttatcaaaggcgtaacaccgttttataatttactgattatcagtacagttagaatacagtgcattcagtatacgactgaaccctattcagtatacgactgaatggcattcactatacgactgaatcaggttcagtatacaagtgtttcttgagcccttatgatttgtaaataatgcagaatagaattagacgagtgcctctttacagtttcaaagtaaccaatacgggagcatggtcggaaagatagccattgtccggcttatcgccaactgtgcggtaacgctccacctctacagaagcatttacgaatataaaatctatcagcctgcgcttctccaccggaatacgtccgaagtcatgaaagctccatgtcggtccgtaaacgacctttgccgtggaacaagcgttcctcattccaccttccgtcaatatagtgaccggctcggagtctaccgttccattaaagtctccagtgataattaccggaagctctcccgctatttgctttatcttctcgagtattaacttagcgctttctcgacgtgccacctcacctacatggtcaaagtgggtgttgaaagcagctactttcctgccactcaccttgtctttcaacacagcccaagtcacgatacgctcgcatgccgcatcccagcctttctttccgatggaatcgggagtctcactcagtccgaaatctccgttctttaaaagctcaaaacgctctgtcttataaaaaagggagcaatattcgcctttctcttttccatctgcacgacctacgccaagggcagtatattgaggaagacgctccttcaagtcattgagttgattctttaccacctcctgcatgcccacaatgtccggagcataataagcaatcatctgtgctgcattatccttacggtatttccagttattcatactgtccgctacatgatccagacggatattaaacgacatcacctccaccttagcttccggttgcttgccgcacgaggcgacaagcaatacgaaagcaaccaatacactattgaaaagcacgtttttcatggttataatcctttttaatctatataaaatttaccaaaatcaaatcctgccaaacctaatcagccttattcaaataaggagacgtaaagcctaatctcttcaatcccttctgtacatcgggatgactcatgaaaagcttccaaattaaaccggtgcgatagttctctatcatcacaataatcggtccctggtcaatggcaagatacgaaggcgcaaaccaatcctcagtcagattaaatgcatctttgaacccatattcaccccaaagacggtcacccagttcttcatagaaatagcgcatggcctccaaagaatattccggtgtataagggatggatgaaagggccgcagtaggcgtaatcacgccgcgatcatttccggggctatgggccgaatagcctttatcaccgtcactggctgtcaatccccagcatttctcaccgtaacccttatatcccttcggattgtcgatacaataggcacggttaatcaaggtatgggccttcatttgttcctcgtagtcagcatagcggtccttcaagccatgcggatcaagccccatgtaagagtaatgagtaaagaacaaaggaccgcccttaccgttatcgtttccgagaggaagcctgatgccataatactcccgaccattcagaaaagtattcgcattgacccagcctttatgataaacactctcggcaatcggataagtaggagaagacgcacctaaaatataaataatgtggcactcgttatgacctttaatctgatggttcatcgcccacccgttatagggtgaccaatgccaatacatcacatcttgcccctgagtgaaaaaattccactctgcttggcgccacagattattaatcattccccggatacggttttccgtcggattatcctttataaaatactgatgggcagccaacaaaccttcgaacatgaaagcggattctacaatatcggctccatcatccttacggctgaaaggaatggtcttaccggttttaccgttcatccaatgtgcccacatgccgtgataactgtcggtattcttgtcgctcaagaaacgaacaatcttcagtatacgttcagcaccttgttcacgggtgataaacccgcgttctatgccgacaatgatagccatcactccgaatcccgacccaccaatggtagctgtctcggcaccaccgttactccgttcatgcgccaatccggattcaggatgggcaaaatcccaaaagtaacggaaagtttgcttctgaacgagggtcataagttcgtcgtcagaaagccgcttctgctttttctgtcccgaaatcaaattaaaagggtatagcaaaagtatcaaatatattaatattctcatcataatcattcttttagtttaagcacggactctgaaagccaagcttcttcagtccttgttggatttccggtatagacataaataaattccaaaggagacctgttctataattctctatcatacagattatcggcccttggtcaatggctatgtactgagtatcgtaccaatctgccgtcaaattaaaggcatctataaaaccataatctttccaaagtttgtctcccatcttataatagaagaaatgcagcgcttccattgactcctccggagtataaggaaatgcagacaaagcagctgttggagcaatgacccctttatcattagtaggtgaatgagctgaatatcccgtatcgccgtcacttgccgtcaacccccaacaagaagcgctataacccgtatatcctttaggattttccttacaataattgtaattaatcaacgtatgattgcgattttgcatccagtaatcggcatattggtcttccagtccttgtgggttaatgcctagaaaagaatattgagataagaacagcggtccccctttatccgaacctaaaggaagagtgatgccataataagattttccattcctgattcctccatttttagcccagcccgcttcatatacaactttatcgatagcatgtgttggagacgaagcagcaagtatataagtaatcagacactcattccatcctcttattgccaggttcttctcaaaaccgtaatcgggactccaatgccaatatagtacatcttcaccatttttccggaaccaagtccagtcaatagcttcccaaagacgggttatgtcggcacgcaacctgctttctacttccgtattttccttgaaataggctcgagcggcaagcaaaccttgaaataacaaggatgtctcaaccaaatcggcaccgttgtctttctcactgaaaggtttggttgctcccgttgcgccatttatccaatgtgcataagcaccatgataagccgtacattccttatcaagaaaagtaactatcttctgcactcgttcaacagcttgctgacgggtaataaagccccgttcagcagctaccagcatggccatcacgccaaagccggtaccaccggtagtaacgacatcgcccgaagtagtacgttcgcgcgccattccggaatattcatgcccaaagtcccagaagtacttaaaggtctgcttctgtaccaatgtcaacaagtcctcatcagggatacgctcaaacttgtctgtatcatccattcctgtcttaatcatacaaaccttgccattggaaagcagtgtcccggaagtggatttcacccccggattgacaatcaatttatacgatgacaagactttaaagcctcccttaggagtcaccgatacttttttctcttgcaggaactcataatcgcagcttacaggaagctcctcatgtttcaaagcaatattgttacgggctgaagcctcatctacagcatccgagaactccaaaacaatggctacattgggagcaacattctcaaatgtctgttggttttgttggtcacccacaatgatattcttcaactcgaaaggctgattcacttcaggttgattatcaccactgcacgcaaccaacaaaagacatactatgaaatataatactttcatcctatcatcagattaaagtgtagcttcattcttttccagagtaaatactctgaatttcggttgccgtcaacaccttgtcatataagcggaactgatcaagctgaccgggaaagttctttgcccaggtttgtgctcctgcacccgaagtaagactcggagtagtgctgaactgaaatgcaccaacagccaaagaagcgcctacattattaaacttcaatttcccacaatctggcaattctttggtaaagacaccctcaccattacgataaacagtaatggtagaagtattgccatcatacacaaaagccagatgcacccattcgctaccaaaaatatcatctatttttgcctcaacccatctttcatcattctcttttgctgtctgattgaagatatgaaccttgaaaaatgcctgagtctcgctattattattctccaagaagatgtcgaagttgccccagaatttaatagagttagggatagagaacaaaccttgcgcagaagtattcttagtggttctcatccagaaagctacagtcaaatcaccgatagtgggcatgttattttccaatatagaaggagtcttggccaaaatgtaagcattctcagcaccttgataggccatgccagcgattccgtcttccgcaaacttggcattaccgttatctgctaccaaaaatccccattcacctttatcccgaatgtcctcttcatcaaaaggaagatacatcttcaaaggggtagtaggtacttcacctgtactcttagggtagtcgaaagcaggatgatccatatcctgaaaacaagactgcatacacaatgcaaacaggcaagaagccacagatactatatattttttcataagtagttagtacatttatagattaataattgggattttgaaccaatacaccattcgacttgtcaatttcgtcttgcggaatgggcaacaaagcatgtctgtcttgataaccggtcttgcctgccgcatgaagtacctctttagcaataccccaacgaaccaagtcgtagaaacggtcgaactccatacctaactcaacacgtctttcatgacgaatggcctcacgcagttcattctggttgttggtcgtcacttccggtagaattccgatattattgccacgagcacgagcgcgcaccatctccaaatagttacgggcagaagataaatcacccaattcacaagcagcttcggaagccattaataccacatcagcataacgtatcagacgaatatttacccaatatcctccctttgtgaatttcaaacgcatcgccgggtccgtatatgccttcttgttaaagtatttagctataacatcagcattcgaaataggtttctcaccataaggcttgttagcaggtatggactctggatcgtccttgccgttgcgtataaaataaagcaaagtttcgtcttttctcggatctccctcttcaaaagcatctgccaattcttgagtagcggtgtgttgcccccaaccgagattccactcgcctgcgccacgtacaccctgaacggaagcaaactggcttcctatgtcattagaacctggttgtgattctgttgccgtacattgcaattcaaaaacagattcactacagttttcacctttttctcggaatatgtcttcataaggtgttttcagattatataaaccggagttaatcacttcttcagcggcagccttcatattcccccagtcattacgcatcatgtatgtgcgtgcatgaagagaacgagcagctccccaagtgagacgacctacataaagttgctcccacgttctgggcagactgttttcggcttccgtaaggtcagaatctattaattcatatatctttgccacagaagactttggaacatttgcctcagctgcatcataaactttaaagtcaatcaaaggcacttcaccaaaagcgcgtacaaggttgaaataacagaaagcacgtacaaacaaagcttcccccttattgacgaggtcaccttctgtcaatgacggattttggctcatctcatcaagcaaatcatttaccttatgtatcaatgaatagttatcattccaataactcttaatcatcccattacttgccaaatattcaaagtcatcgaacatcttgccggtagcagctccatcggacaatgtacttcctttctctgcgtcctcagaacgcataccgtggattgccaatgcagtattgccgcttgtcaaatgaaaaccgcgcaacttggcatacatattaaaaacctgtgtttcataagtaccaccagtcaaatcatcctctgtctgttgtccaagcggttttctatcaaacatatcctcacacgaagttagtgcaaagcttactgctaaaaatgctatataataaaatatcttcttcatagtctgtctctatataattttagaaagtcaaattaaaaccaatcgtataaactgtaggcataggatagcctccaccatcaataccaaacgaaatagcacttccgcccacttccggagtatatcctccattacggctccaggtcttgggattctgcacattggtataaagacgcagtgactgtaccttgatacgattcaacagtcgtttgtcaaagttataccccaattcgatattacggattctgaagaaactgccatcttcgatgaaatacgtggaagcctcctgatttattttgtgtgaagggtcgagcaagggctcccaattggaagtgccctctccatgccaacgattcaattgctctgtgcgataattcagttgtgcatagctactgcttccccaattacggtaaatttcatttccataaacacccatcatgtcaacagtcaggtccagattcttccatcccaaattaacattaaaaccgtaagtaaaatcaggagttggattacctatcattgtacggtcattatcagtaattttgccattaccgtcaacatcagcaaatttcaagtcacccggtgttaccgagccaaccgagttaatcggagagaaacggatgtcgtcttcgttctgatatacaccctcaaccttgtaaccatagaaatagccaatcggataaccttcggaaacacgtgagggaccactgataatattatagtctttgtttaccagtgaaagcaccttgttatcaatagtgctcaaattagcacctaatccatatctccaatcttccccaatcttgtcgttccaagaagcactaagttcaaaaccgcgattgcgaatctcacccacattctgtaatccgggaacagtacctgcaatacccggaatggaagtcaacatatcttttgttgttttgttataataaaccggagaaagctgcaaacgatcattgaacatatgcatgtcaaaacctacttcccatgaataattacgttcccatcccaaagtaggtgaaatcagtttgttggggcccttacccgcaatgatattgtcaccgaatacagctgatcccgaactaacaatggtggcgtatgctggataactggaaccggtattctggctgcccaacacaccccaagagcctttcaacttcaagaagttaattacattctggttctgcataaacttctcttcggtcattacccaaccggcaccgaaagagtaaaagttgtcccaagtattacctgtcttatagaaaacagatgagccgtccctacggaaagaagcattaagtaaataacgattcttgtagttatacaatgctctgaacaaataagacatggtaaatctgtcactctgagaaccaccattagttgccgtagatatatcgtcgatagtagagagccaccatctgtccgggtcatcgcccaccaaaatgccatagcctgcaagctggctgcgtccaccactcaaactggaagactcattgtaattggtggtaagaccggcagtcaatgtcaatccatgattgccaaactgtccgagataagtcaacacatagtcagactgtgcagcaagagaggtagacttgctttggttcacactttctctttcagtcaaccgttctttccccccctccacatcgggattataaacataaatcagcggagaatatgaacgtccctggctggaagcatagtccatagagaaagttgctttgaacgtaaggttcttcagaatatctatctctccgaacacattacctgccacgcgatagttttcagacttgttgtgagcaccgcgcagctctgtttcaataagaggattccacacttgtgcacgctggaagtcgggcagcgtatgtatcagtcccgattcaaggtcatgagtaggagcaataggagcagccttcaaagcaccatccacaccctttgcatcaggatacttagcacgaactccattaagctgaaaaccaaaacgcaggaaatcggttacgctatattcactgttcaagtttacggtaaacttattgagcttttccgttttaatggaaccttcttccatgacgtaacccaaacccaaataaaacttgctcttatccgttgcacccgtaatactcacattgttattggtcagaaaacctgtctggaatatctcatcctgccaatcagtattaccagcccattgagtataatcataagggtcgcttccttgagatatcaactgctcgttgtacagcatcttaaactcttcggcattcgtcacacctacacggtcataaataaccttccaacccactgaagagttgatgttgaccatcgtcttccctatttttgcccttttagtagtaatgatgattacaccattggcaccacgcacaccgaaaatagccaaagaagaagggtctttcaagatttccatagattcaatatccgcagtgttcagataattgatattgtccgtaaacagtccatctaccacataaagaggtttgaaaccgttaatggagttcgtaccgcgaacacggatttcagggtcttgtcctgcacggcccgtattcaccacctgtacaccggcaaccttaccctgtatggatgccagtggattggtagaaggcttagaagcaatctcatccgctttcacagtaacgatagaaccggtcaagtcgcgtttcttggcactaccataaccaactacaaccacctcatcaatgagctggctgtcctcttccatcttcacattgatagttgaacgcccatttacggcaatctcctgctcacgcatacctatataactaaaaatcaaggtagtattagatgccacatcaacaatctgatatttaccatttatatcagtaatactacctttactctcctgcccttttacacgaacagaagcaccgataacagtttcgcctgtcttgtccgtaacgacacccgaaatcgtaattttgttctgtgccatcgaagtaatggcaaacaataacatcacacatgtaattagtagatttttcttcattttgtattgatttaaaattcttttgcaaacataccggagaagttgatatatgtcaaaaaacaagctaccacaagagtaccacagttcaccagagaggtacatcattgctactaccgcatcacataaacaacagattataaggaagataaaaatacaataaatatttaggcactattcatataatagagcaagaagatagaaaagcaaaggagtttttatcctattctaaataactttatcccattcaagaacgtcatacctttcactgcctcaaaacccaccgtaaggtttccatcggttacgataacacgcaatttcttggataggcaacggtttccacctacttccatcgctggagaaaaatggttcagccaaagtcgaccgttgacagaaacattgaaaacactgccccggaaatcggcattgctgaggacagcagtaccccccaaatcataagtcacccgttcggaaggtgcattcaagtcggcaaagaggagttccacttcatactcgccgtcggacaagtcgaagcgataggctttgatgtctttgcgtttagtctgtagcaaaggaacattacgagtatttttcacctcggctgtggttccgatacgtcccggagaacgataaaaaacttcaccgcccacatagccccaacttccaggagtataaacttggtcgggaagccaacaaagatcacttttgtcatccatgaagaaacaattgctacctacgttcactgcaagttccaactgcctaatattggctgctgcgatatggcgaggctgtatctttacgaaaacatccgaaacctgctccaccttcttcccttgatagatgccggatgctacaagcgtgtttctccccacaacaagaggtacccgccacccagcatggcaattctcaataccttgtacagagagttttttcccattgacagacaactccaccctatccaaattggaatacaccttcaccggatgttccacagcttcgccgtccgaaactacagtccgatatttccagtcatccacagcaatgtgcagcaccggaatatccttacgcaaaaatgcctgaaaataataaaacacatctttagggcggcgatcattgtacatcagccctttattattaatgtgtggcgtagtctcctggcgactggcagaactgaaatcaatgaaattccactctgtggcgccgactatgaacggccgcttcatgatagcgggcaaataatattcgagatacaactgctgccactgcatggaaaaatcaaatatctgtggctcaagcgactgcaaacgcgaatcggaaccggcaccgaactcactgattattaacggacggtacggatatttacggtgttcttcatctacaaaacggtcgaaagacttaaagtcattctcataccagccctgataaaggttccaaccggaaacatcggtaatattgctaagaccaatctgattgtaaatctgattgccgtgataagccatcgtactcaagcgataagggtcttccatcttcaatgtctcttccagatgccgggcaagtgccaaagtgttttcataaaacccgttgagccgttgtttcttcacccgatactgcaactgaatgacagcttcgttcatatacccccacataatgacagaaggatggttgtaatgctgacggatcatttcgcgcaaggcgctcgtagcattcgtgcgaaactcgtcacccaaagcaatcaaatcgaccactggaatctcctcccataccagcataccgagttcgtcgcaagcacgcaacacggcatcatcctgcgggtaatgtgccaagcggacaaagtttgcacccatatctttcagcaattgcatatccctgcgatgcatttcatccgaaagcgctatccccatcggcatctggtcctgatggcgacaagctcctatcagcttcattggtttcccattcaatttgaagccttcctgcgcatccatgctgaaccagcgaacccccaaaggaacgcgcatctcatctttcaacaccttgccacgttcatctttcaaagagactttcacactatacagataaggagattcgggcgaccacagtcgcggattttccaattgcaaccgttctttgacagcaaatgtcccttccgcatccaacctgatattacgcaaagactgaaccacggattttccatcggcatccagcacttcgacattcaacttcaaagcagcacgctgtacatcacgattcaccaaagtcccgcgtacactgatttctgccttctcctcactcacgaaaggcaaatcgacataaacacctggagaggcgtagtcggtgaggctgatgtgttgtttcccgacactgatgagccatacatcgcgataaataccgccaaaaatcgtgaaatcgccagataaaggaggtatctgattgttctgattattgacgtgcaccatcagtaaattggagacatcgttccttactttatctgtaatatctacaataaaagcagaataacctcccttatgggtcgtgagtagctcgccattgagatatacatctgccagggagttgacggcatcgaatttcagataaagctgcttatcccacatctctgcggcttccagccggaactctttcttataccaggaagaagccctgcgatagttacgggtggaataggcatccgtattccaggtatgtggcagatgtacctgctcccaaccttcctcatgacatcgtactttctggaaccgattgtcattatacgcaacataataccagccgtcattgaaactctgaaccactcgcccggcattgacaaccggatacatggcggacagacacaatattaataaaaatattttcttcatgtttttcaatagattatattatctcacacaagtcaggcaaatactacaagaatattgcaaaacgtttgcagtgaaaatgcagacaatatgcagcaacaatgccatctcaacgcagtggctcgaatgctgcatattgccgtcttgagaatcagttagagtaacttgaacgctgctttctttacgtcctggctatttctgccaatcatcacctcaaagtcaccggactcgcatacaaaatcaagattgtagttgtagaacttcagcaattcgggagtaatcttgaaagatacttttttagattcaccggctttcaggaaaatcttctcaaagcctttcaactctttcaccggacgggttacacttcccacaaggtcacgaatataaagttgaaccacttctgcaccgtctctcttgccggtattggtcacagtcacggtagcagtcagttcgcccttatccgtcatgctagtcttgtccaaagacacgtcgctataagagaatgtggtatagctcaagccgaaaccaaaaggataaagcggttcattgtctatgtctatatagttgctgcggaatttctggaaccatgcaccgtcggcaagagggcgacccgtgttcttgtggttgtagaacaaaggaatctgtcccacgctcttcgggaaagtcgtagtcagcttcccactcggattcacatcaccaaacagtacatcaccgatggcaaaacctgcctcactgcccgcaaaccatacattcagaatggccggcacgtttgcctgctcccagttcagtaccagcggacgaccggtaaacagtaccagtaccactggttttcctgttttcaataattcttgtaacagcatgcgttgggtgtcggtcatttcaagattcgtgcggcaactgctctctccactcatttccgaagactcaccgagcgcagccacaataacatccgatttggcagccacggcaagagcctcgtccagcaactccttgtccgaacgattgtcacggtgtaaagaacgtccgaacatagtggcacgtttctcatattcggcatcactcatcaaattacagcctttcgcagtcaatatttcggctttatcgcctgctaccgccttcaaaccttcagccaaagaagttgcattcttcaatacagcagccacactccaagtacccggcatattactgcggctgtctgccaacggacctaccacagcaatagtgccttttttggccagcggaagcacattaccctcgttcttcaacaacaccaagctctccgaagcaatcttacgcgcaacagcacgatgctctttggtaaagatttgcttcttggcacgcttcacatcacagtatttataaggattatcgaacaagcccaacttgtacttagcttccaaaatacggcgacaagccgcattaattgcttcttctgtcacttttccttctgtcaatgacttcttgagcgtacctacaaatgcatcgctcaccatatccatatccacacctgcattcagtgccaaggcggcaacagtctgcgtatcgcccataccgtggtcggtcatctcagcaattccagtatagtctgtcaccacaaagccgtcaaatccccactgcttacgcagtatatccgtcatcaaccacttgtttccagtggcaggaatgccatcgacctcattgaaagaggccatcgcactgcccacaccggcatcaaccgccgcctgatagggcaacatgtattcattgaacatgcgctgatgactcatatctactgtattatagtcacgtcctgcctcaccggcaccatacaaggcaaaatgctttacacaagccatgatttcatcattacggctcatatcctttccctgataaccacgtaccatggcctgcgcaatggctgctcccagaaacgggtcttcaccgttgccctcggacacacgcccccaacgggcatcacggcaaatatccaccatcggactgaatgtccagcaaataccgtcagcactggactcaatggctgcaatacgtgccgattcttcaaccgccttcatatcccatgtacacgacagtcccaaaggaatgggaaacaccgtttcatatccatgaataacatccataccaaataagagaggaatacccaaacgactttcttcaaccgcctgcttctgtacatcgcggatacgttccacgcctttcagattgaaaagcccgcccacttcaccggcacgaatacgtttggccacattactacttttagcctggccggtcgtaatctcaccggtaaccggcagattcaactgacctattttctcttccagggtcatcttcttcattaaatcgtcgatgaaacgattcatatcgaccggagatttctgcgcatacgcactaacggcagtaaacaccaacaagactaaaaatgattgtaacttgaaaagtaaatgcttcatgtctttcatgcttttaatttatagaaatattattttgctgcaaataaaagaaaagcatgcgacaacctccacatctcgcactacaacaaaagtacacccatcactaagaaacaaaagaggaagtacaatattaatacttcccccattaatattccactgtaaaacagttatttaaaatttataaggaaatcagtcagactttcttccggaagcagattgaatttcttgcgcaaccggtatcttgcagcatcaaccccacgcgtggaaatgttgagcaacttcgctatctcctttgtcggcatattcaagcgaagcaatgcacaaaagcgcaaatctcctgaagtcaaatctgtatattgaagtttcagattccggaagaaattttcatgtatacggtcaaaattagcttgaaacattatccagctctcttcatcagacactatattattgttaaccaaagcgagaagcttatccaaattcttacgactatgctgtccggacaacttttgcttctgtatctcctctttcaatgaattcaaaaactcctgatgagcgatattcatcattaccacgctggacaattctttgcttttaaaacgcaaatcggcctcaagctgttccttttccaactcgataatcttcttctcttgccgttcaagctctgcctgatgggctacacgctgctgctcaatcacacgatccttctttttcttcacaaaacgataaacaatatattgcagcaaggccagcaggcacaaccctatcagaatgtagcttcccacagcccaataagacaaataccacggagacaaaatctcaaagggaaactctaccgatgccaaaactctaccagtatcatatatctccgcccgaaaaacataacttccataaggaagacgggcatactttttctgcaaattgcgtccatcgggtatccactgatcagaatacccttccaaccggtatcttactttataagtataatcgttataaaccggatagcacaatgtaaaactcactgtattaaactcatgttcgaccttgactcccgactgcacgaccaatgttttccgtttatcactgaattcctcagtaacctgcatctctgaaatccataaagaacgcctagtctgagatttatataacgaggaactatctgtttcaatacgggcaatagcattattcaagcaaagataggaatgattatttctcttgtcataaaccacgcttcctcgttcttccacagccagaccgtcaaacaaagaatatggaatccgaagttcgatattgaaagtatttatcgcacacttcaccaaatacacagtcctgtcgcccacaaaccaatagtaatctccgttcgcatgactcacagtcttgattcccttcaattccatcaattgttcattcattgtttcatagggaacaatcgaatcagtcatatcttcgtaagtatagaaatattccccattagaaaaaactacccgaccattgattttgaacaaagtaaaactcccacctttcacttctcccaaactctcatacttccgcacatcctttacctgcttcatatccgaatcaatccgaaagcgatacaaaccattccttaaatgtttcgcccaaatattcccttgatggtccacttctatatgacgaatcatgtgactgaacccacgtaaggaccgagtaaagcaatactctcccgaagcagtctccgtatataaattcagaagcgcataagctccctccaacaaaaaagattgttccttcaattcaattttttccatacacatccctccttttacatcagatgccagctttgatttcagtcctgatataaggaaagttcccttgttgtgcccgcagaaaatctgttttccccattcatcgacgaaccacgcttgttcttccaaacccggaactaattcagtctttccatccctaagccaataaagtccttgattagaagcaatataagcttcattttcccttaccaaaacatcatataccatgcctattttacgaaatggaggttcataataatagattaaagaattgttgtgtatataggcaataccttcatccaaagctgtccatatattgttgtcatcatcacaatataatctcaaaacagtattgttctgtagtttattatccgtattgaccttccaaatcagctttccttttttatccaacgcatatataccatcggatattgtgccaacaacgtagcaactgtctttggtcatcaccgcacgattaatggtatgcttcctgaatatatcatcacattcggtttcccatttttctaccctcccatctcgatagaggagaaaacctccctgattacgggtaagcattaaaacggcatcatcataaggaagcccagccaagacatcgctatttccaaatacctttctgggaataagttcttccattttcctgtcggaaaagacacaaagtccaccatttattctttgagaataaaaagtatttccaacctggaacaaattcagtggaaggttcttcattcgaataccttctaccgaatttccattataaaaaaagagagaaccgaatgattgaaatacaatttctccttgaacgcaagcaatatcccagatttcgtcattatgaaacgcaaaatctttcaccttatttttcaatgaatgatattcaagagtgtcataaggagtacggacaaaataaccgaattcttcgtaagagcctacataaattcttccatcttcactgatatatatagcacgcacaattccttttgtcggtaattcatacagccgccaagcacttccatcaaattccaacagcccactgttattaccgaaatacatcactcctctttcgtcttgagcaatggcccaattctgaataccggcattataatccgacaccgaatagttcctcactataggagaaaaaggtatgggtgaagcttgcagcaaactactgaaaaccaaaaacaagagaaacgttattgcaattctcatgagtactgtttataggtatttaccagcaaagataaagctttttgcgttttcgtaaaaacaaaatcgcagattatcctcttttatagaaagataacccgcgacaactgataactcactttattaattttcagcagttttctgttttcccaaaggaatagaaacacccaagtaagcattaacattcttcgtattcttaccaaagaacatatagtctgttcccgcaaagaaaggacccagtttcagtgccagaccgaaggttttaccggctccttgaagtacggaatagctggcagctacattgaaagcattcgtcggacggatgcaggcagagaaagtcagctcattcaaagttttcggtttggcaaaacgaccggtatacaaggcacccactaccagccaatcattcagtaaggcatattcagcgccaagaaccattgtagaagtcaatccacgggtacggctcttctcagaagcctcctctgtcttgagctgcaacatgtcatagttaagaatctcgccgctgttcacaatatccatgaactcctgctgcgaggccgggtcaagaagatcataagtctgctctgtattggctcgcgctatactggtattcgatttagaccatttgataaagcccaaatcaagaactgaagcagaaagtgtcaatttatccagtaacttgtaagatactcccaaatcaatagccccaccatatccggcaaaaccaaaactgccaaaatcgatttcatcgatataatcaccattctcattctcgggaagttctaacagctttgacgagttctccaaagttgcatccacttgaatggaagctttactcgtcactcctgaagagccgacagaaggagtttccacatgaatctggttgatgttcagctttaagttaccgatacccagcagcatcttcactttaccgcccacagccagccggtctgtgatattccttgcaaagccaaggccgacttccgcataggaatttatctcaagcttctgtccattaatggtttcgttaatacccaaatagtcagaaatattgtcaccaaactcccggctgctcatgttattcataaactggaacatggttttcggtatggcggcaccgatatcattacgcaaccccacattaactgaccagaagttctttcctttataccatccggcagacagaatgtcggtactcaaattcacattcaagttattggtagcatccagtcggttcataaagtcattgctcatgaaatagtcgctatcatcactgttctcaataatgtccataatatccctataccccagggaactggagttgacggtagcattcaacgaacctatcacgggaatattcagataaccgcgtcccggcatcaaggccggattgagctgcatacgctggttacttccttccataaagtaggaagtgcgcaggaactgggcttgtccggaaagagagaagcaaagcaacaataccacagacagccatactttcagagaattcaattgtttcataaccttgtcaatattttcattatcacctgcaaaaatataaaacaagttaataccctacaaacaacttaaccgaatagtcgtgtataaaaggcttatacagagactatccggtataaattaaggagcaaataaaagaatcctcttaagagtgtccttatactatttcatcataaacatgttcatttgctctcgtagcggtactcagaaaaaccggggctgtctcctttctttgttgcagagacattgacgtcactgccggagcagtcaacatttccttgtatttttccggagcagtgagtatctttacagcctctttcaaatcatcatcatctttcaactgctggataatgcttccacgctggaaataataacgcttgatgatttctaccgcaatcatgctcttgatgtccttggagaaatggtcaaggtcacggtccagattatgcgacaattttttctccaacgcttcaaactctttcgaagcatcagtcagatagccctcaaattcggccatctccttcaggttcttcagcatcttctctgtctgctggtcgtatttgaagtccgcctttttcaccatcgccttgaagtccgcataatcggcatctgtaatttcaaacttctctgctgaaggaatggtaggatgtttcaagcaatagtccgtagcataattgaaaataagattgtcattgacaagatagaacagaatgttgggcagcttctcctgcttcaccgcaatgtccggagtcacgcctccaccatcacgcacttcacgtccggcagccgtatggaacacggtagtaaggctgtctggaatacgtcccacactgccgtcctcattccggtgcttgtagtcgatagcctgcacacaacggccgctgggaatataatatttggaagtcgtcagcttcatggtaccaccgtatggcaacggacgggtggtctgcaccaatcccttaccgaaagtacggttaccgataatgaccgcacggtcaaggtcctgcaaagagcctgcaaggatttctgacgaagaagccgttccgccattgaccagaacagccaaaggaatttccaaatccaacggctcacgcaatgtcttgtaggtattgctggcttgcttaatcttacccattgtcgtcacaagtgtttttccgcgaggcagaaagaagttggctatctctatagattcatccagcaagccgcctccattgttccgcaagtcaatcaccaacgaagtcatcccccgtttcttcaagtccagaaaagcctgcttgaactccttggaaggattccccgagaaggtgctgagattgatataacctatattattatccagcactgtataataaggtatgaacggcaattggatggaacggcgcacaatgtcgaaatccaacggtttctctgtaccgggacgttgcactttcagcttgaagctggtacccacttgtccgcgaagcatctcgctgacttcttggttgttctttccggcaaggtcctttccgtcaatctccatcaaaatatctccggctttcaagcctacatcggcagcaggcatattctcatatggctcagatatcatggaacgttttagtttcggattccaagtaatcacagaacctataccaccataggaattcttcagcatctgctccaattcgctttggtcatcttccggataatactccgtgtagggatccagcgagtagagcatggcatcaatgccttcacggatagtcttgttcggatcaatcgtatccacgtagaacatatccaactctttcacaatggaattgaatatatccagattctttgctatttggaaactacggctatcaccactcttaaacccccaaaaacaaaaggctcctgctacaatcagcaaggtaatcatccagcgtatctttaaaattcttttcataatatgtctatgtgataatatgctaattaattaataaaatttcttccttgattttttcccattgtgctacctgaagctccgtacccaccacttgtatcacatctttggagagaagggagcctatcttgccacatttctccagcgagtaaccacacgtcagtccatacaagaaacccgccgcaaaatagtcacccgctcctgtagtgtccaccactttctctaccggagccgcttgtacctgcaccatctctgtacctttacgaatcagagaaccatgggcacccacctttacaatggctatgctacacattttggcaatgatatccaatgcttcctccggttccttacccgtaaaagcctttgcctcttcctcattggcaaaaacaatatccacatatttgttgaccaacagagagaaaaattcaaggtctccttctactatattgtagctcgccatgtccaaacatacttgtaagccggcctctttagccagctcaatggcacggagaatcatatcatggtcttgcaccagatacccctctataaataggtaagcatatcctttgaacatatccagcgaaagatcttccgccttcaatgtagaagccgcccccaaataagtgccgaaagtgcgctctccatcaggagaaatgaaagtagaggctacaccggacggaagggtagtggaaagcaataaatccgcctctgtcccatgctccagcagactatcccggaaaaagttaccataaaagtcattgcttacttttccgatgaatcccgtacccgcaccaaggcatgccattgcccgaattgcgtttccggcagaacctccgttagccagatgcgtctccatccggctgaaatactcactaattttcaagaacttatcttcatcaatcagagtcatacttcctttcgggagctgcatctccgtcaaaatattatcatcctcaatgattgccagtgcatcaaccaaagcattgcccaacccaattattttatccatcttcgatattttttttgcaaagatattgcatatttcaaaatatcctattacttttgcagcgcatttgagaaaaaacaacattcttccttagctcagtcggttagagcatctgactgttaatcagagggtccttggttcaagtccaagaggaagagcgaaaaaaattgaatgcatattcttccttagctcagtcggttagagcatctgactgttaatcagagggtccttggttcaagtccaagaggaagagcaaaaaggttcgtcaattaggcgaaccttttttgttttctccatcagccgcacttaacaaacaaacggaaatctttcatctttcatgaaattaacatatatttgtggaatatttatagggaatttatcccgaccttctgtctttatttgcagaaccatgaaatttaattcaaaaatacaactatgatgagaacagcccaactttttttaatcatcggattgactgtatgtacattttgcaaagcacaagacatacccgttctgccccaagaaaagttccggcaccatgaattttccgtcagctatggtttcctgcccattaccgatgccaacagcatggccgaggagtgcttcgctccggtactgagtttcggagtttatacacgcgaaaagacaaactactacggtgccctgaatatcagctacatttatagattcaaccgcaaaatcagcctgggagtaaccggaggaataaccggcaacaaagggacagccagcagcctttacgaagctttggatgaaaacaccaaagacaaccgaaggtatctgtatgttcttcccaccttccggtggcactggtttacccgccccaaattctctctgtatacctcagcagggctcggtgcctatttccttcggaacagttttggaggagaagtctttcacaagacaagattcgcttatcaattcagttttctaggcatcgaatacggaagccggtttgccttcttcacagaattcggagtaggatataccggaacaatcgtagcaggcggccgttatcgtttctgacttatgaggtcgctaccgccagtgtcaatacactgatgcgcacaccctccacttccttgagcgcatcggcacaagccgtagtggtggcaccggtagtcaatacgtcatctataatcagtacatgcttccttgcaaaagcgtcagcacgacgcagacagaagataccgtccacattctcccaccgttcataagaggatttacgggtctgcgtttccgtatgcctcatacgggcaacggaagcagtatccatgggaataccggtgacagcggaaacgccgcgggctatacattcgctctgattgtacccacgcattttccgcttacgcggatgcagaggaacggggacaatgacatccacatcactgaagaaaccggtagccgacaactccgccgccataaaccgccccatcacttcgccaaggtctttcctccctccatatttcaactgatggagaatgcggcggaaatcactccctttatggtaaaagaaacaagatgtagcatgttccagaggtatcttcccccaaaacatacgttccaccggattgtccttacgaagatgatagtttgtccggggcatatccatattgcacttcatgcagatgccctcttcaccctcttgcaagatagcaccacacacggcacactgacgcgggaaaaagagatggacaaaagaaaagaaccaggttttaactatgtttttcatcgtatagtattaaaaaaaatggcaacagagcaatacactccatcgccttgtttgctataatggcgagacctcacctgtcagcttcaagaacaacggatgcagcagtccgttagtggcaatgatatgatgtccgtccaaaaagtcgtcactaccgcaaaagtcagtgattcttccaccagcctccagcaccatcagcgcagccgcagaaaagtcccatttgccgataaacgcctcaagccaggcatcaaaacgtccggcagccacatagcagatggcaagcgcagcagaaccggtcatgcggatacctgccacacgcccgtaaagttcatgaatcaaatgctcaccggtacgtgcataccggtcggaattataagggagttccgtcactacaaaggcgtcctccacctgctggacagacgagacctccatccgttctccattcacataagcgccacctccctgccaggcataaaaacattcatcccggcaagggtcataaacaactcccagcaacagagaatccttgtcgcgcaaagcgatgctgacacaatagggagcattatcatgaatataattcgttgtcccatccaacgggtccactacccaacagtagggttcatcgtgatagacagcagaaccttcctcggctataaatccagcctcgggaagaagttcccgaagcgcagccaccacccgcttctccgactccttgtctacataagagacataatcatggggttgtttcttccgtatcgcttcccggctgaagtttttccgctcttctttcaagaaatatccggcttcacgggctatgcagcagacagactctgtcaatatcttcaaatcttccatctctctacatattagttccccgcagcctcttctgcctgccagtaaataagccgaccgcgctggctgaccgtccatcttccatcttccaaacgcacattctttgtatcatcatcttccacattccaaacatatccccccgcaggaaggccacggcgctccagaatctcattcggcatttcctcttccgaaaagaacagttccacttgggtagaatcgggactgaacaccagaaacaacatcttctccgcatcatccacagcgttcatacggactcctttttcccacagacggatacagtctttctgagcctcactccaagtatatccggcagatgcaatgcagccatgcttatccttatcatcaccaacgacatgtaccgtatcggcttgtccagcaacttccgcagtctttctactcttgctaccacaagccacaaacagtgctccgacacatagcaagcacataaatgttcctcttacattcatcttttctctttttaattgctttttgcttgacaaagttaagaacaaataaccaatttaaaaaaaattccattcattatcaatg

SEQ ID NO: 4439 - DNA, 34597 bp, Unknown
  gut microbiota DNA sequence
ctactatatcagcagggcttgggaagaagtgactactgaaccagtacaacattccaagaaccgtctactgatgtcggttataaaaagaaaaagcgtctagctaaatcaggaaaagacatcaccttctgggggaactccctttacccctggggaaactccttttacaatacgcggtaaaggtctttacaatatggggtaaaggacgttacaatatagggtaaatacgtttacatactgtggtaacggcttttacattggctggtaaatagcaggtaaatacaatgtgctgatagttagtgttatgaccgcttttgtctttcgtatagtatgtccgtaacttggattatttatagcaatccttcgtcgttgaagctgtaatggcttccgtccgtgacgatgacgtggtcggtcaggtgtatgttcatggtttgggcggctttcctcacgagttccgtcagccgctggtcgtcgttactggggtgcgggttgccggagggatggttgtggataagggctatctgtgtggcgcgttgcagcagggcttcgcgcaggatgctgcgcacgtcggcggtagtctggtcgatgccgccgcggctgatgcgtaccttgtctatcactttggcggcgtggttcataagcagtacccagaattcttctgtggcaaggtcgcagagcaggggatggaacagctcgtagatgtcggcggaagagcggatggcggtacgtccggagcgttcctgcagcttgcggcgtttgcccagttccagggatgccatgacggtgatgcttttggcggggcccatgcctttgaatcgggagaagtcccgcacctcccatttgcccaggcggttgaggtcgttgccgcaggcggcgagtatgcgctgcatcagtgtcacggcggtttcttccgtattgccggagccgatgaggatggctagcagttcggcatcgctcaaggcttccgcccctttctgcatcatcttttcccgcgggcggtcctctgcagcccactggttgatattcagtttctccatatcatccctaatccttaacccctaatcctccttatttgtaaaaattctttttgaatgcctcgaactcgtccttgccaagtatgcagcggttccaccaggcgcgcaggaaccccgtcccgtatccgatgagctggatgaaggaggcggcgacggagtagagcccgatgctgaggctacggttccggatagtggagtccatgcataccagaagcgcataaagagcgatgggcagcaggctgtacgggcagaagggcgttcccagcaggaatatggccactcccagggtaaatgcagccggcagcaggtggacgagcttcagcgattccggatacttcttgtacagattgatgcgggcaatcccggaattgtgtacctgcttgaagaattttcggaagtctgtccgtcgcttgtggtatacccaggcaccggggaacagccggcatgtatatcctcccttgaagattcggatgctgaagtcgatgtcctccccgaagcgcatccgcgagaatccgcccagggcttggtacacttcctgccgcacacccatgttgaagctgcgcggatagaacttgtccatcttcttcttccccccacggataccgccggtggtgaagaaggaggtcatggagtagttgatggctttctgtatgtttgtgaatgattcgtgcgcgcggtcggggcctccgaaggcatcggcggcttcgtgctgcagctcttcttccacagcaaggaaataaccttcgggcaggatgcagtccgaatccagtattatcaggtattcgcccttgcttcgttccaccccgtagttacgggtctgcccggggccggagttgggcttgtcatagtaatgtacgtccaatagttcctgatacttctctgtgaccggcttgcaggggatggaggagccgtcctccaccacaatcacttcaaaatccttgaaactttgctgcgtcaggctttgcagcagttcatccacctcatcggggcggttgtatacggggatgatgacggagtatctcatgggtatggctttatgttttggttgtctccgcaaagatatatcatttaagctttgtagatgaataaatggaaagaaaaatccccggatgccaagtggagcaccggggatgatatgaaaagggcatttgcctgatttccaaaagggcttatgcttttacgcggcttacgtaagaaccgtcgcgcgtatcgatttcgatagtctcgccttcgttgatgaacaaggggacgcggactgtggcgccggattctactgtggcgggcttcagcgtgttggtggctgtgtcgcctttcagtcccggttccgtataggtaatcttctgctgaaccttgatgggcacgtcggcatagagcacggtttctgtggaagcgtctgataccacgtctactatcattccttcgagcaagaagtcaacaccgttgatgaggtcgtgggcgatgggaatttggtcaaaagtctcctggttcatgaattggtagttgtcaccgtcatgatagaggtattggtggggacgacgttctacacgcacgtcttccagtttctcaccgatgttgaaacgacgttccagaacgtagccgttcaccacgtctttcagcttggtacgcatgaaggtattaccttttcccggctttacatgcaggaagtcgatgcagaaatacagcttgccgtccatgcggatgcaagttccgattttaatgtcttgggcattaatcatacttatagtctttaatattattatattggtatttacttctttagtgctggtttgcgggtgcaaaagtaatggaattcggtaaaaaacacaaaaacttttgagagaaaatgagttatctcttggtttatttgaaaaaagtacctatttttgcagcccgaattcgtgagaataataacataaaacaagatacagtaatgaaaagaacatttcaaccctcgaacagaaagagaaagaacaaacacggtttccgtgagagaatggctacagcaaacggccgcagagtattggcagcacgtcgtgctaaaggcagaaagaaactgactgtttctgacgaatacaacggagtaaaggcataataggccgttctcgttcgtattaaagaaataagggagctgcaaaagactgattctggtcttttgcagcttttcttatgtattgtgcccggttctccggaaaaaactattgccaactccgtgtactatgtggtgaaaattgtatctttgtcccaaataatgcattatcgattatgacaataaaagattttttctctttccggcagaaccggttcttctgggcgaacatccttgcgatggccgttgtggtagtgggattgctgttcggagtgctgaaaggactggatatatatacccgccacggcgaggctgtgatagtgcccgatgtgaagggtatgggagtggaggaagccgagaaaatgttccgtaaccgcggcttggtctgcatcgtttcggattccagttatgtcaagactcttcctgccggctgcatcctcgaatataatccggcagccggacaaaaggtaaaggaaggacgtaccatctatcttacaatcaatacgattgaagtccctctgcacatagtgcccgatgtggcggacaacagttcgctgcggcaggcggaagcgcgtattctggcttcgggcttcaagctggccgagatacagtatattccgggtgagaaggactgggtgtatggcgtgaagtataaggggcgtcagctttccatcggcgagaaagtgcccaccggcgcagtgctgacgctgatggtgggagatggaggcgccttgaaggcagactccctgggagtggatgccgtgggaggtaccgttgaacccgtgttgtccgaagactccgcggcagatgagtcctggttctgataaacatctgactccaatcgtaaattgtaaatagtcaaattgtaaatgccgtgatgatagaagaattgccggatgatatagataatgatgagctggacgacgtagagccggtgggtgacgaggcgcaactctatgaacacttccgtgtggtggtggacaaggggcaggagatggtgcgggtggacaagtatctgttcgaccgcttgacgaactcctcgcgtaatcgcatccagaaggctgccgatgcaggcttcgtgatggcgaacggcaaggctgtgaaaagcagctataaggtgaagccgatggatgtaatcactgtgatgatggaccgtccacgctatgagaatgaagtcatccccgaagacatcccccttgatatagtatatgaggacaagtatctgatggtagtgaacaaacctgccggtctggtggtgcaccccggtcatggcaactatcacggtacgcttgtcaacgccatagcctggcatatgaaggataatcccgattatgatgccaatgacccgcatgtgggactggtgcaccgcatcgacaaggacacctccggcctgctggtgatagccaagactccggatgccaagacgaatctcggcaaccagttcttcaacaagacgacaaaacgccgttaccgggcgctggtctggggaaatgtagagcaggatgaagggaccgttgtcggcaatatcggtcgtaatcccagagaccgcatgcagatgaccgtcctccccgacgaccagggaaagcatgccgtcacccattaccgggtgctcgaacgtttgggatacgtcacactggtggaatgtatccttgaaacgggacgcacccatcaaatccgtgtgcacatgaagcacatcggacacatacttttcaacgacgaacgttacggtggacacgaaatcctgaaaggaacccacttcgctaaatacaaacaatttgtaaacaactgcttcgacacttgtccgcggcaggcattgcatgccatgacgctggggtttgtgcatcccgtcaccggagaagaaatgtacttcacttcggaattgcccgatgacatgacccggctgatagacaaatggagaggctatatcagtaacagagaattagaatgaaacgcacgattgctattgtagccggaggagatacctccgaattccacgtctccctgcgtagtgcacaggggatttactccttcatcgacaaggagaagtataccttatatattgtagaaatgcacggactggactggcatgtacagctgcccgacggcgctaagactccggtagaccgcaatgacttcagcttcgtgctggatggcgagaaagtgacattcgactttgcctatatcaccatccacggaactccgggtgaggacggccgtctgcagggctattttgatatgctccacatcccttattcgtgttgcggagtactggcagcgtcgctcacgtacgataagtttgcctgcaaccagtatctgaaaggtttcggtgtgcgcattgccgaatcgttgttgctgcgcggcggacagtcggtaacggatgaagatgtgatggagaaaatcggtctgccttgcttcattaagcccagcttgggaggttccagcttcggcgtgaccaaggtgacggcgaaagagcagatacaacctgccatagccaaggcatttgcggaagcgcaggaagtactggtggaggcctttatggacggaaccgagattacctgcggctgttacaaaacaaaagacaagtccgtagtgttccccattacggaggtggtgagccacaacgagtacttcgattatgaagctaagtataatggtgcgtctgacgagattactcccgcccgcatctcggacgatttgacccgccgggtgcagacgctgacttctgccatttatgatatactcggggcctatggcattatccgcgtggactatatcattaccgaaggggaaaaaatcaatctgctggaggtgaataccacccccggaatgactgccaccagctttattccccagcaggttcgtgctgccggaatggagatgaaggatgtaatgacagatattatagaaaacaagtttaaggattaatcattattcattatgaatgcgaacgtggaatttgatgaaatccgtccttatcatgatgaggaacttcctcaagtctatgaggaactgattgccgatgcggcgttccggcaggcagtggatactgtgatgcctggtgtaccttttgaagtctggtcgcagaaaatgcgcgcgtgtaaaaccaagctggaatttcagaagaccttctgctatgggcttctgtggaaattggcgaaggaggctacggatggattgactttggaccataccgcgttgccggcagacaagtcggcggcgtatacctatatctccaatcatcgcgacattattctcgattccggtttcttgtccattcttttggtagaccagggtatggatacggtagagatagccattggcgacaacctgcttgtctatccgtggattaagaaattcgtgcgtgtcaacaagtccttcatcgtgctgcgtgcgttgaccatgcgccagatgctggaggcttccgcacgcatgtcccgctatatgcattataccatcagtgagaagaaacagtctatctggattgcacaacgtgaagggcgtgccaaggattccaacgaccgcacgcaggacagtgtgctgaagatgctggcaataggcggtgaaggcgacgtcattgaccgcttaatggaaatgaatatagctccgcttgccatttcctatgaatacgacccttgcgacttcctgaaagcgcaggagttccaactgaaacgggacattgaaggctataagaaaacgacggctgacgacttgctgaatatgcagaccggactgttcggctataaagggcgggtacatttccagacgggtgcctgcatgaatgatgaattggcgaagatggaccgttcacttccgaagcccgaactctttgcacgcatgtctgcactgatagacaaacgcattcatgccagttaccggatgtatcccaataattatgtggcacacgaccttctcgaggggaaggaggatttttccgaccattacactgccgaggataagcagcgcttcacggcctatatagaacaacagttggagcgtatctccattcctaataaggacgtggactttctgcgcggaaaaatgctgctgatgtatgccaacccgttgaagaattatctggcggctataaaagaatgaatacatgaagaagtactgtgattggtggcttttgcctttattggcctgtctgttggctggttgtggcgatgatgattatcattatccttccgtgaagctggaattcttgactgccttttcgggggctgacggctatctgcggtctgttgtgacggatgaaggggaaaccttgccggtagtggaggacaagacaaagacgaaaatagaggcaaacgcttcggtacgtgtcatcagtaattatgcttcggaggtaactgccgatggaactgccggtgcggtgctgtatgccttgagcggtgttctttctgtcgttccccaaacggtcgacaagttcgaggagggcgtcaagacagaccctactgatgtactgggtatctggatgggactcgactatctcaatatgacactgatagtcaatgagaatggtgaacataagttccattttattgaggatgaagtgattgtggatactgctaccgggtgtagtgaagtatatctgacgctgtatcatgacgcaaaggaggaggtggtgtcttataccaggcgtgcctacgcttccgtacctttgcggcagtatgcggcagaggatatacagaaggttatggttcatttcagtgtgcacacttattccggtgacatcaagacttacgattttgtttataaccctgactaaaatgaaatattcgatgaagacattgttcgcgggcctttgcctcgtttttaccaccctcttttcctgccagcagaaggagggacagttcaagtctgtttcggtagatgacttttccacattgatagccaatccggaggtgcagcttctggatgtgcgtactgttgccgaatactcggaaggacacgtgccccatagtatcaatatcaatgtgctggatgagtcgtttgaaacgatggccgactccactttgcagaaggacaaaccggttgcagtatattgtcgtagtggtaagcgtagtaaaaaggccgctgccatactgagcaaaaaaggatatataatctatgaccttgacaaaggtttcatcggttgggaagaagcgggcaaagaagtggaaaagtaatagcggtgtagctgaaatgcatttgctataatttctttttaggcgaggattacgcggatttcacggaaaaaatttaagaaaagaatccgcgttttccgcgtaatccgcgcctaaaaagaataaagtagtcttgtcctctggttagaggctttcaagcagtctctttagcaccactgttgctgaaatctcccggttggccgcttcggggattacgatggactgcgggctttctatcacatcatccgtcacaatcatgttgcgtcgaaccggcaggcagtgcatgaagtaggcattgttggtaacggccatctggcgctcgcctactgtccaggtgcggtctttgctcaatatttgtccgtagttgtcgcctgtataggccgcccagttcttggcatagacaaaatcggctccttcaaaagctttcatctggtcatattctacgcgggcatttcctacgaacttggggtcgagttcataaccttcgggatgtgtaatcacaaagtcataatcagttgcattcatccattcggcaaaggagttggggacagcctggggcaatggacgcggatgtggagcccatgtcatcactactttggggcgtgccgtcttcttatattcctcaatggttatcaggtcggcaaaactctgcagcggatggcgtgtggcagcctccatggagaataccggccggccggaatgcttgatgaactgctccagtatcacttcgttgtaatcgtcttccttattttcgaagcgtgcaaaagaacgtacgccgatgacgtcgcaatagcagcccatcacgggaatggcttccagtaagtgttccggtttgtcaccgtccatgatgacaccacgctctgtctccagtttccaggctccctggttgatgtccagtacaattacgttcatgcccagattcaatgcagccttctgtgtactgaggcgggtacgcaggctggagttgaagaaaatcatcatcagcgttttgttacgtcccagttccacatatttgaaacggtcttttttaatctcgaatgcttcgtccagtgcagacttcaggttaccgatgtcctgcacgcaagtaaagttcttcatatttacagtctttttagtgtatctatatctttgttattcggctgtcaaggtctggtctgtccggaaccttcgacaatccatttgtatgtggtgatttcttccagagccatcggaccgcgggcgtgtagcttctgggtgctgatgccaatctcggcaccgagtccgaattgtgcgccgtcggtgaaagaggtcggtgcattgacgtatacgcaagcggcgtccacttcccggcagaaccattcggcacgtgtcttgtcgtccgtaatgatgcattcgctatgtttggaaccgtacttccggatatgtgccaatgcttcctggaaagaattcacggttttaatggccatcttgtagtccagaaactctctgccgtagcagtcttcagtggcaagtctcaacagctcgacgggatatttgtcacgcagactgtggtaggcgggttcatcggcaaatatctctacattgcttgattgcagcggcaggcataggtcgggcaaattagccaggctgtcggcttcgataatcaggcaatccaaagcgttgcatacactgacccggcgtgtctttgcattggcaatgatagatggacctatgcttatatcgccatagcggtcgaagaacgtatggcatacgccggcacctgtctctataaccggtactgtggcattctggcgtacgaagtttatcaggctgctgctgccgcgcggaattatcaaatctacataatcgttggcatgcagtagttcggcagtcgcctctctgtcggcaggaagcagttccacgatatgtgtatctacgttgaaatgctccagtacctcgtgtatcacgctgattatggcacggttggaatagtctgcatcgcttccgcctttcagaatacaggcattgccgcttttaaggcagagtgagaatacatcgaaactgacgttgggacgggcttcgtagataatgcctatgacaccgaaaggtacactgaccctttttatcttcaatccgttgggtaatacgttctctttaaggacttttcccaaaggagaagggagggcggctacgttgcggatgtccgcagcgatgtcctgcaaacggctttttgtcagtttcaggcggtcgtatttagggtcggtagaaggcatacgctccaaatccttctggttttcactcagaatgaagtctgttttgtttatggcagcgtctgcaacagccagtaatatttggttgatttctttgtcgcttaacgctagcatgttacggctggcatcttgtacggcgacaaaagttttgtttaagttcattttcttactgagtatagagtgataaatatgcaagtatgaatatcgtggatagtatccgtctgtgtcctattctatatataggtagtcgtagtgcactacgggtttctttccatgttttcccattgtttcccgtgcctggctggagtcacagttggcttttcccacaccgatgggtttaccgccgaagtcgataatccgtacgatgtcgtccttctcgaactcgcctataacgtcagtgatgcctaccggtaggatgcttactgctttgtccgagaagagcagttcggtggcacaatgattgatgtgcagttcgcctttggcaaacccttcgctgtgcgcaatccatttcttgatgctcgataccggttccggagacggaatgaaacgggtatagtttaattcttcattattcattattttcacgaggatgttgtcccgcttcccgttggctatgattactgtgatgccctcatccgccactttgcgggcaatgttggtttttgtcagcatgccgccgcgtccgaagctggatttggaagtttgtatgtaggaggagaggtctttgccttgttctatttcacggatgacttgagactccgggtcggcgggtgaaccgttgtagataccgtctatattgctgagaatgattagtgcctgggcatccatcatggaggctatcaggccggacagctcatcgttgtcggtgaacatcagttcacttacggagatggtgtcgttctcattgacaataggaatgacgccgttctccagcattacggtcatacagtttttctggttgaggtaatggcggcgggtggaaaagttctctttcattgtgagcacttgtcccacggggatgccatgctcccggaacagctcgtagtagcggttgatgagtttggcctgccctacagcggaaaagagctggcgctggtctacgctgtccaacttcttggtggggtgcacttcactacgtcccgaagcaacggctccggaagaaacaagtattatttctatgccggccttgtgcagctcggctatctggtccaccaaagcggacatgcgggtgacgtcgagagtgccgtcacgacgtgttaaaacattgctgcctaccttgacagcaattctattgaaatcaatctccattttctctcttttcgtattcacggactacttccatggcggcttcgtagtccttctcattgacgagaacggaaacatctaccgcagtggcaggcagtacaacgtttactaccattccgtcttttgttacagcttcaatatcactatttcccagcaggctctttacgagttctgcttcccacggtgaaccggtgaacacctcaacgagtttgcttttgtcttcttctttcatgatggtatgaatttagaggtttctgtcttacaaatataacaaatgtttttgttttaatgtttaatgctgacgaatttatagttcaatcctctcaactcttatcgattcattcaggaaagtagaagccgattctgtgaatttctcctccgattccgtggtgcggtagacgcatcttccacctttggtacattttttgtccatttccggatggcggtgaagatagtctttcaggctgtctgctaccagttccccctgagtgacggtcgtgatgccgtcgggcatgtattgctgtatcttgggcagcagcaacgggaagtgcgtgcagcccagaatgacggtgtctatctgcgtgtctttggccagcaggttgccgatgtttttgcgtatgaagtagtcagtaccctcaccttgtgcctcattgttttctacgagggatacccatagagggcaggcttcaccgctcactttgatgtcggggaagagtttatgcacttccaacggataggattcagacttgatggttcctgccgtggcaagcactcccacatggcggctttgggtaatgttccctatgcattctacggttgggcgaattactcccaacacacggcgcatagggtcgaggcgaggcaaatcattcatttgtatgttgcgcagagcttttgccgaagctgtattgcatgccagaatgacgaggtgacaacccatctcgaacagtttggtgactgcctgcaaggtgaactcatagacaatctcgaacgagcgggttccgtaaggcgcgcgcgcgttgtcgcccagataaatgtaatcatattggggaagggcttcccgtatcttgctcaggatggtcagtccgccatatccggaatcgaatattccgatgggaccggctgcagaaggtaatgtctgtttcatgctttctaaagactatgtaccatgcaaagataatgcaaatttctcagtaatgtataaaaaataagcgcggataaaactatccgcgcttgctctatcatagataattctattatttaatgcccaattgcgttttaactttggcagttacatcaacgctctgtgctcctacgaatggtatcggggtacgggccaagtcgaagatatagaccacgccttcagccttgccgacagcctggatggcttcgtccagtttctgatagatgggagccatagcatcttgctgtgctttctgcatactttgataagcttcttgttggaactgctcttggcgttgagccatatcctgcagctctttctgacgtctttctgcaatgtttttcggcagagagtcggcttgtgccaggaattcctgatacttcttctggaattcttcgttggtacgctgcatttcatcctggtattttttagacatggcgtccaagtcagcttgggctttggtaaattcaggcataacagcgattacatcttgagaattcatgtgagcgaatttagcttgcgccatagctcccagtgggagggcgaacataactacgagtagtgcgatttttttaagcataatgtttattatttatttgaatgattattcgtcgggggcaaatatagcgcaaactgaacgcaatacaaaataagcaagcttatttttaatcttgaatgcagtctatattctgaaacaaatgtatgaaattaatttgaatatcccagttttgcaagtacttcattgctgacgtcaatactcggcgaggcaaaaatgatacttgatgcggaagcacggtctacaactaccgcatatccgttctgtgtcgcaatttcctttacagcattgtatatttcatcttgaatgggttgcatcagactttcacgttttttatacagttcgccttccggaccgaagtatttgcggcgcagttcggctgctgatttctctttagcgacaatctcttcctcctttttgcctctctgtgtttcagaaagggaagcaatctgggactgatagttcttgtacagagtcttggcttcttcggaaatcttttcgacttcactctgccattgtctggaggcttgctccagttgttcattggcacgttcgtaggcaggaatattttccaggatatattccatgtcaatcaaggcgaacttctgtgcaccggctgttatacttactgcaaacagcgtaaaaaggatcaataaactcttcttcataacgatactgcattaattgtcaattatcaattgtccattgcttagaattcttgtcccaggatgaagtggaactggctaccgccatattgcgaggaacccattattttgtcgaaaccgtaagcccagtcgatacccatcataccaatcatcgggaggaagatgcggacaccgacaccggctgaacgtttcaattcgaacgggttgaacttattgacatcatgccatgcattaccggcttccacaaacgttaacgcataaatactggtacttgtttcgagcatcaaaggatatcttaattccagtccgagacgtgtataggcataaccttcagaaccgtatggagtcaatgaactgttctcataaccacggagggcgatgctttctgtagcatagctggagtagccggtcataccgtcaccacccacgtcaaacgtttcgaacggagactttttgtatttgttgtagtgtcccagcaaaccgaattctacacgtcccatcagcaccggagtacgtttgacggtaatcgggtccatcaacgggatgtagactttggatttgaatttccacttgtggtattcaatccacttgtgcatcttgttcatgtcttcctggctgctggtgctgtacttgctgtaatcggtaccgtcgaacagagagaaaggcggtgtgatttgtgcagacaacgagaactcggaaccttggcgcggataaatcgggttgtcgatagagctacgggacaaggtcaggttgaggctgaggttattacacttaccgttggtaaccgggaagtactgccagtcactcagaacatagcgttggtaagacaactcggctgtgaactggaagtagtcatccggccacttcaaacgcttaccgaacatcactgcaagaccatacatctggatagatttgtccgggtcgtaataattctcgtagttgttgtaattgccgtagttgtacataccgtagccatacataccgctataatagctgttgtaatagctgttcatgtaggctgaattgtaataacggctactgatgtcggtctggcgggaatagaaagccgatacggagaatgcattcgggcgtttaccgccaaaccacgggtcgtagaatgaaacgctgtatgactgatagtatttggcattggtctggccgctgatggtcaatgtctgaccatcaccttgcgggaggataccgcggtagttctcacccggatgcagcaggttggacagagagaagttggtgaacttcagacttaacttaccgataatacccgtttgtccccaaccggcggagaactctacctggtcgttggctttggatacaaggtcataaccgatgtctaccgtgccgtcttccggtctcggctggatgtcgggctggatttgttcggggtcgaagtgtcccatctgctggatttcacgcatggaacgcatcaggtcttcacggctgaagagttcgcccggacgggtacggagttcacggcgtactacgttttcatacaaacggtcgttaccgttgatgctgactttattgatggtagcctggcgaccttcgtagatacgcatttccaggtcgatggagtcgcccacgatgtttacttccaccggttcgaggctgtagaacagataaccgttgttgtagtaaaggttaccgatggcatcgtcatcggtcattgtacgctcttcaagtaacttttggttgtagacatcacccttcttcatctggaggaggaagttcagttgttcggaaggatacagtgtgttacctacccaggttacattgcggagatagtatttctgtccttcctcaatctgcatgaagatgtctaccgtgcggtcatcgtagggcttgatactgtctgtcacgatgatggcgtcacgataacccagttcgttgtatttgtcgataatcagctgtttgtccgcttcgtagttgtcctcaatgaatttcttggtgcggaacagattgagcaacttgcccttttcgtttgttttcttcatcacacgcttcagcttcttggtcgtgagggcctcgttgcctacaatggtgatttgatgtactttcactttctccttcttgtcgatgtcgatgttgacaatcacttcattcttcttttccggatcatcacgttgggtgatgattacatctgcattcttgaagcccttgtcgtcaaaatagcgctttatcaaggtcttggcgcggtccaccagattaggtgtaatctgaccgccctttatcatgccgattctgctttccaggtcttcacgctctgacttcttcacaccgttgtagcgtatgtcggaaacacgcggacgcatggtcagatgaatggtcagccaaatttggtcaccttcaatcttgtctgctgtaatttccacgtcagagaacagaccgtggcgccagtagcgcttacaagcttgtgtaatctcgtcacccggcacggtgatagtctgccctttggatagtccggacaatccgacaattacataatcctcatagttctgggctccttcgaccttaatgtcggctatttcatacttcttgggtgttcccgaatagagtataaccggcttttcggtttcatcggtgttgtttacgtcctgtgctgctgttgtcagtgcgcagccgaaaaggcagacaaacgttacgagtatggagaaaatacgatagtgcatctttttatttactattttacaatttactatttactatttgtgtgtccggtgattaattgatttgctcgctggtcttgccgaacctgcgttcgcgtttctgatagtcacatatggctttgcgtaattcttcttcacggaagtcgggccaataggtatcacagaaataaagttccgaataggcgcattgccagagcatgtagttactaaggcggagctctcctccggtacgtatcagcaggtcggggtcgggcatgaagtgggttgtcagatgacgggatatgagctcactgtcgatttgttcgggtttcagctcacctttctgtaccaggtcggctatttgccgggcagcttccgttatttcccagcgggaagagtagctcaatgccagtaccaggcacattcccgtgttgtgggaggtgtgtgccacgcaagtgttgagccgttgctgtacgttggcaggcagtttttcaatatctcctattacccggaaactgatattgttcttcatgaacgtctcttcctctatggagtcgaagagcaatcccatcaaggcggctacctcgtccgacggacgattccagttctcggtagagaacgtatataaagtaaggtatctgactcctaatttagcggcttcctctgcaatgacgtgcacagtctctgcgccggcctgatgtccatagctgcgttcgtgtccacgctgcttggcccaccgtccgttaccgtccatgataatcgccacgtgctggggtatccggtttagatcgatttcttccttatatgacatcattattattgtatttcgaagcccaatctgttaagacgtccgcgccatacctcattcttggtgccgttgccgccgaatatcacccaaatgaagtcccgtttgtctgccggggccacagttttgtctttcgtcggttccactataatggagtacgcgcctttccctttgaattcctggggtagcaggaacttggtttctgtcttgctccacgcaatgcctgtgatggagttgtagatggcgtcaagttctcctccaaagcaatagaacatgtcgccatagtacataatggcagggttgaccatgccgggacaagatgtgtcgtacaccgtgttagccaggcttgcccagcctttgccgtccaatgagaaccagggtattgtctcttgttcgttggccagcggcattcctgccagaaccaccttctctacaccattgccggtgttggtctgggtggtggatatgttttcggtagggaatcctgccgggacttcctcaagggtaaggttgtcagccgtgttttccgcttcccaattctttccgtctttacagatgttgaaatattgctttccgttgatttccacaatacccgagagccggtcggagaaaccattaatgaggactatgacattgtctcccaatgtagtgacttctgtccaggcgccgccgttggtagagctgaatactctcttgctttttgtaaccatgtagagtgcattgttatactctacggcagatgtcagctttacgtctgaggggaggttgctgacattgactttactccagttgtatttatcgggcgcagtcgatgtcttgtaagcggtagtgttggaagtgtagacaaacaactcgtctccaagtataaccgctttttgctggcctaaattgatggtattggagaatatattccccctattctgcatgtctgtccagacgagtgagtccgggtcttgcagatgtacattaactttcaatttatattcgcggactgtaacaccgtcggcggcatgtgctttgaacagcatgccggcatcgttgttcatggcgggtctcaaatccacggagtccgacatgacgaataccgtgtcggtaggcgagcctgaagttatccaaccggtaacggtcatagtatcaatcagaatacggtcaatgatggtatctgaacctacgggcaatgaatctctgttatagatgagcctattgagctggtcaattgtaaatttgtaatgtttgccatgtatggtatcgataccaaaagcatgtatagtagcatcggagctgaattcataattgtcgtcagagtcaaggcatgaacttagagcaaatgacacaataagaaaactcacaattactgatagaaactttattctcattttgaaagttagtgtttatttacaagttgcaaaaataggaacatttttttctataaacagctttacggggaagttttatataaaattatagataatatccccctttttctcgataaaaaagccctgaaatgaggctattgactgtttcttgaggccgtataatggcgaaaactcctgccgaaagaatactctgttgcaaatggatatccgtcactgatttcgggtgctttgacgccggaatgaagaaggtgcggagcttcttccacaaagatttcgtcccacaatccggcatcaatgaaggattggagcgtttggctgccaccctctaccaaaagggattgtaatccgcgtgtatacagcgtttccatgagttcggggagtatattccgtcggtagtcgctgactggcagatactctacattcggtagcggagcgtgcggggcttctgtaaaaacgagggtcggcacgctaccgtcaaataggtgaaggctgggggatagcttttgttgccggtccagcacgatacgtaccggtgaacggccgtaccaatggcggacattcaggcagggattgtccagttcagccgtacgggtacctactaatatggcactgtgctctgcccgtttcttgtgtaccagcatcgaagtcagcgggctggagaggataaccggtttaccgtccgtgcgggagtaatcgatatatctgtcagaagattccgcccattttagggtgatgtaggggcgtcgcaaagtatggaaagtgatgaacctgcggatgagctgccgacattctgtttccagcactccgacaataacttcacgtccggcatccttcagtttctgtatgccccggcccgcaaccttagaaaaagggtcccggcacccgatgacgatgcgtggaatcttcttctcgatgatgaggtctgcacaaggaggagttttgccatagtgcgaacacggttccaggctgacatagatggtggaacgtttcagcagggacgtgtctttcacggaacggatggcgttgacctcggcgtgggcttctccacagcgcacatggtatccctcgcctatgattttcccgtcacatactattaccgctcccaccatcgggttgggtgctgtattgcaaagtccgttttgtgccagttggatgcatcgcagcatatatttctcttcttctgaattcatatccttgcttgtcttttggttgaataatcaaaattaatgattacttttgcagcccgaataaaaccggactccgaatgaatgtaaccgtttcacatatccgcagtgctttgcaggagtgctatcctccccgggaggcagccaatctttcccgtattgtctgctgtgaaatgttaggtcagagtcatattgactattacctgggcaaagatatgattttatctccaaaggatgaaaaggaattggaaagcattcttttccgtctgtgcaattttgagcccatacagtatgtgcagggtactgcccgtttcctgggacgtacttttcgggtggctccgggggtgcttattccccgtcccgaaacggaagaactggtggagaggatgctggaggaagtcgctccggcttcccgtattctcgacattggcaccggaagtgggtgtattgccgtcactttgtctaaagagttgccggaagcggaagtaactgcttgggacatttccggagaagctcttgccatagccggcgacaataaccgccttttgcagacctccgtacaatttgtacagcgtgatgtcctgacgtatcaaccggctgaggatgagtactttgatgtaatcgtcagtaatccgccttatgttacggaaacagaaaagaaggacatggagccaaatgtcttgaactgggaaccttcgggagctttgtttgttccagacagcgacccgctccgtttctatcggcgtataggtgaactgggacggagcatgctgacggtcggcggccgactctattttgaaatcaaccgggcatttggagaggctgtcgcttcgatgcttcgcaagcaaggctatacgaatgtccgtatccgaaaagatatttccggcaacgaccggtacgtaattgcagaacgatgatagaaataactgaaactgaagctttgaacagagtggcggcatattgctccactgccgagcattgccgggcggagattgcggagaaactgcaacgctggggcattgcctatgatgccatagaccgtatcatcaaccgtctggaacaagagaagtacattgatgaagaacgcttctgccgtgctttcatcaacgacaaataccgttttgccaaatggggcaagatgaagatagggcaggcgctccagttgaaaaagatatcttcatctgtctattggccctatttgaacgagattgatgaggaggaataccacgccgtcttgcagaaactgctggcggcaaagcgtaaaagcgtccgtgccgaaagtgagtatgagttgaatggcaaactggtgcgttttgccttgagcagggggttcgaaatgaaggatatatgtcgttgcatagaggtttctgaggaaaatgactactccgaatgaaaattatcggctttctcttttttattctcattctgtttccgtatttttgtgccatatttatcatatatagattagttttgctatgaaaactttagaaagattgtttgcagagaagttgctgaagataaaagcgattaaactacaaccggctaacccgttcacttgggcatccggatggaagtctccgttttattgtgataaccgcaaaaccctttcttatccttctctccgtaatttcgtaaagattgaaattacgcgtctgattttggaacgtttcggacaagtggatgccattgccggtgtggcaacgggagctatcccgcaaggtgccttggtggccgatgcattgaacttgccgtttgtatatgtacgctccactccgaaagaccatggactggagaatttgattgaaggtgaacttcgtcccggtatgaaggtggtagtcgtggaagatttgatttctacgggtggaagtagcttaaaggctgtagaagctatccgccgtgacggatgtgaggtcatcggtatggtggctgcctatacttatggtttcccggttgccgaaaaggctttcaaggatgccaaagtgcctttggtgacgctgaccaattacgaggctgtgatggaagtggcactgcgtacgggctatatcgaggaagaagatgtggagactctgaatgaatggcgtaaagaccctgcacattgggaatctggaaaataagaacttatttgtaaaaatgttaatatggataaaagagccattcggatagattctgtccggatagttcttttttctttttgaatacgattgattatgacgaaatttgagagtggagtgaaagttgtaccggcttcacaagaagctgtttatgaaaaactttccgacctgagtaatctggagaaggtgaaagaccgtctgcctgaagacaaagtgaagaacttgagttttgacgcggagagcatgacgatagaggtggcccccgtgggaaagattacgttgcagattgtggagaaggagccttgcaagtgtatcaagtttgcaacaaccacttcaccgctgcccttcaatctgtggatacagattgtacccgtcaccgaaaccgaatgtaaaatgaaactgaccatcggcatggatataaatccgtttatgaagaccatggtgcagaaacccttgcaggaaggattggagaagatggcagatatgttggcgatgatacaatattaatcactaaccattaatcattagaaacaacgtggctcagaaactttgggaaaaatccgttcaggtaaataaggatatcgaacgcttcacggtaggccgtgaccgtgaaatggacctttatttggcaaagcacgatgtgctgggttccatggcgcacatcacgatgctcgaaagcattggcttgttgacgaaggaagaactgcggcaattgctggccgaattgaagaaaatctatgcgatggccgagcgtggagaatttgtgatagaagagggagtggaagacgttcactcacaagtggaacttatgctgacgcgcaacttgggtgatataggtaagaaaatacacagcggacgttcgcgcaacgaccaggtgttgctcgatttgaagctctttacccgtgcagagataaaggaagtggcggaggctgtggaacaattgttccatgtgctggttatgcagagcgaacgctacaaggatgtactgatgccgggttatacacacttgcagatagccatgccgtcttctttcggactttggtttggggcatacgccgagagcctggtggacgatatgatgttccttcaggcagctttcaagatgtgcaaccgcaatcctttgggttctgctgcgggatacggttcctcgttcccgctgaaccgtacgatgactacccgtcttttgggatttgattccctcaactacaacgtagtgtatgcccagatggggcgtggcaagatggagcgtaatgtagctttcgcccttgccagtgtggccggaaccatatcgaaattggcttttgacgcatgtatgttcaacagtcagaacttcggttttgtgaagctgccggacgattgcactaccggctccagcatcatgcctcacaagaagaacccggacgtctttgaactgacgcgtgccaagtgcaacaaactgcaatcccttccccagcagattatgatgatagccaacaatcttccttccggctatttccgtgacttgcagattatcaaagaggtcttcctgcctgcttttcaggaactgaaagactgtctgcagatgacgacttacattatgaacgaaatcaaggtgaacgaacatattcttgatgatgacaagtatctgcttattttcagtgtggaggaagtcaaccgcttggcacgtgaagggatgcctttccgcgatgcctacaagaaggtgggactggatattgaagccggaaacttctcgcacagcaaagaggtacaccatacccatgaaggcagtatcggaaacctttgcaacgatgaagtctctgctctgatgcagaaagtggtagatggtttcaattttgagaccatgcaagctgcagagaaagagttgctgggcaggtaaaaggttctgcgggttcaagtcccgctgcgagtactgtacttttataaaaaaaaatttggcagaaacgggaaaactgtttatctttgcacccgttctccaaatgcggaaatagctcagttggtagagcataaccttgccaaggttagggtcgcgagttcgagtctcgttttccgctctcttttccctttttaggatgctcgaatggtggaatggtagacacgaaggacttaaaatcctttggccattgcggctgtgcgggttcaagtcccgcttcgagtactcgattaagctctgtgaatcattgatttgcagagctttttctttataagctcttgatatgaaagaccgtttccctatagcgaacaaagtgtttcccttaatagaacaagttgtttcattatggcgaacactttgtttctcttaacagaacatttcgtttcatcatatgaaaacagactgtttttccttattggaacaaactgtttctctatacttgaacaaagtgttcatctctgtgaactaacaaactaactataatactatagtagatgatatgcgcgtggcacttggtaatatgtgcttgcagatgaaataaaagaatctatataaatagcctcctctttattgttcagaacagcttggggcgtttgttattgaaccgatagccgatacccaacatcagataattgggctcatgaaattcccggaggttatatcctatatggagatacgaattgcgtgttacgtctattttcagggcaagaatctgatagaaagacttcatgtcaccgccgccgtgcagaacattggctcccagaccgatacctaccgtgaagtaaggcatgacaaattctccgcgggcagataagcccaatgccatctgcttcttggcgggcggagtatagaagccgttctcttcttcgtacgattctttcatgttcgcactgtggtcgtatacgccgtccagcgccacaccggcacggaatttatagccgaagttgtacatgggtgcaaagctgaaaccgaacacgttgtaagtgccgggtgcgggtacctggccactactgccctcatgggccactgctttctttcgccaggagccgaacaaagtcaggtcgtagctgacgtggcgggggaatggaggaacgatagggcgttgccatgattgggcgagctcatccgctctgcggttaaagttatataccaaccccactttgcagtccaccgtgttcagaccggagttgggatattgggtatttccgttggaaaagtggcttccggtagttcctatcatcaggtcgaacttgggggagagtgcccactttaagtagaggttcacattgagataggcattcactttcgagccgataatctggttctccgggttgtcatattcatcgtagggtttccagccgaacgatgcgccgaagttccattcatagttcaaggatatgcgggggctgaattgggcgatgcgtcccccttgaaacagatagaccgccagcgggttgcccagctcttccggattgccgaagttgaaatagccgactccaatcccttgataggctcctatataagcctggtcggcaacggtgtggggacggagctggaaggagtatttcagatggccggcataggcatttttcatggccttgtattggtggttggagtactccagaaaagggctggtctgaaaaatatagccagcacgcccttctacgcctaatctgtggatgaagcgctgtgagaaagggagtgtatcccgcttgtattccgaatgactatcggatgtccattgttgggcgtatattgtatcagacaagaaaagtaccgctcctaagaaagccagtattttccatatctgcgttctatttttcatatgccgtgtcggtctttcttgtttataaatgttccaagtgaagtttaatttcgtgcaaatatagttcttttctccttttggtattcacaatgagacaactatttgtaaaaagagggggtaaaacggaaatcgtcaatagaatggccgacttcggttttatcccctccttattcattcacccggatgttgtcttatgattcagatactgggtggcgagtattatttccggtcgttctcccggatttccacacggcggattttcccgctgatggttttggggagctcatcaacaaattcgatgacacgcgggtatttgtagggagccgtcactttcttcacatggttctgcaactccttgacaagctcttcttcggcgcgtgccttgtactcttttgccaacacaatcgtagcttttaccacttggccgcggatttcatcgggcacaccggtaatggcacattccactacggctgggtgggtcatcaatgcactttccacttcgaacgggccgatgcggtaaccgctacttttgataacgtcgtcggcgcggcccacgaaccagaggtagccgtcttcgtccttccaggctacgtctcccgtgtagtaaatgccgttgttccatgcctcgtgggtacggttggcatcgcggtagtattccttgaacaatcccagcggtttgcctttgtcggtacggattacaatctgtccctgctcaccggcttccacagaacggccgtcgttgtctatcaggtctacgtcgtattgcggattgggcaatcccatgctgccgggtttcggttccatccacggcatggtggcaacggtaagggttgtttcggtctgcccgaagccttccatcagcttgatgcccgtcagtttcttgaaggtctcgaatacagcggggttcaaggcttctccggcgatggtgcagtattccaggctggataggtcgtacttcgtaaggtcttcgtgaataaggaaccggaagatggtgggcggtgcacaaagcgacgtgacgtgataatcctgtatcttctccagtatggctgcaggagtgaacttctcgtggtcgtatacaaatacgttggcaccggcaatccattgtccgtagagcttgccccacacggcttttccccaaccggtgtcggcaatggtgaggtgtaggctgctctctttcagattgtgccagaagctgccggtgacgatatgtcccaacggataggtgaagtcgtgggccaccattttgggctctccggtagtaccgctggtgaagtacatcagggagatgtcatcgttcgtgttcggatgttccggtttcacgaaaggggcggcagcttcgatacctttgtggaagtcttcgaatccttcgggagcttccggcccgacgcttacgaggcgtttcacagaaggagactctggcatagctgccgtgatatggtcggtgatgacgctttcgccggcacagactatcattttaatgtctgcggcgttgcagcggtatacgatgtctttcttcgtcagcaggtgggtggcgggaatcaccactgcaccgagtttgtgcagtgccacaatgctgaaccagaattcataacggcgtttcagtatcagcatcaccatgtctccgtgcccgatgccgaggctttggaaataggaagccgtcatgtctgtgtaccgtttcatgtcggcaaaggtaaactgccggcattcgccctggtcattggtccacaacagtgcgggtttgtcgggctgctcggctgcccaggcatccactacgtcgtagccgaagttgaaattctccggtacgtttatcttcaagttcttgatgaagtcctcctgtgaggtgaaggatgtttgagataaaaatctttctaccataactttattacatgattactgccaggaattttacagtctttccgtcaagcgccttcatgccgtgcggcagtttggagttgaagtatagactgtctccttcgtttaagattaagtctttgccgtcgatgctgaccatcatacggccttccagtacgaggttgaactcctgaccggtatggctgttgtaatgtatcggctcgctgtccggtttcggttctacggtcacgatgaacgggtctgccgtgcggttgatgaaaccggctgccagtgattggtatttatatgccttggtacgttctatactggttccttttccggcacgtgtcaggaagtaggagctcattttgggctcttgcccaaacatcagtgcgtccagtgatatgccgtagtgccgtgctatcttctgcagcatgctgaccgagatgtcgaattctccggtttcggccaggcggtactcttctgcagagatgtcgcagtcgcgggcgatatcgtcggcagtcagttccaatacgtcacgcagtccgcgcaggcgttcggctatttgtctgatttgttcgtccataattatatttttttaatgggttgttattaaagtgtggcaatgtgccaataggctgcacaatgtttaattacaccgtagctcataggcatatcgggacatcgttacattagcacattaaatatcatttactcgctttgatggctttaatcacagtggaggtgaatccttcatgttccagctcgttgattcccttgatggtaattcctccgggggtacacaccttgtcaatctcaacactggggtgcgtgtcgttgttcagaatcagctcggctgcccctttcacggattgtgccaccatgcgcatgccgtctttgggatagatacccatttcaacgccggcctgcatggctgcctggatatacttaagcacgtaggcgatgccgcaggaagtcatggcagtggttgccgcaatcttttcttcgggaatgagcatggcgagtcccatctggttgaaaatgtccagcatcagttgctcctgctccttggtggcattgcggctggcgatgagtgtcatgctttccatctcgctgatggcggtattgggaataagacggaacatggtcatttctttgtctgctacatagtgtgtcagcttttcaaaaggaatgccggctgcaacggatataagaatctctgtgccttttagttccagttcctttatcactggctccatcagccatggcttcacggcaaagattatcatatctgcactggctgccgcttcctggttgtcattggtcacttgcaatgtggggaattctgccttcagcttgtccagcttgccctgggtggggttggagacaatgatgttaccggcagggatgattgttccttttgccagccctcgggcaatggctccccccatatttcctgcaccgataattgctgttttcatatctttctgttgttaaaagagttgttttgctggcaaaggtagataaattttctacaaaaaacgaccgagagagaaaggtattctgcttttcggtcgtttcttttgctggctgattatttgtgtcaaatattaaagtactttcttgaagcgttccaagaattcctttgcttcatccatgccgaggcacagaggcggcagcaggcgaagtacattcgtaccgcttacaccggtgaatacatgctgctctttcagtagtcttaggcgcagttccttgatgggttcttcaaattccagccctatcatgagtccgcgtccgcgaacgtccttgatttgagggaatttctttagttccgttatcaggaagttgccgacttgggctgcattctctatcaggttttcctgctctatcacatccagcacggcaagggcggcactgcaagccaggtggtttccaccgaaagtggttccaagttgcccgtatactggtgtaaacattgggctgatgagtacgcctgccatcgggaaaccattgccgatgccttttgccacggtgatgatgtcggctttgatgccgttgtactgatgggcgaagaacttgccgctgcgtccgtagccgctttggatttcatcgagaatcaagaccgtgttgtattccgtacaagtctggcggagagcctgcatgaattcgtctgtcggcagttggatgccgcctacaccttgtatgccttcgataatcactgcgcagacatctcctttggacaattcggccttcatggcttcgatgtcgttcaacgggaggtaggtgacgtgcccgcagttgttgatgggagcgatgattttaggattgttcgttacttccaccgccagtgaggtacgtccgtggaatgcttttgagaaggatatcacacgggtacggccattgtagaaagaggcgagtttcaaggcgttttcattggcttcggcaccgctgttgatgaggaagaatgagtagtcgtcatagccacagacttttcccaagcgttctgccacttgctgttgcagcttgttaattactgagtttgagtagaatcctaacgtagcaacttggttactcaccatctctacataatgtggatgtgcatgtccgattgagatgactgcatggccaccgtagaggtcgaggtattcggtaccgttctcgtcccatacatggcagccttttcctttgacgatgttgatgtcaaagagagggtatacgtcgaataaattcatttttttagaatgcagaaggtttcaaccgtaatcctacggtctcttccaggttaaacattaaattcatgttatggacagcttgtccgctggcgcctttcaggaggttatcaatgcaggaaatgataagcagtttgtcgccatgcttctccagatggatgaggcacttgttggtgtttaccacttgcttcaggtcgatattcttctccacgatgtgggtaaaggaatctttggcgtaatattcttcatacatgcggacgatttcttccagggccactttggtcttcaccacaatggtggtgaagatgccgcgcgggaagtcgccgcggtaggggatgaagtcaatgtccgcatcaaagctgttctgcagctgtttgagcgattgcttgatttcgggcacatgctggtgctcgaaagctttgtagacgctcatgttgttgttgcgccagctgaagtggctcgtggcgcccggtttcacaccggcgccggtacttccggtaatggcgttcaccatgatatcatcgttcagcatcagatgtttggcgagcggcagcaggcccagctgtatgcaggtggcaaagcagcccggattggctacgtgcttcgctttgcaggtggcacggcggttcagctccggcaggccgtagatgaagtcgtgttcgggagaggctatgcggtagtccatggagaggtcgatgattctcagttcctcgggcacgttgtggctttcgaggaacttcttcgtgtcaccatgtgccgtacagaaaaagagtacgtcgatttcttccagcgggagctggtcggtaaataccaagtctgtttcgccgtacagtccttcgtgtacgtcggtaattttgttgccggcgttgcttgagctgtttatgaaaacgatttccgcttccggatggttgagcagcaaacgtatcagttcgcctgccgtgtatccggctccgccgatgattcctactttaatcatttcgataatatctatttggttcttgtggtataacaattagcattataatgtatatgggtatgcctgcaaatgcagtaaagatcgtggcgaacgtataaacgatacgcaccaatgagacatcgagtccgaaaaagtttgccagtcctgcacatacgcctgaaagcatccttccagtccggggacgtgtcagtttttgcttcctgccggtcatttagattttctcgtctttatgatttgaataataagcacgcagtgctgtggaggttactttgatgaagcccttggcatcttctgccgtccatcctttctgcatctcaccgtattcgccaaacttgtttttcacaaggtcatctttgctttctacacctacggtagaaaagcagagcgggtgaagttcgaggatagccgtaccgtttacgttgcgttgcgaggattccagcatggcttcgatgtcgcgcattactggttccagatattggctttcgtgcaggaacatgccataccagttggctacctggtccttccagtattgctgccatttgctcaaagtgtacttctcgaggaacttgtgtgctccgataatcagcataggtgcggcagcttcgaaacctacgcggcctttgataccgataatcgtgtcgcctacgtgcatgtcgcgtccgataccgtatgccgcaccaatctcttctaccttctggatggctttgatggggtcgtcgaatgtctcgtcgttcacggctttcagctcacctttttcaaaagtgaggcgcaactgctcgctgccctctttggtgcagtgtttcagataggcgctttcgggcaacccttgcgcggaatccagaatctcgccaccacaaatggaagtgccccacaaacctacgttataggaatattttagtttggtgaagtcggcggcaaagccgtgtttgttcagataatcaatctcttcctgacggctcagtgccatgtcgcgtgtcagcgtgatgatttccacgcccggagccatgacgaggaaagtcatgtcgaaacgaatctggtcgttacccgcacctgtagaaccgtgggcgatggcatccgcgccgatttcgttggcatagcgtgcaatggccaatgcttggaagatacgttcggaacttacagagataggataggtgccgttacgcaaaacattgccgaataccatgtatttcaagcttttctcatagtattcctgcgtcacgtcgagggtgacgtattctttggcgcccagcttgtaggcattttcttcgtttgtcttcaactgttcagcactgaaaccgcccgtattggcacaagctgcatatacttcgtaccctttttctttggtaagatacatcaccgtaaacgaggtatccaaacctccgctgaatgcgactactactttcttcttcttttccatatccttagtatttttatattttatcctcttcgtgcagcttcgggtcgtaaagcattgctgtgcaaatgcagaatttacggttcttagctaccaatatatcatggtttatacagccttcgcaacctttccagaacgattcgtcatcggtcagttcgttgaaggtgacgggcacatatcccagctcggtattcattttcatgacggcagctccgctggtgagactgaaaactttagcattaggccagcgtaggcgtgccaggcggaaagaagcggtcttgatacgttttgccagccccagtccccgatatttggggtgtactatcaaaccggaggttgctacatattgcttgttaccccagctctctatgtaggtgaaaccggcaaaatcatctccacacaaggctatgatggcctttccttctttcattttagtagctacgtattcgtgtgtgcgttctgcgatgcccgttccgcgtaccttggcagcttcccggatggtatccaaaatcttgtctacgtaaacttcatgtgaggcgtcagccaccatcacatcaatttgtttcgaatccatttcttatttaatttcttgttttttgttgttatctatcatttaatgttcgggatgatttgcgataggaagctgcgtacctcgtcatgtgacgctgcttcgtgcaccaccagcatgatggtgtcatctccggcaatggtacccagaatggcgggacactctcggttgtcgatgtcgtaggccatgctgctggcatatccgggccgggtacggatgacggcaatattgcccgaaaattgaagtgaaacgaatccgcttgtcatcagcatttcacttgcactctggtcgttcgaacgtttatacatgatgttgttgggcagcacatatacgtatttaccgttcatgttcgctgctttcgctactttcagctgtttcaagtcgcgtgacaaggtggcttgtgtcagttcaaagccttccttgctcaaagcttgcaacagttcttcctgagaactgacgtctttgcttgagataatcatcttgatggcgtctaaccgattggcttttttcttcattttctgtataattattctaagagtagtgcaaaattagggattatttcggaaagaatatgcaaaaaggagagcttttttattctttttatacatcgggtgtactgtatatgttgtttttgttctctttgttggagtcttgtttgttcttttacgttattggagattgtttccgtatgtctttggtaaatgttgatataatatagaatagatatgcaattgtcaaatctgacaccctttcaatcaaaaactgtacaaaaattatatgcatagaaataaaatccctcaggtttttacgttggtcccagattgttacgttgcccccccctctcttatggtcgggaaaccggaggagaggagggatgaaataaaaaaggcttaacttctaaaagctaagccttttctgtcggctgcactatcgaattatcgaacaagtt

SEQ ID NO: 4440 - DNA, 3250 bp, Unknown
  gut microbiota DNA sequence
attgatgttaagtacgttgacggaactggtttgaatgatgacatcaagcagacaattgttgttcctgcacagaagtttgcataccaaggtactttctggaagaatggtaagggcgaaggtgtcttcaatgtgaatccgattgtttacactactgcaaatgacggtggaacacagaaagacccgcatgtatatccgggtactccagacggttgtgagcttaaagactatagccacatcgaagctcacttggttaatggctttgtatataaaccgaccaaagaaaaaccagccaacttggcccaattcatccagtatattcgtgagtgtgcagaggttaagtttatctttgacgaaacacgtatgaaagacctgactacttatccgcatttgaaagactttgtcacaagcgatgaccaaactcaattgtggtataagactaaaggtacagcaaaagacgaagttgtaggtgacaacagcaacatcggtagaacggatgcaggaattaatgattatatacaatctaacgatttggctgccactatcaataacctgatgggtgctgatgctacagaaaacaaaaagaacttgccttggaattatgatgaaaaattaggtaatagcgtaaatgaatgctccagtatcatccgtctccacgaaaaagatgacttgaacggtactgatgccgccctcaagttgattggcaaggaagttcctgtacagctagttgttgcatacaatgacttcaatgttattccagttcaagaatttgaggtacacttcatcaacccgttgactattgacggttctatcagcgacaacttcgttgatgctgaaattgacggtagcttcttgagcgttgccaagaacttcacattcactgactggaataataagccggtagctgctgtagctgacaaggccactggtgatgaagtttatgcacatgctttgtatgactactatgctgtgcgtgaagttaagttcttgactgataagaccactaccagcttggcttggaatgctgcaaccagcacttatgagcataaggagggtactactgacggtaagttgccgaccaatgcttcattgaagatgatgaactgggatgagacaaaagctaagtctactgctacagaagctaaagctgacccgactcacttggcatacttcaacaaccatggtactccggttaacgttgactacaacatgttcctgactgtaaatgtcaactacaagtggggtgtattgagcaaggataacctgaaagtcatcgttaagaaggctgccggtacaccgagtgccaaataattaagaagagattcttgatataattcaataaaagggacgtcctcttgcagggcgtcctttttttcaatctttcatttataaatatcagatatgaagaaaatactattcattttgactgtgtcagtttcactcatctgcatttcttcatgtaagaagtcagcagctacacatccttttccaggcaaattcgttactgaaaccggtatccaattcgaccttcgagccgactccaccaccctgattcaatatgatgattccagttcgtacgagggtacatggaaagtctataatcaaggagatacactaaagtatgccactattgagtttgccggttactttaactattattatctgcgtaatggtaaactctatcgcaatgaacataatatgatacgtcaagctcttggtgaagaaattgaatatcaagattaaaacagaaaatggctattactattcctctattctttggatgaggaaaagaatagccatttcatatgatagtcaaccacacatttccaataataatcgttttatgattatcatcttatgattatcgtgatattttccttatatttgcgtgtaaactcaataatcatatgaaaaatccatttgttacgaacggctatgtatcaccggaatatttctgtgacagagagaaagaaacggctaaaattgtctcacttttgacgaatgagaacaacattgcattgatttccccacgcagattaggcaaaacagacttgctgcggcattgttttggacagccggaaatcaaggagcattaccacactttcatcatcgatatttatgccacaagctctgtacgcgattttgtgaatgttttcggcaaggctgtactggatgaactacgtccaaaaggaaaatccgtatggggtaccttcttgaatgtactggcctcccttcgttccgaaataacattcgacatgaatggacagcctacctggggaatcggtctgggagctataactaatccctctgcaacattggatgagatattctcctatctgaataatgccgggaagccttgcctaatcgccattgatgaattccagcaaataaccaaatatgcagacgatcccaacatagaagcggcactacggacacatatacaacgctgttccaatgcccactttgtcttctccgggtcccataggcatctgatgggggcaatgtttacttctccggcacgtccattctaccaatcggttacactgataaacctgcctcccatttctgttgataaatacgcggagttctgccttaggcactttgagcgagcaagcaaacacttagatacattagtggtaacagagctatatgagcgcttcaatggtataacttcgtatatgcagaaggttatgaacattttattttccatgaccggaactggagaaatatgtattccctcaatgatagatactgccattaacgaccttctggatttttctgccgatacctatgatgccttattatatcagatgcccgaaaagcaacgtattgtgtttatggcaatagcagcagagggaaaagctaaggctatctcaagcggtgactttgtacgtaaatacaagttgcaatctgccagttctgtctcttcagctgtaaaaggactactggaaaaagactttattacgtatgataaaggcatttaccaggtatatgatcagttcttccaactttggttgcaaaggaataagctttaatggtttctttcttgaatcttatattcattctataaacaatttagaaatgagtagaaatgcagcaggctttgcaaaatataattataagactaaagtaaatacctttaatatggttccaacggataaaatgttgtagcaaatcattgttgtttgaaggataataactatctttgttctaaagactgtaagcagtcaaaaaatggctattgattgcaacc

SEQ ID NO: 4441 - DNA, 58525 bp, Unknown
  gut microbiota DNA sequence
catgtgcaggtcgaaatgcagaggatgaaatatttcacgggagggctgacatacaaaattcatttgaaataattaatgaaaaaatcagcggagggatgtttgatactatcagacatccctttttctgtattatatatgtaagattaacggaggaattcaaattttaatcgtaattttgtagcccattatgagtagaataatagccatagactacggtcggaaacgtacgggaatagccgtgagtgatacattgcagatgattgcgaatggactgacaactgtgcctacacaccaattgttgcagtttcttcttgattatgtggctaaggagccggtagagcgtatcttggtaggccttcctaagcagatgaataatgaggcttcggaaaacatgaagaatatcgaaccttttgtccgttcgctgaagaagaaactgcctgacatgccggttgaatatgtagacgagcgttttacttctgttctggctcatcggacgatgcttgaggccggattgaaaaagaaagaccgccaaaataaagcactggtggatgaaatcagtgcaactattattctgcaaacttatttagagaacaaacgtttctcttttttataatgtatagaaagtaatttgtaattagtaatttgtagtaaaggaaatgattttacccatttatgtgtacggccagcccgtattgagaaaggtagcagaggatattgccccggactatccgaatttgaaagaacttattgagaatatgtttgaaacgatggacaatgctgaaggtgtgggacttgctgcaccgcaaataggtttgcctatccgcgtagtaaccattaatctggatgtcttgtctgatgatttgccagaatataaagatttccgcaaggcgtatatcaatgcccatattctggaagtgtccggtgaggaagtttctatggacgagggctgcttgagccttccaggaattcatgaatcagtgaagcgtggcaacaaaatacgcgtgcaatacctggacgagaacttggaaccgcacgatgagattatcgaaggttacctggcacgcgtgatgcagcacgagttcgaccatctggaaggaaagatgttcatcgaccatttgtctccgttacgcaagcagatgattaaaggaaaactgaatgccatgttgaaaggcaaggcacactgcacttataaggtgaaaaccgtaaagaaataagtttaaccatataatatggtataaaaggctcaaaaaatataaaaagtgttccgctaatcccgacaagtaaacgaaaaacgttacttttgtttcgtttacaagcatttataaaacaagatgataaaaaaaatactgacggctattttgctgttacccacattgttgtatgcacaaatcaatacggaacgggtgatgaccattgctcggaatgcattgtattttgaggattacgtgctttctatccaatattttaatcaggtaatcaacgcgaaaccttatttatatgagccttatttcttccgtggactggcaaaaatcaatttggatgactatcagggagcggagagtgattgtgatgctgcgattcagcggaacccttttgtggtaggtgcttaccaaatcagaggattggcacgtatccgtcagaacaagtttgacgaggcgattgaagattataaaaccgctatcaaatacgatccggagaatgtggtgctttggcataatctttccctttgccatattcagaaagaagattatgaggcggctaaggaagatttgggtacgcttctgacaattgcccccaaatatacgcgtgcctatctgatgcgcggggaagtctccctgaaacagaacgatacgatacaagctttgcgtgattttgacaaagctattgatatggaccgttatgacccggatggatggggggcaagagccattgtacgcctccagcaggggaaatataaagaggctgaagctgatttggaccagtctatccatctgagtgcaaagaatgccggtaactatatcaaccgtgccttggcgcgtttccatcagaataatttgagaggcgccatgagtgactatgatttggctttggatattgatccgaataattttctcgggcactacaaccgcggtttgctgcgtgcccaggtgggcgatgacaaccgggcaatagaggattttgattttgtgttgaagatggaaccggataacatgatggccaccttcaatcgtggtttgttacgtgcgcagacgggggattaccggggagctatcagtgactattccaaagtgattgcagaatatcctaactttatggccggctattatcagcgtgccgaagcccgtaaaaagattggcgaccataagggagccgagcaggatgagttcaaaatcatgaagatgcagatagacaagcgtaacggtgtttcttctggtgacaaaaaggaaggtgacgacagtaaggatgttgcggataattcctcggaaaactccaatggagatggtgggaagacccgtaagaaatccgacaagaacatggaaaattatcggaaaattgtaatagcggacgattcggaagctgaccagcgttataagagcgattatcgcggacgtgtacaagaccggaatgtgaccatcaagctcgagccgatgtatgctttgacttattatgagaaactgagcgatgtgaagcgtatcgtacattatcataagtatattgaggaactgaaccattcgaaactgttcccgaagccactgcgcatcaccaatatggaagctccgttgacggaggaacaagtacgcttccactttgctttgatagacgctcatacgtctgatgtggtggctgacgagaagaacgccaagaaacgtttcatgagaggtctggatttctatctggttcaggattttgccagttccatagatgactttacaaagagtatcttgttggacgacactttcttcccggcatactttatgcgtgctttggtgcgttataagcaactggaatataaaaaggccgaagccacaatgagtgaaggtgccacttcgggtacaacggaaatgaagaagcctgaagtgacagccattgattatgaagttgtgaagaatgacctggatcacgttattctattggctcctgattttgtctatggctattataaccgtggcaatgtgtcttcgttactgaaggattaccgtgccgccttggcggattatgacaaggcgattgagctgagtcccgattttgctgaagcatactttaaccgtgggttgacgtacatcttcctggggaataacaaacaaggtattgccgatttgagtaaagccggagagttgggcattgtctcggcctataatatcataaagaggtttacagatacacgggaataacatttttttgctaaaaaatagaatatcaaaaagaattagctatttttgcgttctgaaaaatgaaatatacatataaactatgataaagataacatttccagacggctctgttcgtgaatataacgaaggagtaacgggactgcagattgcagaaagcatcagttcgcgattggcacaagacgtgctggcttgtggcgtgaacggagaaatttatgatttggggcgtcctatcatgcaagacgctgaagtggttctttataaatgggaggatgagcagggtaagcatgccttttggcataccagtgcccacttgctggccgaagctttgcaggaactctatccgggcatcctgttcggtataggtcctgctatcgaaaacggtttctactatgatgtggacccgggtgaaacgactatcaaggaagctgacctgccagccattgagaaaaagatggctgaactggtggctaagaaagaagcggttgtcagacaagacattgccaaggcggatgctttgaagatgttcggtgaccgtggagaaacttataaatgcgagctgatttccgaattggaagacggccacatcacaacttatacgcagggtgcatttaccgacttgtgccgtggccctcacttgatgaccacagctcctatcaaggctattaagctgacttccgttgccggtgcttattggcgtggacaagaagaccgtaagatgatgacccgtatctatggtatcacctttccgaagaagaagatgctggatgagtatcttgttctgctggaagaagccaagaagcgcgatcaccgtaaaatcggtaaggagatggacttgttcatgttctctgacaccgtaggtaagggattgccgatgtggcttcccaaaggtactgcactgcgtatccgcttgcaggatttcttgcgccgcatccaggcccgttacgattatcaggaagtaatgtgtccacccatcggcaacaaattgctttacatcacttccggccattatgcaaaatatggtaaggactccttccagcccatacatacgccggaagaaggggaagagtacttcttgaaaccgatgaactgccctcaccactgtatgatttacaagaactcaccccgttcttacaaagacctgcctttgcgtttggcagagttcggtacggtttgccgttacgagcagagtggcgagttgcacggtctgacacgtgtacgtagctttacgcaggatgatgcgcatatcttctgccgtccggaccaggtgaaggatgagttcctccgtgtcatggacattatctccatcgtgttcgaatctatggacttcgagaacttcgaggcacagatttccttgcgtgacaaggtgaaccgcgaaaaatacatcggtagcgacgagaactgggaaaaagcagaacgcgccatcatcgaagcttgtgaagaaaaggggctgaaggcaaaaatagaatatggagaagccgctttctatggtcctaaactggacttcatggtgaaggatgccatcggtcgccgttggcagctgggtaccatccaggtggactacaacctgccggaacgtttccagctggaatataccggtgctgacaatcagaagcaccgtcccgtaatggttcaccgtgctccgttcggctccatggaacgcttcgtggctgtgcttattgagcatacggccggtaagttcccgttgtggctgactcccgaccaggttgccatcctgcctatcagcgagaagttcaacgactatgcgcatgaagtgaaacaatacttgaagcgatatgacatccgtgccattgtggatgagcgcaatgaaaagattggtcgtaagattcgtgacaatgagatgaagcgtattccgtacatgctggttgtaggtgaaaaggaggctgaaaacaaggaagttgctgtccgcaagcagggagaaggtgataaaggaaccatgaaatttgaagaatttgccaaaaaaatgaacgaagaagttcagaatatgataaataaatggtaactttgcgcccaattgtagaagcatagcatatattagatgttctaaagttcgcttttacttaacaaaaacattaatttgggaatagtaaataagaaacaaactggaagtaaacgttatttaatgaagaatgacagcttaaaagggcaacatcggattaacgaacaaatccgggccaaagaagtccgcatagtgggcgatgaagtagaaccaaaagtgtatccgatagcgcaggctttaagacttgctgaagaacatgaagcggatctcgtggagatttctccaaatgcacaaccccctgtttgtcgtattattgattattctaaatttctttatcagttaaagaagcgtcagaaagaacaaaaggcaaagcaggtgaaggtgaacgtgaaggaaatacgttttggacctcagactgatgaccatgattataacttcaagttgaagcatgccaaaggctttttggaagatggcgataaggtgaaagcctacgtattctttaaaggccgttctatcttgttcaaagagcaaggtgaagtgttgctgctccgttttgccaatgatttggaagactatgcgaaggtagaccagatgccggttttggaaggaaagagaatgacaatccaactctctccgaagaaagtggcggcacctaagaagagcgcggctcccaagcctgcagaagatgcgccaaaggctgcgtcggctgaaaccgaagaagaataaagaagtgaataacgccataggtatagtgcgttgccatataatttaataattaaaaagtttaaaaaagatgccaaagatgaagactaactccggttctaaaaagagatttactcttaccggaacaggtaaaatcaaaagaaagcacgcttttcatagtcacatcctgactaagaaaactaagaagcagaaaagaaacttgtgctactctacacttgttagtacaacagatgtaagccaggtgaaagagctcttagcaatgaagtaattgaaaagcgtacaaaagtattaaagttattaaccgaatgcattagctttaagtccgctgcgtgaagtaacggcgctaacattcaaaaacaagtaaaactatgccaagatcagtaaatcatgttgcttctaaagcaagaagaaagaaaattttgaaattgaccagaggttactttggtgcaagaaagaacgtttggactgttgccaagaatacttgggaaaaaggtttgacctatgcgttccgtgaccgtaagaacaagaagagaaacttccgtgctttgtggattcagcgtatcaacgctgccgctcgtctggaaggtatgtcttactctaagctgatgggcgctttgcacaaagctggtatcgaaatcaaccgcaaagtgttggctgatttagcgatgaaccatccggaagctttcaaggctatcgttgctaaagcaaaggctgcataaaaacagttagcagataaattacgaggtgctgattactcttttggtagtcagcactttttgttttctgatactccggggaggggttaaaacttgaaaaggacttgaaacaatttactgcttttacttgtttctttcatagaaactcattacctttgttatagaaaaaatagccgcattgattggatcgggaaactcatcaatttttatgaaataccgagacaagcttcgcttctcaatggcgggccacgcccttcggggtaactcttgagtcggtggattacaaagaggaggagcactcaaatcatgtcatacggagtttcatcacatcatcggtgcggctttctataaaagaggaacggtaatctgtttggataaccgttcctctttcgttttatgcggatgtgggtgattgtgaaacgatgatacgtgatgctgaaacagatgatgtgtcaagggaagatagatgatgtgtttatacaagacagaccatctgtatcgggtgaacagatggtctgttttgaaaagagtttttttaagtttatttgttgtcccgtaagtcttttaccctgacggcttttccttcgctctgcggcaaggaacctttctttaccaaccgtaacttcggagttaccagaatctcgtctttcagctggcgggtaatggctttgctaatcttttgcagctcgatgtaattgtcagtagagaggtcgctaagttcaacttccacaatcatctcatcctggttattgaccgtttcgagcgtgatgaggtaattgctgcccaattcggggaattgtaccagcaccttttccacctgcatggggaagatattgactcccttgatgatgaacatatcgtcgctacggcctttgatgcggtctatacggatgtgggtacgtccgcaagggcacttgccgggcaggatgcgggtaaggtcgcgtgtacggtagcggatgaggggcatcatctctctgtccagcgttgtcagtaccagttcgccgatttcaccttccggtacgggttcgccggtttccgggttaatgatttcgaccaggtagcaatcttcccagaagtgcatgccgtcttgttcggtgcactcgaaggctacgccgggaccgttcatttcagtcataccaaagctgttataggctttgacgccaagcatgcgttcaatctttctgcgttgctcgtctgtgtggggttcggcaccgataacaagcgttttcagacttgtgccggcggggtccatcccttcttcctggaatacctctgccaagcggatggcatagctgggaatggcatgcagggcagtggtcttgaagtcggtgatgaactttatctgacgcttgctgtttccggcagcggcaggaacagtcagcgcacccagacgttcggctccatactgaaagcccagtcctccggtgaacatgccgtaaccggagctgttttggaaaacatccgtcttacggatacctaccatatagaggcagcgtgccactaagttagcccaagagtccaaatcgtgttgggagtgtacgatgaccgtcggcgtgcccgtagtgccactggaagaatggatacgtactccgtcctcacgcatatcgcctgctactaatccaaaaggataattggcgcgcatatcggccttggtagtaaacggtatcttacgtatgtcttctatagaccggatgctgtcggcagtgatgccatgctcttggaatacctttttataataaggagagttggcggcaatgctgacagtcttttttaaccgttgcagttgcagttcgcgcaactgctcacggggcatcgtttcaatctcttcttcccagtatttgttattcatggtatgttgaaatttagagtcaattatagtttacatcagtttttcagcaatctctttgccggcagccaacgctttgaggttcagctctacaatggcgtcgcccttgcgttggaagatttcgcggatgctgtcttgcacctttgcgtagtcgatgccgaggaaggggatggtggcgcccagcagtacgatgttcgctacgcggggagagtcgacttcttttgccacttcgtttacgttcagcatgattttatgcggcagcttgttgatttcggccttgatgtcttcttctgccggatagttgggaatgttgatgaagggggcttcattggtcaccagccaaccttcggggctgaggtaggggaggtagcgcagtgcttccatcggttccagggagatgatgaggtcgcattttcctgtgggaatgaggtccgaagcgatgggttggtcgctgatgcgcaggttggactgcacgtcgccgcctcgctggctcatgccgtgtacttctgcctgcttcatgtagagtccgtccttgagggctgctttgccgattacggtggcgatggagaggataccttgtcctcctacgccggaaagtatgatgtcttttttcatggctttacttgtttctttttttgcgtgctaatgtttggatacattctctgcgggggatgatgacggatacgccgtggtgctcgatttcttcccggatgatttgcttcatctcttcgtagtttttcttcaagggcactacgacgcggatgtgttcgggagctacaccgatgccggcgcagatggcttccagacgtccggtgccggcagaatcttgtcctccggtcatggcggtggtttcgttgtcggagatgacgatggtgacgtcggcgttttcgttgacgcaatccagcagtcccgtcatgcccgagtgggtgaaggtggagtcgccgatgacggctacggcaggatgcaggccggcatccgaagcacccttcgccatggtgatggaggcgcccatatccacgcaagagttaatggcgttgaatggggcattggctcccagcgtgtagcaaccaatgtcgctgaacaccttataagtgggatattcttctttcaatacttgggtcagcaccgtgtacatgtcgcgatggccgcaaccctcgcacaaagcgggcgggcgcatctctaccagagaaggaacgctgaattcagccttgttctccttgcctacggcacgtgccacgctgtccgggttcagctctccgtctcgtgaaagagtgccgtccaaacggccttttactttgatgccgatgcccagatagcctttcagctgtttttctacgaacggttgtccgtcttccagtaccagaatctcgtcacatgcttctaccagctgcatcagctgtttcttgggcaacgggtattgtccgattttcagtaccggatattcgcaaccttcgggatagttctccatcaggtagttgtagccgatgccacatgccacgatacccagctttttgttggggccgtcggtatatttgttgtaagcggagttttcagaagctttgataaattcgtcctggcgttgcagcaatgctttgtaacgtttgcgtgcattacccggcaggaggatgaactgacgcgggtcttcgctgaaggaaatctcattctgcggttgttgctccttgcgctctacgccggaacgggagtgtgccaggcgcgtaaccatgcgcatcaggatgggttcgccggtctgttcggagaagctgaatccgttgtacgccatgtcgtatgcttcttgctggttgcttggttcgtacatcgggatgagggagaagtcgccatagaaacggctgtcctgctcattctgtgaagagtgcatactggggtcgtcggcagcaatgactatcagaccgccttttactccggtaatggcggaattgatgaaacagtcggcagctacgttcatacccacgtgcttcatgcacaccagtgaacgcttgcctgcaaaggacatgcccagggcagcctccatcgcagttttctcgttagagcaccagcggttatggatgttcttttcggcagtaatcggtgccatctgaatatattcggtgatttccgtagaaggagtgccgggataggcatatacacccgaaagtccggcatctaatgcagcttgtgcaatggcttcatcgccaagtaagagttgcttgctcatatctgaatatttaagtgttagtcatggattaatatttgacgcaaatataggattttgcttttattttatcagcaaattacttaaaaatctttctttcgtttaatgcattccaatattttcttgcatttttcatgtgctcggcataattggatgcaaagttatgggtgcccgagaagtcctctttggcacacatatagaggtagttgtgtttcgtataattcagcacagcatccagcccgatgggtgaggggatgcgtatgggaccgggaggtagtccggcattgatgtaggtgttgtagggtgactttactgccagatgggcattcgtaattctccgcaagccgaagtcctgcaaggcaaatttgatggtagggtcggcttgcaggggcatgccggtgtgcaggcggttgatgtagagccctgccaccattggtttttcgggattgttgtttgtctcttcctcaacgatggaggcgagggtgcagacttccgtcagggtcattccgatggcggtggctttgtctaagcgttcctggttccagaacttctggtgctctttttgcattctttcgaagaactcttctgcactcatgtcccaatagacttggtaggtttcggggatgaagaggcagggcagggtctctttgttgtatcccagtttttgttggaatgcggagtcgttcatcaatccggctatttcggtggagtctatcatgagctgtttgcctacgctgcgtgccagccggtccagtgtgcgtacgctgccgacggtgaggttcgtaggttcttgatatccgcggtacagacggctgaatacgtgatatacgttttcccccggccggatggcgtagcgtccggtgtgtatattttcggaatatttcttgtattgggccatccagcggaagccggtgaagcttcgaggatggccttgttgttccaccttattatatatggagtcggcggtgtcgtcgcggtctatatagatatagactgtctttttcggatggaattgcggggcaaacagatagtagtatactgttcctgcacaagctgctccaataagaatcagtgcgacgaatgttccgataatgattttcttcttttccattttgttttactgcatctttagtcgggcaaagttagtaaaaaatggagtgaaaaccatcaagtcatatcagttaattcgatagctgacaaaggctatgcgtttgctgtccggtgcccatgagttgacattgatggtgccttgtccgccgaaaagctttaacaatgtcttgggttctccaccgtttgcgggcattaggcgcagctctacgttcttgtttgccaggtgctctcccggttccaggtcacctttgtagtaggtgatgaatacaacggattttccgtcaggggagatgtgggggaaccaggagttacgggtttcgtcaaaggtcatctgggtctgttcggagccgtctgccttcatgcgccagacttgcatgagtccggtgcgtacggaattgaaccagatgtattgtccgcagggggaatattccggtccgtcatccagaccttcggcagtggtcaggcgggtttcttcacctccttccgccgggatggtatagacgtcatagttgccgtttcgttcggcgcaataggcaagctctttgccgtcggggctccaaccgtggaggtagctgggagccataggtgttattaaacggggagtgccgcccgtgatgggaagtgtataaatgcgcgatttatagtcttctttcgtcccgtggctgatggctatctgctgtccgtcggtcgagaggacgtggtcgttgttgcagttttgggcaaatccggtgtttatcagttccggttcggcaggcgaggtgggggaaaggcggtaaagctttccttcgctgttgtatagcagccattgcccgtcgggcgtccaattgggagcttcaatccggtagggaaattcttttacgacggtccggttaccgttagttacatccagtatttcgaggacgctggtaatctcgtttttttgttgagcggttgcggtcagtgcaacagttgcaaagaaggggattagatagggtttcatgttcatatcgtatttaataaatctccgcaagatacattttttattggaaactacatagtcggagcatgcttttttcagagagaatctgtagtgatggtcgaatgcgtagtgcttatcatatgaatagtctccgggattcttgaaatagttgtccacatactgccagttgtcggtgtcgagcggcgtgtgcgaagtcatgtacgatagggagcttttgtctctactatctcgctgtccagactaatcaggtctttgcccaagcggacaatgcgggcatgtagtcggtgccgacttccctctttccgcctccaccgaatgacaaccatcctgtaccttcgtcatctatcacggcacccgggtcgaaaggagccctgcagtggcctaatccttgggtgaactggctcaccagcatacgtcttaccgtccgattccacccgcgatacgatggatggcgcccatgaggctataccccatggcgagagggcctttacgtcaatcagtccgtgataagtccaatttaccatgtcatcggtggacagcatgaccagtgaatgggatgtattggtatgtgtttttgccgtattttcccacactgtccagttgctgggtgtcattggttccatacacatagagccttccgttgtattccaccgatgtcgggtcggccacaaaaatgaaatccaacagcgggttggcgtttccactgaagaattggggtgattctaccggacgcgtgtctttctttcttgaatcggaaagcgcccacacatcatttcctgcggatatagccgccagcagcaaagccgctgtaaataacttgattctttccatttttttatagtatgttatagaaacctatggtagccttttgattttggcttgtgttcttcaatcacctcaatcctttatttaagattgaaaaatcgggttattgaaaagttgccgcaaatattgggaattactatgtataatataaggtgtattatgtttttaataatgtgcctatatgtttcaagttatcattgtaatcagatggtgctgttttaaactagctttacttgctttgggataattatgcggctatggattaaactgtttggaagggcattgtgttttatgcaaatatattcgtagaagagcgttttttattctaacaattcttgaaaagaaaaagcactgattattccagataatcagtgcttgaatatcgagccgctagccagacttgaactggcgacctacgcgttacgaatgcgttgctctaccaactgagctatagcggcaataagcttttgtttacggggtgcaaaggtacatctttatttgaaaaggcaaaaagaatctctgttttttttagaaatattttagtgggataattttctatttgaatgtcctgaactttattgccataaaaattggataataaaacgaaaagaagcatctttgtcgtaggtcctatagcaaataagtctgatactgattatgaatttaagaatctattataaatatctttcttcacgcatagcgtccaaatggacggtgttgttggtagatgtaattatcgttgtgatttccatgctttctgcatgttttttgcaatataggctttcgtccgtatcttatgaaatttctttgtatgtatggctgaccattttggctgtcttgtgtaatatctgtttctttcatattctccgtacttatgtgggtgttatccgtttttcctcttttgtagatatttatcgtgtgttttggagtcttacgataagctatgctgtactgtttttagggaattactgttggtctgtttcggggcttggagaaactttgccgaacagcattctgtttatagcatatatgttcaccttctctctgatggcttgtatgcgcattgctgtgaagatgctttatgaagctattgcttttgatgcacgtcattgcgtgaatgtttttatttatggattccatgggactggagtcaatgttgcaaaatccttgagagttagtcgtaataatcattatcgcctgcgtggctttatttcggacgaacctgatatgataggtaaacatacgatgggatgcagggtatatcccaatgatgagcagctgtttgaccgtctaaagaaaaagaaagtggatacaatcattatctctccaagcaaggtgtcggatttggaaaattccggaatgctggataaactgttctctcatgatattcatgtaatgaccgttcctcccttaagcgattgtatggacgatggactgataaaggacattcaaatagaagattggctccgtagagaaccggtacaagttgacgtgcgtaaaattacggcccatatcgaggggcgtagagtaatggttacgggagcggcgggagctgtaggaagggaaatcgtccgccagttggctacactgaatccttatcagttgattctggtagatcaggcagaatccccattgtatgatgtacagttggaattgtctgatcattggaagaatctggaggtccgtgtattggttgcagatgttgctaaccgtacgcgtttggaggctatatttgaagaaacacgtcctcaacttgtttttcattctgctgcttataagcatgtacaactgatggatgattttgtgtcggaggcaattcaaacgaatatatcggggacagtgaatattgcagacctggcggtaaagtatagagtgtcccgtatggttatgatatctgctgctaatgcacgtcatccggaaaatgctatggaatatagtaagcgtgtggcggaaatatatgtgcagtcatctgattgcaggttgaaacgcgacaaaggggaaactgatatgttcatagtacgtttgggtgaggtgtatccgacgaatactcattgtttgattaccatgtctgaagcttgtatgctcaccctggaagtgggagtcatgggggatgggggagaagtgtacattgtgggagggcctggggatggacttttggattctgtaatcagtgaaaagataaagcgtgaaaagccatctgttgatgattatgaacatgtgcgggaagaagtgctggccttggtgcaatatagttatactgaaaaaaaggctattttgattggactaatgaaaaaaatagtgccaattttcccgctttcttctacccaatgaaaagacgtgaaagtgacagctttttaatgctttttctgaaacttagaggtggaataaatgtatattataaaaataatatattacctttgtgcccgatttatatttattacaagaactcaaaagattaatcagaatatcttatgcgtagattaataacactattctttttggtatttactttgtcaggggtagcttttgctcagcagatgtcagatgatcaggttgttcagtatgtaaaaagcgctcagcagatgggcaaaaatcaaaagcagattactactgaattaatgcggcggggagtgacaaaggaacaagttgaaagaattcagaaaaagtatgaaaactctaaatctggaagtccgcagagcaatacccaagatgagaagcgttctcgtcaacgtggtgaaatgagtggcgtagtcaaagggctgcgtacaacttcggaaacttattctgccagacaaacggatgttgcaggggattctttacaaatgatggataatcgttccttgtctcaagagaaggaaacagaggatccgacttcgcaaatttatggtcataatatttttactaacgataatttgactttcgaacccaatgtgaatgttgctactcccgagaattatcgtctggggcctggtgacgaggtgattattgatgtgtggggagcttctgaaacaacgattcgacaaacaatctctccggaaggaagtattcttgtgaataatttaggaccggtttatctgagtggcaaaactgtaaaggaagccaataattatttgaaacaagaatttgccagaatatattccggagtaaccggaaatgttccgtctacccaagttaaactgacattaggagaaatacgttctattcaagtaaacgttatgggtgaagttgtggtgcccggaacttataccctctcatcatttgcttccgtatttcatgctttatatcgtgcaggtggtgtgaacccgattggtagtttgcgcagtattaaagtgattcgcaatggaaatacaatagcggatttggatgtttacgatttacttatgaaaggaaaaatgaaggatgacatccgtctgcaggatggtgatgtaattcttgtggatccttaccagtcactggtacagatattaggtaaggtaaaacgtccgatgttttatgaaatgaaacccactgaaaccgtaggtacattattgaagtattcaggtggttttacgggtgatgcttataagaaagcattacgtataatccgtaaaagtggacgtgagcatcaaatttataatgtggatgagatggattattccgtattccgcgtagatgacggtgataagataacggttgattccgttttacagcgttttgagaatcgtgtggaaatccgcggtgctgtatatcgtgaaggtttgtatcagttggacggtacgatgaatacagtgaagcagctgattaagaaagcggaaggacttcgcggagatgcattcttaaaccgtgctataatcgatcgtgaacttgaagacttgtcgcatgaggttatacaagtagatgtgaaaggtttgctgaacgggacggctgcagatattcctttgcagaagaatgacattttatatattccaagtattcatgacttgaaggaagaagctacacttaccattcatggtgaagttgccaatccgggtacatatctctattctgataaaatgacagtagaggatttggtgttgcaggctggtggcttgttggaggcagcggctacgacgaaagttgaagtggcacggcgtatgaaagatacgaagagtacatctttcagtactacagtaggccagaatttctcttttgatttgaaagatggcttattggtgggagaaggaagccaggatttccatcttgaaccttttgatgaagtttatattcgtaagagtccgtcttattttaaacaacagaatgttatggtgggaggagaagttctttttagcggtaattatgcactatcgaaaaaaaatgaacgtttgagtgacttgatagctaaggctggtggagtgactcccgatgcttatgtaaaaggagcgcgtcttattcgtaggatgaccgaagaagaatttcgccgtaaagaagatgccctgcgtatggcgcaagcgggaggtggagattccatatctgtaaaaaaattggatttgtctgatacctattctgtaggtataaatctgggagaggctttgaagaatcccggttcagatgctgatatggtgcttcgtgagggagatgtgttatttgttccggagtacgtaagtacagtgaaaatcaacggtgctgtaatgtatccgaatacagttttatataaaaagggtgaaagcttgaaatattacatcaatcaagctggtggttttggtaatgatgccaagaaacgtaaggtctatgtaatatacatgaatggtacagtttctcgtttaaaagcagggaacaagaaagccattgaacctggttgtgaaataattgttccaagtaaagaacagaaaaagaagatgactactgctgaaattctgggaatgggaagtacgacagcttctattgcagcgatgattgcgactatggttaatctctttaagtaatttgaattatgagcgaagaaagaatacaaaacataacctctccacaacctgaggaacaagaaatagatttgatagaactggcccagaaagtatgggctagtcgcaaattggtttttaaggcgtgtggtatcgctgctcttgtaggactggttgttgcatttagtattcctaaggagtactctacaagtgtgacattggctccggagagtggtggcaaatctggtggtggaagtatgggagcccttgcagccatggcgggtatcaatttgggcacttcttctggtgaggatgctttgtcacccgaactttatcctgatattgtaagttctactccttttctgattgaactgttcgatgttaaagtcaaggatcagaaagcaaaagtagacacgactttatatgcttatttgaaagaagaacagcgttctccttggtggagtgcaattttctccgctccttttaaggtgttaggatggacattgtctttgtttaaggatgaaccggaagagggggacgcaaagctggatccttttcgtcttactagagatgagtctgccattgcagatgctttaagtaaacgtatctctgtttccgtagacaaaaagacaggtgtgacaaccttgtctgttactatgcaggatcctttgatatctgcttcgctgacggataccgtgatgcattgcctgcagaactacatcacagattatcggactaataaggctcgtcatgatttggcatttaccgaaaaactttatggagaagcaaaggccagttatgaggatgcccagaagaaatacgcaaattttgtagatgcaaaccagaatataatattactgagttatcgcgcagagcaagagcgtttacagaatgaaatgaatttagcctatcaagtatatacacaagtgtctcaacaattgcagatggcaagagctaaggtgcaggagattacaccggtatatacggttgtccagccggctacggtacctttgaagcctgcaaagcccaataaattgatgattttgatcggcttcatgttcttggcaggtgtcggcagtgtgggatggatattatttgtaaaagatttattaaagggatggaaaaagcaaacaatatgatgacggataatgatatgatgtgctggcatgcattgtacacagcacctaagtctgaacataagttgatgcagcgtttgaatgctgcgggatatactacatattgcccgatgcaggctgtgtttgtaaaatggaaagggcatacccggaaggtgattacccctcttttttccggatgcttgtttgttgctggtaatgtggcggaagttgcctcattggcttcctcgcagaaggctgctatattactagataaagaaggaaaaagtttgtctattgaagcgggtaaagcagaacttcctgccaagtttgctcaattgctgaggttatgatgaagctgataacagaagagctgctggataccgttacttcacaagccaaggagaattcccgtttacgtatgaattataattttcatgcgtctatggatgcccctattcatcggttgctgaatgctttggaaccaggaacttatcttcctcctcaccgtcatacagataaggaagaaacttatctggttttgcgtggaagtctgctggcatttttttatgatgatgccggtaatgtaacagataaggtatgcctcaatccttcggaaggtaaatatggtctggagattccttctaatacgtggcatagtattattgccttggagtcaggcaccgttatttttgaaattaaaaaaggcccatatcagcctctaccctcagaggatttggcttcatgggctcctcagacttctgatgtggagggaataaaggcttttatgaagcggatgttggaactttaatatttttttgataaaacaaagaagcctcccgatatacaataaaatatcgggaggcttctttatgtaccatgttattagtcaaacaggctcttgaacttcttgaatattttctccttaatcgaagtgtttggcttgaagttatcagattcttccatttcctccaatgttttcttctcatccttgctcagcgtttcgggtacatatacgctgacatttactagcaaatctcccgtgccgtatccattcacgttgggcaaacctttgccgcgcaggcggagtacttttcccggttgcgtacctgagtcaatttttactttcacctttccatcaatcgtgggaatttctaccgcaccacccaaggctgctgtcgggaagctgaggagcaggttgtaaatcaagtcattttcgtcgcgtatcaggttcgggtcttgttcttcttctacaagaatcagcaggtctcccggcataccgttgtgcttgcctgcatttccttttcctcccatagagagctgcataccttctgcgacacctttcgggatttttacggttactacttcttcaccgtatacaataccttcaccggcacattccttacacttgtttttgatgattttgccttcaccgccacaagtcggacaagtggttcttgtttgcatggtgccgagtatggtttgctggttacggattaccgtgccgctgccgttacaagtcgggcaggtctctgaaccaccgtcaccttcggctccagtgccatggcagtgggtacaaggtacgtatttcttcagtttgaatttcttttccacgccggtagagatttccttgaggttcagtttcaccttgacacgcaggtccgaaccacggtaacggcgttgttgtgctccaccgcctccgccgaaacctccaaaaccgccgaaacctccactgtgtccgccaaagatgtcaccgaacatggagaagatgtcgtccatggacatgcctccactgaagccgccgaacggaccaccattaccggcggcaccacccagtccggcatgaccaaactgatcgtagcgggcacgcttgtccggattgcttagtacgtcgtatgcttctgccgcttccttgaatttctcttcggctgttttgtcgcccggattcttgtccggatgatattggatggctttcttgcgataggctttctttatttcttctaccgttgctgtcttttcgacttccaatacttcgtagtaatctcttttttccatacagttttatgttattctccgactaccactttggcatgacggatcactttgtcgtttaggatgtaaccggtttgtacacagtccagaattttgcctttcagtgcttcattgggtgccggaatcacggcgatggcttcgtgatagtctgtatcgagcggttgttcctttgtctctattaccttaacgccgttttgtcccaatacagacatgaacttgttgtagataagttcaacgccttcttttacggcggctacgtcggtggctgtctccatgtttttgagggcgcgttcaaagtcatccacaatgggtaggatactgctgatactcttttcaccaccgttcaggatgagttctgctttctccttcatggtacgtttgcggtaattgtcaaactcggcagacaagcgcaggtatttgtccttctgctcttcaatctgttcattggccttttccagttcctgggcgagcttttcttcttctgtcaggggagcttcgttttcttgtgaagtttcttgtccgacagtttcttcgtcacattcgttaggagtagcttgagttttcagctcctcttcctggttgttttctttttctttcggattcatattgttatgcttattattcttgtaaaatgatttagctttcattgctgttaagggtttaagttaatacgatattggtgctccagcaaaaactttgccaaaacggatatttttgccgaaaacgctgcaaaggtaatacttttatgtcagattgacagcgcttctctgtgcctattcatggaaaaataactatctttgcactcgcaattcgcagactaataggtattaaatagtaaattgtaaataaataaatcgtaaatataaagatgattacagtctctaatgtctcagtacagtttggtaaaagagtgttgttcaatgacgtaaacctgaagtttacaagtggtaactgttatggtatcatcggtgccaacggcgccggaaaatctactttcctgaaaacgatttccggggagctggaccctacgacgggctccatcatgctggctccgggagagcgtctttccgttttgagccaggaccactttaagtgggatgcttttacggtgatggacacggtgatgatgggacacacggtgttgtgggatatcatgaagcagcgtgaagtgctgtatgccaaagaggatttcacagacgaggatgggctgaaggtttccgaattggaagagaaatttgccgagttggacggctggaatgccgaaagcgatgctgccgccttgttgagtggtttgggtatcaaggaagacaagcattatctgttgatgggtgagttgaacaacaaggaaaaggtgcgtgtcatgctggcgcaagctctctatggaaatcctgataacttgctgctggacgagcctaccaatgacttggatatggagaccgtgacttggctggaagagtacctctccaactttgagcatacggtgctggtggtaagccacgaccgtcacttcctcgactccgtttgtacgcatacggtggacatcgactacggaaagattaacctctttgccggtaactatagcttctggtacgagtccagccagctggcgctccgtcagcagcagaaccagaaggcaaaggccgaggagaagaagaaagagctggaagagtttatccgccgattcagtgccaatgtggcaaagagcaagcagactaccagccgcaagaagatgttggagaaactgaatgtagaagaaatcaagccgtcatcacgtaagtatccgggcatcatctttacgcccgaacgcgaaccgggtaatcagattctggaagtttccggtttgacgaaaacgctggaagatggtacggtgctgttccgcgacgtcaacttcaacgtagagaagggagacaagattgtattcctttcgcacgacccgcgtgccatgaccgccctgttcgagattatcaacgagaatatgaaaccggatgcaggtactttcaactggggtgtgactattaccaccgcttacctgccgctggacaatactgcattctttaatacagacctgaatctggtggactggttgagccagttcggtgaaggcaatgaagtctatatgaagagcttcctgggacgtatgctgttctccggcgaggaggtgctgaagaaagcaagcgtattgtcgggaggtgagaagatgcgttgcatgattgcacgtatgcagctgcgcaatgccaattgcttgattctggatacacctaccaatcacctcgacttggagtctatccaggcattcaacaataatctaaagacctataaaggcaatatccttttctcatcccacgaccacgagttcattcagacggttgccaaccgtatcatcgaattgactccgaacggtattatcgacaagatgatggagtatgacgaatacatcacttcagaccacattaaggagttgcgtgcacgtatgtacgcaacaaagtgataacggaagctaaggactaaataagcatattttaaatcgttccatcatgaggaaaaaatcgttccaccatggtggaacgattttttcaccacggtggaacaatatttctgccatgatggaacgattcttctttcatatcttttttgtttaataaaggcttgtgcgatattgaaaaaaagaagaaggtgtgttagaatgatttttagctatcattctaacacaccttcttttgctattaaaagagtctctttgttcttattaaggcggggaatagtctgggttattgtttctccttatatataattttgccttggctttcgccgaaaaggttgtcgcccagcgtggtaatcttattccccgtggcaagcacatagcgcaggttgtcgcatcccataaatgctccgtactcaatggcggttacactagcaggaagcaccagcgtgccgcacaaacgaccgcagccactgaatgcacgctgtccgatgcttctaagctcttgcgggagccgtacgttcagcagatacttcttttgggtgaaagtatagtcgggaattgcagtggcattactgttggtcatgtcgatggaaaccagattgggcatatagtcgcgtatcaatgtgaagtcggcttcgtccatttttccttcaacggtcagaaagttaacgtctttgggctgaaatccggctcttaacagttcgctggcaaggctgcccattttaccaatctgcacatttactgtcagtggttctccttcaatgaatgcaaaggtctcccatttctttttggtacggtaggagtcactgcatcccaatggaacaaatatggctgtaacgctatcggccaatgcttcggacaacagattgggagccgttttcttccgtatctggcatatcttgagatttttgcatcccttaaaggcagcatcttcgatgttcttggtcttgtcggaaaggataatcctggtcagcgtctccttacctacaaatgtactgttgtccatttgcttgcagaaggcatatgccggaatgcaattggcaggatatacataaaaacggtttggataagtcccgttcttgcctgcatacatgctgatggaggcattggaaatgtccagcagttgcaggtttttgaattcatcccgtagatgcctgaaatctacggcattcagcttgccctgcagggtcagttgggtgatttcattggcttccgcttctgtcgtcagttccaccagggtgccgggtttggccacgtagtatctttgggatttttgtgccgaggcattcagcattaacgccagtccggcaacggctaaaagtatttttctaagtttcatgtttgtcgattccagattgatttttcaaatataagaagaaaccggcaggaatacgtgaagttttttctttttattattatttttgtcggatattaatcaaaatgagatacaaatggagacggaagaaacggtgaaggaagagtgtgttgctgtgagtaaaacaaaacgtatttggctggcattcgttgatatagtactgtttactgtactttttgtgatttttctgtttttgtttgccataccttttgcgattgctttccctgagttgaagacacaagctggtgggatgagcgtctatttaatgatgttgaatgaagccttgatgttggctagtgggcttattgccgcttgtatggtgctgggcttcaggaagcttcctttttcgggcttgggcttgtctttgaagggatggggtagaagcctgctgaacggagctttgtttgtcgtgttcttgtatgcagttggttttggcttgtctttattgttgggggctgtggaagtggcaggggtcttgttttctcccatttcgttgttgtcgagtcttttgctttattttttagtggcagttacggaagaagttattggacgcggtttcattttagggcgtatgctggatggaggcgtcaataagtttgtggcattgcttatctctgcggtgttattttcgttgatgcatcttttcaatcccagctttgccttcgtcccgtttttgaatatcatgctggcgggttgtttcttgggagcttcctatatatacacgcgcaacctctgtttccccattgccttgcattggttctggaactggattcaaggttctgttttgggatataaagtcagtggaaatgaatttagcaatgagaatctgctgattcttcactttccggaagaaaatctgataaatggaggaactttcgggttcgaaggctctattctgtgttcactacttttagtgcttggtacagtaattatcttaagacactattataagggattagtgattagggattaatgattaatacagaaaccattaaccactaaccattaatcattaatccctaatcactaattctgttccactcctttcattgtcagctgtatgcgtttccggtccatatctatgctgagtacctttacgcgtatatgttgatgaatggacactacttcattagggtctgatatgaatctgtcggcgagttgggagaggtgtaccagtccgttttccttgatgcctatatcgacaaatgcgccgaagttggtgatgtttcctacgatgccgggcaattccatgccttcgcgcaggtcgttgatggtgcgcacgttcttatcaaattcaaatatttttatcggtccgcgtgggtcacgtccgggcttgtccagctcttgcaggatgtctttcagtgtcggcatgcccacggtgggggagaggtagcgttccggattaatcttcagacgcagctcccggctggctatcagctcggctacgctgcaatccaagtcctttgccatctgttctacgatgcaatagctttccgggtgtacggcagtattgtccagcggattctttgcctgcggaatgcgtaggaagccggcacattgctcaaacgccttggcacccatacgaggtactttcatcagttccttgcgcgaggtgaaggcaccgttttcggtacgatagttcacaatgttctgtgccagctgcggacccaatcccgagatgtaggtcagcagatggctgcttgcggtgttcaggttgacacctaccaggtttacacagttttctacggtctggtccagtgattttttcagcttggtttggtccacatcatgctggtattgccccacaccaatagatttcgggtcaatctttaccaactctgccagcgggtccatcagtcgtctgcctatggacacagcaccgcgtacggtgacgtcgtagtcgggaaactcgtcccgtgcaattttagaggccgaatagatggaagctccctgctcgctgacgatgaatatctgtatgtcgcggttgaagcgctgatgtttcaagaactcctccgtctcgcggctggcagttccgttacctatggcaacggcatctatcttataagactctatcatcatttgcagcttggcaaatgcctctttctgcttgctgaccggagggtgggggtagatgttctcattgtggagcagatttccttgtgcatcgaggcacacaactttacaacccgtacgaaatccggggtctatacccatcacacgcttttgccccagtggtgaagccagcaacaactgacggaggttttcggcaaataccttgatggcttcctcatcagcacgttccttactttgcgtggcaaattccgtctctatggatggcttcaataggcgtttgtaggaatcctgcacggcttctgccacttgctgtccgcaggggttgttgctccgcacgaattggcgttccagccgttccacgcactcctcatcgtccgggctgatgctgactttcagcaggccttccgcttcggcacgccggatggcgagcaggcggtgggagttgcatcgcttcaacgattcggagcagtcgaagtagtcacggtatttggtcgcttcctcttctttgcctttcactactttggcggtcagtatgccttggcgggcaaatgcgttgcgcacgctgtttcgggcacgttcgtcttcgctaacatgctcggctatgatgtcacgggcacctttcagtgcatcttccacgttcttcacgtctcctttcacgtaattggcggcgcgttcctccggatgaggatcacgttgcagcatcagcagggtggcgaggggttccagtcctttttgacgggctgcttcggcacgtgttttccgtttgggcttgtaggggaggtagatgtcctccagtagggtattgtcccaagtctcctcgatgcgcttctgaagttcggcggtcagtttaccttgttcctgtatggtgttcaggatggtttctttacgtttggcggtttcgctcagtttctcatattgcgtctggatagcttcaatctgcacttcgtccagtcctcccgttgcttccttgcggtaacggctgatgaaagggattgtcgctccgtcttccagcaggccgagggtctggcttatttgtctttctgatatgccgagagcggcagatatcattcgatgaaaatcttgtatcattttgtatctcattttataataggtgccaaaagtacaaaaaaacaattgttgttttttctttaggttccaacttttatctatatttgtcaaagctatggagcaattaaacgaatcaatcaattgaaacacatatatcgtacaatattaccatgcatggtagcgcttttctgttgccttttgcccgctttttctattacgggagagcatccggtactgattatcagttcctataatccggatgccggccgtacttccggcaacatctccgactttatggaggagttccaacgcctgggcgggacaaacaccatcgcattggagaacatgaactgcaagagtttttccgaatcccctctttgggagaggagaatggctgagctgttggctaaatatcaaggtgataaaagtccggcgctgattgtacttatagggcaggaagcctgggctgcctatctttctctggaagactccatatgcggcaatactccggtagtgagtgcactgtccagccggaacgccatattgctgccgggtgataccgttgacctgaagacctggatgcccgaatccgtcgacttcttcacggatttccccagttcgcctatcaaggctggcttcgtttatgagtatgatgtggaggccaacatcaatatgataaagcagatgtatcccggcaccaagaatatcgcttttgtctcagacaacagttatggcggcgttgccatgcaggcctatgtagtgaaggagatgcagaagttcccggaactaaacctgattctgctggacggacgcgtcaataccatatataccatttgtgacagattgcatgagttaccggaaaatacagctatattgatggggacatggcgtgtggacatgaacgatggttacttcatgcggaatgcaacctacgccatgatggaagcagctcccactttgcccactttctcgctcagttccgtaggcttgggatattgggctgtggcaggtgtcgttcctgcctaccgtgctttgggcaaggagatggcaagacagtcttaccgcctgctgaccacctcccaggatagtgagacccatatggaaatcattccgaatgagaccatactggacggtaaacttgtgaaggaaaagaaactgaatatcaccggccttccgcagccggtaaagatgctgaacgtaaccccttctttctacgaacagtacaagtatcatatctggtctgtcggtgctgttctgttggtgctgttgggcggtttgttcgtttccctttacttttattatcatacaaagaagttgaaggatgaactggaggtatccgagggtgccttgcgcgaagcaaaagaccgtgccgaagaatccagccgtctgaagagtgctttccttgccaatatgagccacgaaatccgtactccattgaatgcgattgtgggcttctcggacgtgctgtctgccggaggagcctcggaagaagaacagcgtggctatttcgagattattaggaccaactctgatttgctgcttcggttgattaatgacatattggatgtgtcccgtttggaggccgaccgcgtcatcctttctttggagagctgcaatgtagtgcagatatgccagcaggtagtagcttccgtggcccaggcacgcaggtcgaccaatcaattcttatttgagtgtgaacgtgaggtagtggagatgcggacggatgtgcagcgtttacagcaggttgtgataaatctgctttccaatgcggacaagtttacaaaagaaggtacgataaccttgaagctggagccggatacggcgaggaatgttgcagtattctcggtgactgacactggttgcggcattccattggacaaacagaaacgggtgttcgaacgtttcgagaagctgaacgaatatgtgcagggaaccggcttgggcttgtccatctgtaagctgaccgttgagaagtggggcggcgagatttggatagatcctgcctatacggatggagcgcggtttatgtttacccatcctatgaacttataagaaccgacaagaaataaggaaatataatgaaaagatttagttgtttttttatctggatttttgtcctgacaagcatactgcctgcgcaggaaagagaggtgaaactgaaagtcgtacagaccagtgatatacacggcaactactatccctacgactttatacgccgccgggaggcaaccggcagtctggcacgtgtgcatgctttggtgcaaaaagaacgtgaggcttatggcaaaaatctgattctcttggacaatggtgacattctgcagggacagcccacagcctattattataattacatagataccgttgcccctcatctggcagcggagatgatgaatttcatggggtataatgccggcaatatgggtaaccatgacgtagagaccggccgtaccgttttcgaccgttgggcaggtgactgccgttttccgatattgggtgccaatattgtggatactgctaccggagaaacccatttcaaaccctatgaggtgctggaacgtgacggagtgaaaattgtggttctcggtatgataactcctgccatccccgtatggctttcagagaatctgtggaaagggctgcgtttcgacgatatggaggagactgcccgcaaatggatgaagattatccgtgagcaggaaaagcctgatttggttatcggtatgttccatgccggccaggatgcccagctgatgggaggcaagtatcgcgaaaacgcttcggtggaagtggcgtgcaacgtgccgggattcgatattgtcctgatggggcacgaccatgcgcgcgaatgcaagagggtgtgcaacatagccggtgactcggtactggtgatggaccctgccagcaacggtgttgttgtgagtaatgtggatataaccttgaaactgcgtgatggtaaagttatagacaagaagatagacggcatactgtccgatacgcaagactacggcgtcagcgaagagttcatgcaacgctttgcccccgaaaatgaagctgtgcagaattttgtttccaagaaaattggttcctttaccgagactatctccacacgtcctgcctatttcggttcttccgcttttatagaccttatccacgaattgcagttggcaatcagcggagcggatatttcttttgcggctcctttgtcctatgatacggaaatccgtaaaggagacatttttgtgaacgatatgttcaatctgtataagtacgaaaatatgctttacaccatgcgtctgacggggaaggagatacgcgatgccttggagatgtcgtatgatttgtggaccaatcggatgaagtctccggacgaccatatccttctcttccgtgagaagcgccgcgaaggtgctacggatagggcctcattcaagaatttcagcttcaacttcgattctgcggcgggtattatctacacggtggatgtgaccaagccggatggcgagaaggtagccattctcagtatggcagacggtactccgttcgatatggataaaatgtataaggtagcggtgaattcttatcgcggaaacggtggcggcgaattgctgacaaagggggccggcatctcgcaggatgaattgaaggaacgcatcatccactctacggataaggacttacgctattatctgatgcagtacattgagcagaagaaggtgattgaaccgcgtacgctgaatcagtggaagtttattcccgaagagtgggcggctccggcttccaagcgtgattatgagttcttgtttggcaaagttaaagaataattcactatctttgcggctcaaaatctatagtataagtttttggacgtgaagcagaagaaaaaaattataggtgcattgagcttgctggtactgtttatcatgtaccaggcaagtatcactgcgttcactcacgtccattatgtgaatggggtgatgataacgcactcgcacccttttcatggcacacactctcactctcagacttcccttttggttatcgggcatttgtcggcattctactcttccggagtggatgtgtatgaggttcagcacccgatgcgtcctttgctggccatgctcagagccaaaccggcaacacctactgttaagggggaagtgatacgtaccctttcccttcgcgctcctcccgctcttttttcatagtcattaggtttaaaaacgcctggattttttgtatgtagataccaggcattttagtctcgaagtccggcatttcagtgaacgaagtgcggcatctcggatgattatcttttttcagacttgaattattttttttatttagagcgctaatttgatgaaacaatacattttggcgttggtacttgcagtggtaagtgccagcgtagcttttgccgtaaatcctataaaagaaggcaatatgatttccggccatgtgatagtgaaaggtacggaggaaaatataccgtatgccacggttttgattatcggcagtggtcagggaacggtttccaatgaagaaggacaatttgagttccgcaagcttccggcgggaaaatacaagctccgtgtgtcggcagtgggttacaagacccaagagaaggaggtgacggtgagcaaggactttactgccgtcatacatttcccgatggaagaggagagtttcatgaccgatgaagtggtggtatccgccaaccgcaacgaggtaagccgcaaggcagctccggtagttgtaaatgtgatgagtaccaaattgttcgagatggtcaactccaccgaccttgccaagacactgaactaccaatcgggcttgcgtgtggagaacaactgccagaactgtggtttcccccaggtgcgcatcaatggcttggaaggtccgtattcgcagatattgataaacagccgtcccatcatcagtgcattgagcggtgtgtacggattggagcaaatccccgtgaacatgattgaacgggtagaagtggtgcgtggcggaggctctgccttgtttggcgccaatgctgtgggaggaactatcaatattataaccaaagaccccatcaacaattcctttcaggtatcgagcatgttctccaatatggacggcaagtcctgggagcaatatatgggtggcaatgtgtcgctggttgccaaagataactcttacggcattgccttttatgagagttaccgcaaccgcaacccctacgaccgcgatggcgatggcttttccgagctgggcaagctgaacatgaatactttcggcttccgcgcctattaccgtcctacgcatttcagccgcatcaatctggaataccataccaccaacgaacttcgtcgcggaggcaacaaattcgatttgcagccgcacgagacggacatcaccgagcagaccaagcatatcatcaatagcggaggcgtgagctacgatttgttctggaaggagtacaagcataagatttcggcttacacctccatacagcacaccgaccgcaacagctactatggtgcccaaaagaacatgaatgcttacggcaagacgaaagacctgacctgggttgccggcggcatgtatgtgggcaatatggacaactgcttctttgcccccgccaccttcaccggcggactggaatatcagaacaactccctgcacgacatcatgaccggctatcatcgtgacatggagcaggatgtccgcattgccagcgccttcgtgcagaatgagtggaagatgaacgtactgaccatgctggtcggcgcccgcctggacaagcacaacctgatagacaagcttattttcagcccccgcgtcaacctgctctacaagccggcagatgattttcaggcacgcttgacttactctaccggtttccgcgctccgcaggcatacgatgaggacttgcacgtgacggcagtaggcggcaagggagtccaaatcaaactcgccgataacctgagtgaagaacgctccaacagttacagcggttcggtggactggactgcccatctgggacactggcaggcaaacatcctggtggagggtttctatacagacctgcgccacgtctttgtgctcgaagatatcggcaagaacgaagtaggggatgtcatcaaggagcgccgcaacggaaacggcgcacgcgtatacggtgccaatctggatgcgaagattgcccacggcaaggaggcgcagttccagctcggcttcacggcgcagcgcagccgctacacccatgaagaagtctggacaaaggtggacggcaaagaccttaccaccaagcgcatgccccgtacaccggactattacgggtacttcactttctcctcggcaccggtgaagaatttcgatttctccctttccggcacttatacgggaaagatgattgtgccgcactacgcaccggaagatgctcccgagggtgccttctgcaatatcacctcggaccgcatggagcataccccccaattcctggacctgaatgtgaagctgaactacacctttgtgcttcacgaccatatcaagcttcagttgaatacgggtgtacagaatatcttcaacagtttccagaaagacctggataaaggggaattccgcgatgcgggctatttctacggacctacgcagccgagaaccttctttgtcggcttcaagataatgaactaaaagtttccatttaaggatttttagagctaaattccgcaaaatagtcctacatttgtcgccaaagcacaaaaaccatggatactaagagaatacgaaatgtagatatttcccagatacatcatttgccgatgatcgatttcatcggcaatgattttgctatttttgatgacatcaaggacatgtctttgagctcttatcccacccgtttgaatgctgcttgcctgactgtctgcctgaaagggtggtgcaaactggaactcaacttgcagcaatgtgaaatgcgggaaggtatgttgggtattatccttcccgaccagattgttctgcaaggagaacgctccgatgactttgccggacttttcattgccgtctcaaaagattttatggatatggtgatacccaccatgcaacagcttttccccatgttcttcatgattaaggaacggcctttcgtccacatcactccggaggaatcccaatcattccaggagtatcactctttcctctggagcaaggtgaagctgaaggacaatcctttccgtaaggaaatcacccagggattgctgctggcactgttctatgagatatacaacatctatcaagggcatgccgttcaggagcgcatacccaaaagcaggaaggaagacttgttcgaacgctttatccgtgccgtttcagagtcctataaggaagagcgaagtgtgtcctattatgccgataagatgttcctcaccgccaagcacctttccaccgtagtgaaggaaatcagcggaaagacggcaggcgaatggattgacagtctcgtcgttttggaagccaaagccttgttgaagtcttccgagctgagcattcaggaaattgcagacgagctgcattttgccaaccagtccttctttggtaagtatttcaagcatcacaccggtatgtcacctaaagaatatcgccggcaataggttcaatgtgacggaataatgtttatttttgcggtaaagatttacccccaaaataaactatcatggaaaaaagagaaattgaccttactgtttcctgctatggaaaggtgaaaggagtgaagtatgacgttgtcatcttgccgtggggagctacggagccccataatctgcatctgccttatctcactgattgtattttgccgcatgacattgctgtagacgcggctgcgctggctttgcagaattccggtgtacgctgcatggtgatgcctcccgtacctttcggtgcacacaatccggggcagcgcgaacttccgttctgcattcatacgcgctactccacccagcaggccattttggaagacatagttgcctccctctatgcacaaggtatgcgcaagctgattattctcagcggtcatggcggcaacaacttcaagggaatgattcgtgacctggcgtttgtgtatcccgattttctgattatcgctgtcgactggttcagcatcgtccctcccaaagactactttgaggctgttgtcgacgaccatgccggcgagtctgagacttccgttatgatgcattaccatcccgagctggtgaatttggctgaggccggtgacggggaatccaaaccgtttgccattccttccttgaatgaaaaggttggctgggctcctcgccattgggataaggctacagtcgacagcggggtagggaaccccaaaaaagcttctgccgagaaaggagaacgttatatgaaaccggtggtggagaagttgtcgaagctctttacggaagtcggtcaaggaagtctgtattgatgtacttggcttccggctatatataaaaataggcaataaccattgtggatattgcctatttttttagtgcaccctaaaaactaatctctttactcttataaaaactaatctttctctatttcgagtacaaaattagaaggtttttgcgggttatgaattgacataagtcaaaaatctcattcggatattattttttcaaacgtgcccaaaagcccttctttttctgccggaccggttcactgttttcgcggaacagttcttcgtaggtcactccgtcatgtatcatgcggtagatgcttccccagtcaggcagtccacctaggttgcggtcatcgataaagagatcggcttttactttgcgtgaaaaaccggtgtgtgcgatgtcttcttccggatagtcccggttgacgacatagaattccacaccccgttccctgcaccattccacagcttcctccaggagcttcccttcacgtaccgaccataaaatcagccggtgacgctcgtttatcagcatcttcagcgtagcggtggcaaagggaatttcttctcctatctggggatagcggtgttctacaatggtaccgtcaaaatcaacggctatggtcataaatgaatagtttttattggtttcagactgcggagaaaattatccttgaccgcctgtggtgccgccagagtgctggctgaccggattgtttgaatattcttcctgatgtcccgtgtagcttttcagctctacttttacgtctttgctctggttgcctaccactactttaaaggtatatgttttcacgcgtaccatacgcttgctgccatacagcagtacatggttgccactgacacttgcagtcagcttttgttcaatttcataagaaccgttcgtacctccctcttcagtttcaatgtagttgttgatgtatgtggccagtgcatcggatgctcctgcagctttcagcgcttcagccggagaaacggtatagtcccatccgttcttgattttaagggtcaggatgatgttttccagtgcatcgtaatctctgttctcaatcttgattacctcggcttttccattcacttcgttgtagccgtctgctacactggcggcagcttgtttggtaaatttcactctaggtgaatatttgccggctatcttctcgccttgcggaatggtaatgatgtaattgttattgttgaatcctacggttttagcagcggctctggttgcaggcgcctcgctggattccacttccatgttttccggatcaaaatagcccaggttggcatcagtcgacggattgggaatggcaatgatgatatcttccttggcaacagcgtcagccggctctgtcttgatggctacgttatttacagaagcctttgatgcttccggttgtgtggaagttgccggattggcctcacgtgcctcttcaaacacgacggctgcaatcttggtgttttcttccgtacctccggtgggtatgttgatggtggcggcattctccttttccggattttctattttcggagcctcaatggtgcttccgtcagcctcctgcatttcgccgaattctatggttgttgacatttttacatttaccaccatcaggctgtggttggctgttccgtctgtaaattctgctgtggcctcgtagtcatcatgtccttcagctgttacggtgagcgtgtagatgccggttttgttcacagtcagtgagtatacgccttttgcatcggttgtggcagagtattcgccgctttttacggtggctcctgccaatggaccgttggcatcggtaatggtacctgcaatgtagtaggctgtttgacttctcagcgggtcttccacttcttcatacttcttgtcgtcatcgtggcaagatgtaaggactgttgtgctgaaggtcattgcaaacatcaatgcacctcctaaaaataaacttttctttttcataattttcgtcatttgataaaactaatctgtttaaattatacttatttcgatttttctttttgcagttcctttataaggaaatagcgtatatagtccggctggtagaagttgctgcttcggttttcgttagggcgtgtactgtaactttttcccagttgtttttctatgtactctccatctgccaccatgccgtatgcccatgcaaagtagtcagccggttttactctgaagaatccttttctactccatttttttcccggcagggggatggcaaaatgaaatcctccgtttatctctccgtctgtacaaagggcatacaagccgatggcatactctccgaagtgccgcgtacagtctcctctcactccataatcaccgtaaatatatcttcctgctttcaagtcgaactgcaagttgaggcgtggttcgtagtacgaagcattcagtgaggcattgatacgctgttttctgcctatataccagccgtcttcccgggtgatggcggagaaaccggtggagcctgccgttccgcccagttcccaacgtccgttgttggtgcggtattttatttccagttgtgcaccatatctgttgttggtgaagttacccaccgtcattttcccgaagatgttgtgcctgaagcgtacatcctgcgatagagctatgattcccggtcttatccgtttcatctctccactcagattggtggctacgggcagtatcacttgtgcggtcattttcccacctttccatagagccatttccactgccggattcaggttgatggcatatgtatacagttcgtcaaacgtattgttctccaaaaacaaatcggggtatatcaccaaatccatcttccaggcagacggcacttcttcctgaccggcatttttcaatgccttcatggcaggatccgtatctactgtaatccccatttgctgatatacttgtgtcaggttgatttccccgtttctgtatgcttccgtcaatgtatccggcagattgatgcaaagcctgggaatccggttttccagtaccaccaattgcaaatcgcccttcgtcttgcttcccaagcaggcatctatggctttgcccactccggtgtaggtacttctatatacgttgttctcaaaacttacagtggtcattcccggtgtctgtgcacatcggatgttttccattccgatagctttcaagctctctgtcacttgggcatccaccgttgcagaaatactacagaaccatactgccagtatccacttcaaaccgctttttctcttgtttttcatcctactctccaatccctaatccttcatcccttatctctctcttagtgcaacaacctgcattcataccgtattcctcccgatatgctgttgaattctctggtaaacacatggatggagagatgcctccataatctggcggcggctcccacattgaaaccttccgaatcatattcggccatgacagtcatttcccggcagaaagcaggggagtagctgatgcctccgaagggaccatcctttatgctatggtcgttcagtgggaaatagtaaccggcagtcagtgcaagcctatctccttttgcaatagagaaccctttagttaatgcaccatatacagtagcaaaatagtttattcccgtatttttgaaaggatcatctacaccaagtaataagcttggatgaaatttaccttctttaagtggacgtacacgtgcagtcatagatcgatcctgatggaaatatccttctttcccatcgtaacgtttagctttttgtagcgtacaccgataactcaattccaggaaggataagaatgtgatgttaacgaaataatttccagtgttgaagttaaacggtgtcatgccgttcggaagataattgccgccccccataaaagtaccggtctcctgcatatctgctgtcgggatgttcagcagtccggtgttgcccatggaatattgggcctgcactcccatgctgcaaccaagcagtagtaggagcaggcaccattttctcattttcgttttcagcatgtctgggaagtgttttcaccatccatttgtgccctcatatagagcttcttcacaaatgccatgtcatgtgtcaccatgattttcaccagttcttcaaaagaagtcttgcgtggattccaacccagcagtgtcttggctttggtcgggtcacccagcagttgttccacttcggcaggacggaagtatttgggatccacttccaccagcactttaccggttttggtatcaatgcccttttcattcacgccttctccttcccaacgtagttccacaccggtttcattgaaggcaagtgtagtgaaatcacgtacggtatgatattctccggtagctatgacaaaatcctccggagtgtcgtgctgcagaatcagccacatgcactccacgtaatctttggcatatccccagtcgcgcagcgaattcaagttacccagatataacttgtcctgatacccttgggctatacgtgcagctgccagtgtaattttgcgtgtcacgaaggtttctccgcgccgttcgctttcgtggttgaagagaatgccgtttacggcgaacatgccgtagctttcccggtaattcttcgtaatccagaagccatattgcttggccacaccatatggactgcgtgggtagaacggggttgtctctttctgtggtacctcctgcaccagaccgaacagttcggaagtcgaagcctgatagattttcgtttttttctccagtcccaggatacgtactgcttccagcatacgcagggtgcctacggcatctgcttccgcagtatactccggcacatcgaatgatactttcacatggctttgtgccgccagattgtagatttcgtccggctgtacctgctgtatgatgcggataagcgagctgctgtccgtcatgtccccgtagtgcaggtttacgagacggttcttcttcatgtcccgtacccattcatccagatagagatgttctatgcgtccggtgttgaacgatgacgaacggcgcagaatgccgtgtacttcatatcctttttcaattaagaactcggctaggaacgatccatcctgaccggtgatgcctgaaatcaatgctattttcttatccatgattcgggttttaaaatcagtttttatttatgttatgatgtaaatttctcttttgtgatattccataagaataagcagttcccgatgatatatcttctccacattcttttgggttcctttatcagccggtacagccattccaacccgtgttcctgccaccatacgggagcacgttgcacgttttcggcaaagaagtcgaacacagcgccaatagtaccgatgggaccgtttacctccagttctttcaggtgtgtataagtccatttctcttgtttgggagcggtcatgcccacccagagcaaatccggctgtgcccggtttacggcggctatcatggcttgattgtcttcttgggtgaattccggcttgtagggtggggaataggtttctacccggatattgggatataaccggacagcttttacctttattttcctcaaggtgtcttcgctacttcccagaaagaagcaggttcctcctttccggttcagcttatccatttcgtacagaaacaagtcccatcccgctgtgcgctctatcttctcatgtctcaggagtttgaatgccagtacaatgcttgctccgtccggaatcaatgcgtctcccctcagcaaagcttctgcaaaggcaggatctttcaatgctgtgttatacgagtgcgcattgatggtgttaatcagcagtttgccttcgggcaatgcgtcaagctcacttctgtgtcccagaagcgaaattgtctttaacttcaacatgtataaaaggaatgataattttccgcagagtacgctacgctatcgcctgtcacatggaaaggtattttgaacagaacgatgtaatcatgtatgaaaactgcgcaaatgtaaagattatgtgtgtaatatacaagaggaatgtgaaaaatgtaatttagttggtctgatgattgatgcagatacctttcagataccattcgtacaaacggtgtattccttcgtctatttctattttatgatgccatcccaggttatgcagtttggtcacatccgtcagtttacgcagtgtgccatccggtttcgaggcatcccatcgcagctcacctttgaatcctatttcggctataatcttttcagccacttcctttatgctgagttcctttcctgtgcccacattgatgtggcagttgcgtatttctttactgtccggagcatatgtgtctttaaagtctacattcagcagtacatgtacactggcatctgccatttcttcgctccataggaattcacgcaacggtttgccggttccccacaaggtgaccgcttccggggttattccgaagttggcaagctctgccagaatctcctcgttgctatagctgccgtttacccctttcactggacgcaggttgatgtctttgcgtacagcatcccaatccccttcgttgaggcatttggcaaggtaaatcttgcggatcatggcaggcagtacatggctgttttccaggtggaagttgtcgttcggtccatataggttggtaggcatcacggctatgtaattggttccgtattgcaggttgaagctttcacacatcttcagcccagctattttggctatggcatacggctcgttggtgtattccagcggagaggtcagcagcacttcttccttcatgggctgcggagcttcacgcgggtagatgcaggtgcttcccaagaagagcagcttctttactccgtgacggaaactctcgccgattacgttctgctggatttgcagattctgatagataaagtccgcccggtattgcaggtttgccataatgccacccacatgggcggcagccagtaccaccgcttccggtcgttcttcatcgaaaaatttctttacggcggttccgtccagcaaatccagttctttgtgtgagcgtcctactaagtttgtataacctctttgtcgcaggttgttccagatggcggaacctactaaaccacgatgccccgctataaaaatctttgcatttttttctaacatgactaataccctagttataaaattaattttttctatttacttcttgtatgaagctatacattcttttaaaatatctttcatccggttctcaaacttttccaaagtgaattccctttgaaatttttctttaccggctttacccattttagcacatatcatgggatggtctattaaatattctatcttttctgccagctgttgcggactatgtttttccacgataaatccggttttgccttcctctatgataccgggtattcctccctcattcgtactgatgcagggtagtccctgttccatagcctcaagaagtactaatgggaaacattcattatgataataagtgggaaatataaataagtctgcttgtttaagaaacaattctttttcttctctatatttggctccgtgtgcctgtatatacttgtctagatttttgtgttttaccttttggttgaattcactttccgcaatgtcactccattttccaatgtaatcacaatgaaatgaataaccatcgttctttacgatatttagtgcatctatcaaatcccatacccccttttcccttaacatgttgctgaggaataataatttgaaagggttgtttcttttcttggaaaaatcataggttacgttttgtggaatgccattgggacagtataccacctgttctggttttacaaatttttggatatcattgtagagtgggggagccagcagtattatctgtatattcttgaaaaaggctttgtataaccatttgtccggccatcgtccttctcttgatttcacacctttgttatgaaaatgtattatgattttctgtcccaaacattttagcaggaatagggtacaaaaatctttgtagaaagccccacctttggtattgggagtcaaatagcataattgtgactttattctcttaacggtttttgctatttgtatctgtttttttaagtaaacaataagtttccttattcctccttttcctatgtcattgatatctttggcaagagttaagttaagataatggcagtcaaaagcttcgtttatcactttgctgtcatggatatattcccccatcatggatgcaccgtgtacgggtgggggcatgtgcattataaaaagaactcttggtttcatgtttcgtttaatcaaattcaaagtatagacttcaaccagtgtgctatggcgaggttaccattatcagtttgatacctttctcgtggcatatattgatgatgtacctattgtttatgtgaactttactacttccggtgatactccctgtattgcagcaacttcgccaacatccaccaagtaataggagtatgtttcgtcatattcatgagtttaccaatggagtccttcacaaaatatctgccatatttcaaagcctcttgacggctcaatgtcaaacgaccggagagaagttggcaataagtgaggttgcgtgaaatacgaccacgggcttttaaataacctgcaggtagttcattgggcaggcgtgtaacaatgcgcttttcccaatcagcaatactgggcgcgctgttccagcgtatcatcattttgtttaaccagccttgactacgggtcacgtctccaccatcgcttacaaaaagaatttccgggataaatccccattgtccataggtagataccatagcccaaaactccaaatcttcagtgatgcgaaggtctttacgttgtcctccaattatattaatcacttctttgcggattaagacacttcctgtacagacatgcatgtgctttgcccagaaagtgaaaaaatcttctaagatgaaagcttctttatactcttggtagcaactggggatttcaaatgaaccggagacagtgaggtgacgttgcgcaacatttactgccacacaatcaggatggttgtccaaaaatgaaacagttttttcgataaaaccttgttcccaataatcgtctgcatccaaataagcgcaatagcgaccttgtgctgtcttaatcccattgttacgggcagcagaaggtccttcgtttttttgtcgtaataatgtgatgttggcttcttttcgggttttgataatctctatggagttatctttgctcccatcatcaatgagaataacctctatagcgtaagatgtttgctggttgaaaatagaatctaatgtgcggttaatggatggggcggcattataaaccggtatgattacagataaatctatcatagcattttatggatgtgtacatatgtttaacaaattatccaagtaggctttcgacttaatcaattcgcgttgcttggtgtgattgatctgttcgtaattgaaagggtaataataagctttttcccatttttcggggttgtccaatatacattggtttattccgaagagggtcatcaagctttccatacgtgaattcactttatgtcgatgtctgttaaatacgaagacaggtttgttgaacataatggagaatgccgtgccatgaaacgaattggatataaatgctttgcagtgataaatcatcgaaacaaactcacgaggacctgctttcatgaagtttctgtcggcataaagcaacgggtaagtatctgctatgacataaatcttcaagtgatgacggcgtgcatactccttggcaaaacgtttcaactctttatttccttcaaagtcgtaaatcaacagataatcttctttggagatgtttgttaccatcaattgtttccattgttctatagggagtaagaatacggggtcgagcacccattcccccggaatgttcatctccctgagcaactgcaatccatgactctcccttacagacacagcatcaaatgtccgcaggcattcggcaattttttttttctccttctggggaatatccacgtaagagaagctggcagcgtatgatgcttttctgccctttgttacgaattcgagatagaaagccggatcgcgtcccgcttcgtaaaacacgttccatatttggtcgctccctaccacgtagaggtcggcttccggtggattctggcacagcttttcgagcgtgcggtattctcgtgtctgcttcagatacgagtcgatgaaacggtcgaactgccgtttgcggcccatggtggtttgccgttgcaggtacttcatcacgcgatatgctatgcgtgtcacggcataccggctcagtttcgattccgggttcacccatcggtagtcatactttcgtgtcagatattccggttggtagtttattagcaccgcatcgtgtcccatacattgtagataggtctgcaaggcgtatgcctgtagtgctgcaccgtagttataaacattgtatgtagtaagggtaagtattttcatataggttattttcttataatcatattcttgagaacaatgtcaggcatagaacaaacagctgagcatttgaacccacaaataggatacaatgtcttaaatattttagatcgccatgtcttcttcatagggaatctcagttgcttgttgccggcaatggcttcctccatcggtctttccaccatgttcacctctgaaactatattccggagcatggcatgacctttctctgagttgactaacgcaagtgataatccgtagtcagtattcgtatgtatttgggatttgtccactccccagaaatccccgatggtcaggtcactgactctctcacttcgggtatatttgcattcgtggcaactgtctctgcaaaaaatagctttaaaaaatcccttcatgtataagtcgatatgtaattctcttttataaattatttttccagacttatatatttttaatctgtaagcagtgtcgtcacggaaagttaatttgtcaatgttgcattctacgatatcagtaggcaaacttgatttgaacagttgtatggatggaactccgtggcaaattacgtccacagtaaacagattggttccaaactttttagtatacagagccactgtggctacttgacatggtgtaccgatgaataatacttttttcccattcttcaaatcatttgctatttgcgagtggatacctgccaagttactctgtacatattttgagcttttcagcttttccaattcatccgcagatgagcaacggatatgctttatagaaaaaggtttctcgaaagcgcatccgtaaacgatacctccttctgctatcatccgttcggacaataccgcagccaatccacctgaagaactctgccgccttagcgtatcgtcctttctccacaaagcatacgccttatttggttttctataatcgggtttctgtatagcggggcaactttttacacacaagccacagttgatgcactgtgtctcttctgcatgcgtatgtatatgtcccaaagaatcattggatatatgaatgcaatgtttcgggcatctgtcaacgcacgatagacatccaacacaattgtgtacattgttgatattgttcatttaccagtttttttatctaaactacgaataatagcatcgtattcgcgttgtgcacaattttccgtattgaatggtttttcaagttcaatagaagcttgtcccatggtttttaaatcatgatggtggaaatattccaaagcatctgcaatagattggatgtcatacgtgtcgaaagttattccgttagcatccctcttcacgagttcaggatggcatccgttgtagatagaggttgcaacgggtaatccgcaagacatcgcttcgggtacaaccaggctccagttgtcttctaaagtcggtaatacgaaaacatctgcgataccataatatttatatacttcttgataaggaatctttcctaagaaatgaacagacctcatatctccgaaagaatcttttaaggcaggagctagtggaccgtctcctaataaaattaaggagtcatctgggtgtttctttatatgttggcgccatgcttgtaacagatatttggctccttttctctctacaagttggcctacaaacaaatattttatacattttccgaatttgcagttcaatgattctttttcatcatcagtcattgatgcgatacctgctttcagtaatgtgctgtcggcactcatgccggtaatgaatatattttcttctttgatgccgagttgcagtaaatagcgttttgtttcgtttccatttacaagatatccggttacaaacagatttatgatttttcggtatagattcattatccactttgtattacgctctgtatggcaagtgcgctcatagcccatgaatataggagttcgatggataaaagaatataggactagtaatggtgtccattggaaaaatccctctgttatcaacacatccggttttatatttttaatgcttcggtacaatccttttgtgataggaattcgttttcccttttcaccattatatcttttgaaagacatttcataagtattgaagagtttttcattttcaaaaggcaaggcatttctacccaaaacttcaggaatttgtttgagcaaatgttcattatggcgcattttataacgtgttgtggaatacatgacatagaaattgccgtcaaacaattcgttcagtcttttataaaagggtagtctataatccagaaatatcgggttgcaatataatactttcatactattttgtgttaaagcagttttttatatccttaatgctacttggaaacagaattcgttttaagaacattcttttattgatacatatagaaataaatagcgataaacagacagatacaataaatataaatacaccggtaatcaagttgttgggtaagagcgcacataagatgtttatgatgaacatattgaacaaatatattcccagggaattttctcctattgtttttaaccacttgaaattaaggtgtggcaacaatgccaatagaagcagaaagaatgtcggcacaagcaaggtgcttcccataggtacacgtatatccataatctgtaatatgtttattacaacaaacacaacagctcctgcatatttcatataggcagataggctgtttaaagcagatgccatccagccgtatgcaaaatatcctattgccagtccgatgcctaagggcattgtattcttgaaccaataaaattcttcccaagtacatccccatgtgacaacagacaatattatcattatcccatagagccacttgtgtttcaacgacagaaggtacaagataaagaacgaacaataggtgggcagaaaccaagggaatacaaaattgtagtatttgctcaaatgtgtctgtgtacccaaaagaatggctgatatgtgtccccattccagcccgattttatggaaataaatgcaacttgtaaggtaacaagctgacaaaatccataaataaggcacccagttcctgacaatgatatctctcaggtgctcccaactcgtgtcagctttcattttatagaagaatggcaatatgaagaattcgattacgtggaatttgtataattggatttgtagtctcacatattctccatccataagaaagtgattatgtcccaatactattagcaggataagaatcccctttattatattgctctcatcgcgagtaagatatatcgtttctttcatatcctgtttcctattgctaaagaataagtttttggggacaatttaatccagccttgtcctataagtattattaagtacgaaatcataattggcagtaatatgtatgtgatcgttgcgatgatatcgttgccatagaagatgtgtgcgatgccttgtttgaataatttcataggatagaaatgcatcacatagatgagaaatgagaaagtcgaaagatgcagcattttctgccgccacgtttccggtatatggttcagcagttgccagaacgctactatgcctgtcatatctgtcagcttgtgtatccattcgttgaaagtcataaagccggtaaagcaggctgcaaaccagatggctgagatggcaagagttggtgcaaggcgcatcctgacagatagcatttccgggtgtttgcctatcaatcctcccaatacaaaaaatactaaacattcagaggacaagactgagcaatctataggtttccatagatagaacaatacggtcacagttatccatatcggcaacgatgattttatgcggaacagccatccatatataggatataacatcatcacaaccatcaaatccctgacataccacaacggaccgtaccaatggctgttgaacagattctgaatcaccgagaatatatccgtgccaacggcttttttgtcaaaaggcaataagcacaaggctcctgttacattccaaattacgaatggaatgaacaacgtatgtatttttttgatgatcatttgtctatagctttgcggttcataatagttctttcctaaaaagaaaaaaccggataccataaaaaaataaggaactgctatttgagtaagacgcatgcaagagtcttccactattccgttcaatccttgtggactccacgaatggaagaatgcaaggtagttgagtgaatgcctatatactaccattagagtacagataaaacccgcaatgctgatttttacacttaaatctttattcatcttcgtatcaattgttcaagacgttgcgctcttttaaaatgataaccggcaactattatggcaaagtaagcaattgtgatgacgcatgccttgcccgaaaggaaaccgtaggaatatccgttgaccaaagccaccaccatggcacacataagtcccaagtagccgcgcttcaagctgtttttgaaaaatgaaaaaagcgaggtcacgaaatgcagagctgccagtacgcaacccgcataccctaagctgccgtagaaacctatgtagttgttatgagcatcgggtgaaagcacggtgcctttgaccgataccacgcgttcggcacaagcaaagccccatccgaacatgggtttttgggctgcaaaatacaatatctgttcccacaatcggtcgcgcccagtggcactttcaatagttgcttttgttttacctggcatgatgagcaacaataagtccataagttggtcttggtagataaatgcaaaaatgccaatacatgccattaaagctccccacatggcatgaccgctgaacagcatggctgtgcctatgccggcgacacaagatgcattggcaccgcttgatgtactcgtaacaagcaatacgaaacttatcagcatgaccgttctgaaaaacctcaggcgtttcttgtcttttttttcctttatccattctgcaaagcaataggcaaaacacatggcagaacaagtacccgtttgcagcaaatgaatgaagataggccatcctacattgtatcttccaccgatagcactgaaaaaggccattgccataatgagatataccaaactcttttccacaccgtcaaatgtttttggcatgcttagcagccaaaaagtcaaagccattagtataaaattctgtatgctcaagaatgcggagaatgcaggcatgaacgcccatgtggcactcaacaacgcatagaaatataatagtagcaatgtgcgtatcggtggattcgatattctgaatattcccacaactttcctttgccaatgagaatatacaataaataacatactgaaaagggatattatttgcaaggcttgtgcaaagcctccatctcctgctggcataaatatggtcctatatatccacaataggaagaaagccgttatccaacggaactttttcccccagcttgttttaatgtctttgtagagttgctttaaactgttcatttaccaatatgatgaatgattacttcttgtattttgcttattatgtggtggaaaaattataaagcacacttcttttgcggccgtgtaattttataccttgaaacaatattctataaacgaaagtgtatagtctgaagatggttctgcttcttatgaattcaaggaattttttatcattgttttgcagtagtgcttttaaattattgtcattcttcacatattcataaatgacgttataccaagtgttatcccaacctatttccggtgtaaagaaacattttatatgcaccattattctgttacgttcaatggtctgcatgatttttgaagatgctcccgttgcaatttgcagcatcatttttccgaaagattcatgatactcatgtgaaaggactcgtgtctgcatcattgaactgctattaatatagtatgcgcatacaacattgtctatagctgcgtatcttttaacgccacgccaaatggactggttggttatccagtcttctccgatggatatgtttgtcgcagacttgaatatttcttcagaaaataatgtctttctgtaaatgcccccccataaataaggcaatatgtgataagacaacagagcaaacagatagttctcctccccaacgatttcttttcctgacaagattggtgtttcaatacttgatgtaccattattccgcactctcaggttagccccttttactatatcgtatttactttctatagctttggcatataatgaacttaaggctttaggtaagagataatcatctggatccaaaaacaccaaatattcccctttggcatgttcaaatccggcctttcgtgccgcatgtgcccctctattttcttgatgtatcacttttatccgtgtgtcctttgccgtaaacgcatcgcacatctgcggacaacggtcagggctgccgtcgtcaacaagtatcatttcccaattcgtgaagtcctgcgcaagtacggagtccacgcaacgttggagatatttttccacgttataaacgggaaccaatatggaaatcttaggagtattcatcatttactatgaatttaaagccttatttaaaaacaacaacgacgattcacgcaaatcacgaaaacgtgtctcaacctctgccgtataatcggtagccgacacaatcatatcgttatcacctgctttgctcaaacgttccacatctccccataaggattccgccaattcacggttacgtgcgtcaattaaaccgtccgccatttggaattcctttcggaataataaagaaaacacgcaaagatggaacgatctgcctatgcaatatttagcatatttcacaaaattcagaaattccaaaggccctgcatccaaacggtaatcgaatgttcgggtatctttttggaaaatcatatagatgttactcgacacgatacggtaaccatgctccacggcatattcccgagccgcattcttaccaacttcatggtcaaacggatcgtaatagaatacatactcgcctttgatcaaaggcgagtcacccgcaagtttattccattcttctacatcaagcagcatagtcgggtcgagaaccacgggcagatttgaatcaaagaaagccgccgttccactgtctctcactgccacagcctgataggttttcacttctcttcgcacacgctcggcaagatgtgccggtatggttttccgtccgttcggtcccatgctgggagcataagcgatcttctttccgttccgtacaaaatcgaggtaataataccattcaaactcaaagcatccggtattccaaatctggtcgcctccggctatataatagtcgaaagtgccacattcttcattgattttagatgggtcgcaacaatagggtgtcaggcgcatatagtcgtgcgcaaacgacttaaatttgtccacctttcgcttcatctgtttattgtatggaagccaacaaagtgattctatccaacgtttcaccggatgacggcttaccaaaatcggcaagcgatagccatctacctgcttttgcggctggtaattgatgatgctgcaatcatatcccatatcgcttaccacccgttgcaaggcataagccaatagggcggaaccgtaattggtcgcggcatgaaaatccactattcctactgtacctttcattattttctgattatttttttgatgcaatacttcattttacttttcagaattctgtccatccatgtgatgcgaaaggctgcttcaaaagagcaataccgggctaagaacctgaagcaacgggttcgtcccgtacggcgagtgggcgcgttgagttgcgcattgcccgcgatggcatcttctactggttgccgatggctatgcacgtctgcttgcatcaacgcataaaatgccgttcctttgtccgtattcaccaaaacgaccgaaatgccgttatcggcctcacgatgtactttttcatctttcaatccccaaaagtcgccgatagatatatccgatatgcgctgccgataggcatagcggcattgatagcaactgttacgataagaatttccaaaaaagaaagctggataataggaattggaataatctattcctcgttcaaagatgaaaggcttgccatcttttttaaagcctcgacattctaaacaaaaatctccttttgcatgattacgaaaagacaaataagttaccttggtaggctctatatcacgtatggcatgacgcagagatgcgtgcaaactttgctgtgagggaacgccatggcatatcaaatcaacagtcaacaagttgtcatattcttgccttaaataattttttacgccggctacttggcagggagtcccgataaagagcactgtcagaccttcaagaacatctttctttaacgcttgataaaggtctcccatctcgctttgcacatatttggagcctttcagtttctccacgtccttcatagtggcacagcgcatatgtttcacctgaagtccatgggctgcgcatccatatacaacaccacctttactgatgacggatttacttatggcggtggccatccctccactggtagcagacacataatccacctcatttttcgtccatgcggcatagcaatccataggcagatgcatcggcgacggattcaacgatggacatatcttgtcacaaagtccgcaatcgacacacttgtcttcgtcaattgtaggtaaaatctcacccaagaatccttcggtcacaccaatggcatgtttgggacaaacattcaaacatgccaaacagcctgtacattctggggcagcacacaaatgtttcttcatcttttcagcattctttcacttcaaaaggtttattgtgtaccatggcggcagtttgcgcgaaagcgcttttatacatcttgccgcttttacacagatacacggcttccgcatccgcgataagcagaaagtcgaggaatgtcttcatattgacgtcatcatcattatcgtaatcaatatgccccaccttaccgggaatcacatatacatgagacaaagcggcagcttgcgctaaaaaagtggaactgtccgccgttaccaagattctgtcatgcgaaggtgcggttttcgctatttgtgaaatggcatgcaggcatttttcaatcagtggctgacgctcggctaccggaagtgccgctcccgtacaatcagtaaaatctcccaataaagtggtaaaacgaaatgagatggaaatatatttccctcctatctgttccttgtggtaatctatcaaattctgtaaacgaggagctggtttgaacaacttgccgaatagttctgcaaatcggctgttgccatatcgcatattggtatatacgtgcaactgggcatttgtttgtactaaatgctcatccagccactcgccaagcagttccggtaatcttggctgtaccgtaggtactgccaagacaggagctatgaggcattgtttgacagctacctcacaaggattatacgaaatatcctcatcggcaatctgccaatcgtattcgttgggtatcaggtagttatgtaaccggaacggatggcagaaatttatcttgaatggtttggagtggtcgctacaccaggcgtaaagcgacacaatgccttttaacctgtcagccagtccgccatgccaagtgtatccgttggccatataaatgacagtagaccgcttgtttccgcagattttgtccgttgattggtaatgaattttcgtcagtttgcgctcaccgctacgttgccgtttcaagaaaaacttccatgctccgataatttctatctggaggtcataccacttcatttttaccggatgaagaaatctgcttttgatatatgttaatcccataatgttctgtattcttttacatcttcttccgtgacacagccgagtttaaagatataagtgtctttaaacttgttgggcatacacaacacggcgtttgtgccgctcacaactccggcgacaagacagtcacattgtgaaacaatatacatggagcgataatattgctttgtgatttcaaggatgtcacgtttctcttctctatttatttgcatcaacagcttgccatggttgtccccgtatttttcctgggtattgggtatcagtttctcgccaaactctttttcgaacatccggtatatgcgttcgtcttccgtagcgcaataaaccatgttgcagttatgtttcttcatcatgcatcttacttgctcgattgccatttgtggagtgggttgtttctcaattccaatcaaaggtgtgtcaaaatagtccgttccacggcatatacatgcaacaatgtggttgtttccgttaaaagcatcaggcatccctttcaaaaaatactcctttaatgttttttggggccggatatattccgttgtaacggattttagtttttcttttgtggctttgtcggcagatgaaacgtcccatatcgtatatttgcgattagggaaaggactgtctatgctgaattttgcatgttttgagccgtacacgtcatttagcgtatacccgcagggttgctcaaaaaagtattcccatgggtttgtgccatcgttgcgcaagtatggattcgggaaatccctccaattgacaactggtgtcaggccattgtcaagtgcatatattatatgtgctcttgttttgtttaccatactgaagaagccttcgtttttcatcgtaataccgattacatagaaatacaggttcttgtttttaccccccccc

SEQ ID NO: 4442 - DNA, 87394 bp, Unknown
  gut microbiota DNA sequence
cgccatacacgaccacctggtccaaaaagtctaagtttcatgaattccttgaattttaaatgtccttttataatttaatccgaaatgctacaaaggtatgatgtgaacctaccattctacaatctgtagtatacacccgatcttcttcggcaagttaagtgagcgtaggttgcagtgtactggtgtcatatacctaaaccagaaggttcgcgtctcaatattccggcttttatcaagagtttcttgatcctgcggtagataccataatgtcctaagcataattgccataggcgatagcgttggaaatatgtcttcttgtattctgctgcatcggctcgccggaacgacagcaccactacgggataatcgctccgccgctcgtctttccccaagggttgccagaaatagctgcgcagaccgtagtccgacgggtcgcgataggggcgtatgccgtgtttgcgaacaacgatgtcaagtaacgactgatcgtcacgatgcactttaaaaatcgggtcattaggtattgtctcatcaaaacgttcacatgcaatgtacttttccactatacataagttaagccattcttgaatcaaggcgacggttttggtattctttttcataaagatgaatccacttaacacctgcggcaaatcgggattctccacataaagccacctaatgacttccgcttttgtgtactctcgtgtggtagcccaaagcagttggaacaccataaagtcttcaccatctgttattgcatggtctgtcaacttatgtacatcgtctataatctctgcaccgcagtcacaataaaacagccaatcaccgtctttgatattgtcaagtgcctttaaaatgatataaggcttccaagaatgcatgcctgctccgaatttgtatttaaacaaatcaggatgagcttcaatgaattcggggatgcttgctgaaccatattcaaacacttcatccacttttccaaattttttgagtgaatcggtatttactttgcgacggaattcgtatgctggatcagcgtagtttactgcgtataatttgtagctattcattcgttgatttttttactttttgtaaacagaaaagttccttctttgatactatatgatagtagtgtgataataaacacaatgattgctccacaatagtcataaattgggtttatgaatgtattgtcttttatcaatcgtgtgatgaaaaatattactgacacgtgcataatgtagattaatagagtgtaatcttgacctatttttgaataaaacataggtgactctttatcatcgacaagatggagagagaagttgcttttctgtgtgtatctccgatgaaaataccgtaatatatagcttccgttttttgtccaatagcacagcggaggcgtttcatcttgttgggattggaaagtatgacggtgtctgaatacagtgagtttacggatgttactatcaagcgagtctgttcacctttaggacagtaaacttttatttcagcccctataataaaagctttgcatttgggattgtccacactaatggaataatctgctgcggaaagaggcaaggcatcacccttggcataaagtaagaaagattcctctcccgatgtatttatccaataatcgtaaacgaaatcttccgatgtattcatcaatttaatcaggctgaatggttgctcttctttacattcaaatgcttccacttctgtgaggccggcatttgcgcccctgctgtttataatgcgtatggtgaaaaaatccacatcttcttttcttacatgtatgcgtgttggataaccgtctgtccttaaagaatattgggtaggtttctcattgttaaatgagatagatactttctccaccacattgctgttccaagtattctgataaagcagaagatattcaatacgtgatggatttgccaaggtaaaagtaactttcttttctttatccgtttcttccggtatccatgctccctcggtggggaagctgtcacgattcaacataaaggtctcacttttatcatagagtaagaagtcgttcaatttgcttcccttgccggatgaaacctgaatggtagcctgtagtagtaaagagtctgaacggcgttgccatgccactttatcggcattgaaattgatagctcgcattgcagctctctgtgacttgaaggttttatattgccggaaaatatctgaacggagtagacttctgttcaataggtgtgctgctatgggcagacgcaaccgttcttcccacggataggtttccaccgtagctttcttgtaaagtgtagaacggatattatttttgtaataatctggataagattcccatgtagttcggtaagcatagctcttcatcaccataggacgatactttgactttgattttagcacttttcccaaagcctcatcaatggcaatagttacaagatgatgttcttcatggtaatcgtaatcactaccaaaaataatatctggtttttgcagcaatataatctcttttaggtcgttcaccatattttctcttgttaaggcttgaccttctttatatgcaggaacattctgtgtacctttagttacggtaggtatgttcgcctttttactatgtataaatccatatccaaggaatgtgacattagagtccggaatgccaatgtgtttgcacaaatttaatgcttcagtatatctaaaaccttgtattgttccgtttgttatggcatatacgatgtgtacagtgctaccatatttgataaactcttcaaaaataccgcccagcacattgatttcatcgtcttgatggggtactatcagcaatacttttttgttgccataacatgctgttttcccattatcaacatcttcaaaatcgtgtgaggtttttgcaaatggaagccacagaagatacattacccaaggaataaggaacagtgtggcagctaatgtaaaaagtaatatgttgggagtatccgaacaaaatgctaatagtatgaattgtgatagcaatgatataccatataggcttaatttgaaatgtatgccctttaacaccatggcaaaatcaatgatgatgatggtttctatgcttagtatcaaagaaagtatcagatgtagtatcattttttatatattagtatgtcctaaatgccagtctgttccggtccttaccacctttgccggactacctgccgcgatgcaatgaggtgggaggtcttttgttacgatgcttcctaagcctacggttgtatgttctcctattgttacgcctttcatcacgtttacccctttgccgagccatacatgcttgcctatgacgaccggtttcgaggggtttaatggattgccttgcaggtctgtgataaggtgggtatctgatgcccaaatctcaaccttctctgcaaacatacactcttcaccgatttccacacggttgccctgtcccattagtactatacttgtgctctcgtctatcagagagcctcttccgactgtaattttgcatccatttcccttcataaatacattaatcatagctttacaaccatcatacactacctcattgtcatttcctataatctttatccctccgaagaacatctttgccccgttgcgcacgatgatgcggttgtttttacccgtaatattaatagatgtgtgagtgacggtactgttttcaactttgatgcagttgttgtcttgcggatctcctatattgtaggctatccatttcatattggctttttttagagaaaactgccggttgaatctacatgtaatagtgtctgtgagataatgaaaatattttcttaccataaatcttgtagttgtgaattaagtttccaaagcaatagggacaggcctatagtcatcattatgtcgatggaaattttgtcaaacacattcatttcgggagagaaaatcagctcggctattaccgctgctatagtattgccaacatatatatccaaagtgtgtgtaccaatccaattgaatagtttgttctttaagactccccatttatcaatgagtatatttgctatttggatggcgaggagcacagcacatgcggaaaataggtagtgatgtccctgaaaaaagaaagcaacacttaatagaaacaaaggaatggtgaccttataaggcaaatcctctttgttactgagggcacactgcatacccagcagataaagagggaaacgggcgaccgcattatcatactgccatcttccggttcctaaaaattcctcttccaagacaacaaccaaactgatgagtatcactaacccccaactacctttttccaaaagcatttttagtaacgggctgacagcatagaataggagcaaggtggaaagataccattcgggcagcaagtcagggttgtaatagaatgaaagtgatgtgatattgagcaggaatatatctaaaccaagatttcccactcctaatattaaatttattatacatacagagcttatcatgacaatccacaatggaaggattcgccggagcctatgtatatagaattgttttatggaattgtgggcaagcgacttggcaatgccatatccactcagcaacatgaagacatctactccagcatatcctacattcaaccgaccgatgtgtatgccatgtaggcacagatgatagcaaatgacgcccaggatagagaggtacattaatgtagttctgtttctgaacattagttttgttttatggcgtaaattttctttctgataaaagagcttgtcttctctctttcacctttcgttaaggcgaaaaaccatgaagtaatcgctattgttagggtggatacgatacttgtcccgaacaaacgaatccaaccttgttccataccggataggaatgcaaagcatacaagagttgagatacaggttacaatcataactcctcttaacgtatgtttgaaaaaatatccgaatgttattccgatataaggtttgtttactgtaatgcgtggaatgaaaatcaacagataaatgacatttgtaactgctacagtcaaaatggaattgcctgttatttcaagcactatgtaggaaacaatgagaattagtagttgggccacactgatgataatctggaatttgcggatttttccggaagctctgtttaacgtctcatttgagttcagtagtatttcaactaaggtgttgagaaatgtcaactggacgaaaataccagcgtaaggaggcatttcggtcagccatttggaaagaaaaaaatcaacttcgaacatgcatggaagtgcgatgaaaagaaatagcaggtatgagaactttgcgcctctgcaaaccagttttgttgtatatgctatatctccggctgcatacgattttgttatctgcggattcaatgctgtagtgaaatttcgagagaaagcacctactgttccattgatttgagaagctacaccgcgggctgcattgattgccgtaccaaagtgcatgttaagcatgatgcccactccttgactgcttagcatggaagtgcaagtggtcaggaagttccatcctgcaaaaccgaacatgtctttaaacaagactttgtcaatatgtgtagagtattggcattcggggaaattcttcttacaatatatccagtacatcaattgaatggaaacagatacagcaagtacaagaattccatagaacaccagtttgtcaatggggctggcagcaagtgatagggctatgccaaacgtcaagaagaccttggttatggtgacgaaagcaaatgttcccattttctcgtgtgagataaccgaagcactataaggcacgctgatcatctcaagaacaaaagagagaagggagaactgataaatccaatttgcagcagtcatacggtctggctcgatattcagctttgcgttgacaaaccataagcctatggtctcgctcaacagcactaccaacagagcaagaagaagaagaatatttagggatgtggagaatgtttgctgcaactttttcggatcattcctgcctaattcaaatgtaaggaaacggctcactgcctgtgtcatggtggctgtcaccatataaaacatggacacaaagcctcctataacattatagacaccataatctgatactcccaaattggcgagtatcaaacgggtagaatagaaactgatgcctacagtgaacagcatgcgggcatacagaatcaatgtgtttttggctaatcgtttgttattttgtgattgaatcgacatgttttgcatatactttgaacttttgcaaatagcgcaaagcataatgttacattatgacttttttgtttgcaacatttatataatgatattcacaaaaatggtgattatattttggaatatgcaaacattattgtttttgtgtaaatatttagttgtttttgacgatccacctctctatgttcctcatcttattgctgaaattgattccaatcttgaacaacttccgtgaatccgtctcgaaggggtgggcgtaatgcttttcttctatctgggcgatggcctcttcggcagtgccttccagtttgaactccatcacgtagatgtagtccgtagtttttaccacgaggtcaatccgtccttcggacgtatgatattctgcctgggtatagaaacctaccagtttgaagacaatgaagagcacgttctggtagtgccgttccagctcgctcgtttgcttgtaagcgcgttcaaggatgcctttgaagcgtagcgccaaggtggtttccgctatccccgtgccgtagattgcttcccattgcgagagggcattgtccagaatcttgtccagactgtccggcgtgtcatattttccaatgttcaggtccaggtgcagcacggggcgtttcacccagtttttctccagcttttccattgccagtccttcgaaaagctcccgcttgccttggaagtaggcttccagggtagatatgagcaggctcttgccgaagcggcgcgggcggctcaggaagtagtaactgccactgttcactaacttgtgaataagggccgtcttgtctatgtagacatagccgtcgttgcgtattttcctaatttccgtaccgttgtttcaaagtcaagttgacacctgtgtcaccccttaaacataaatacatgttacgcgcgcgaggcaaattatcaatatgcacaaacttgtattgtttgtgtgtgataaatatcagcctatagaaagtattggaaaaagggtgccacaagtgtcatcgcttcgggtgaagttaaggtttcaagactcccgtatggattctgtaatgcctcaaatcactttccaggcaatcggctacttcttgctcgaacctttccctttccgaatttgttttctgaaaagacctccagaaatgcgttatggcatgtatctggttgatgttgttactcagcccttttttaaaaggttgtaggttctggtactcatcatcgttgcttgggcgatggtctcgttggtcagatgtctgccgttaacgagctgttctttctggcatttgctcagaaaggctccgaatgccggtgtcaccggctctttctttgtcatgttgactcttttaattgttaaacaataataaaaacaagcgaaatcatttccatgtagtggaaacgaccggacttgtgtatctgggcacttatgcgttccttcgcgtcgtaattttaaacataaacaaaaatcagtaaattatggaacaccgcaatatcagccttttcagaggctattcggacacagaatcagtagaaacttctcttgaagaaatagtcaacatcattaaatgcgacgctgccctgcgagaccgcaccgagaaacatcgctactacttgcagcaagacctgcgtagggatgccgaccgcgagaagtccggctgttcctgcttcgccgttgccgtctgctttgaaggtgggaagacccgcgaacatatctgtgcctggaccggctataccttggtcgacctggaccacatcgctcccgagcggatggctgccacgttgacattgatttgtgccgacaagcatacattgatggcctataccaccatcagtgggcatggcatccgcatcatctgtcgcatcgatgacctgaacggagcggaaaagggaaaagccttccggcaatacgccaagtatttcaatcaagtcaacgactactattcctgtctggtgggcttcgaaagtgacgggcagtgcaagaatgctacccgtatcagcggactggcttccgatcctcatgtatattacaatcccagtgccgcagcctttgttctccaaaatagtccgattgctccccaaccgcaggatagcgcttccgaagttgtgccggcaaagcgtaacaaacgtttggagaaggcagtgaaagctgccgaacgcctgctggaagaggagggagtgagttattgtgaacatcatcataatgagtacgtgatgcgcatgggttatttgctcaaccagtacggagtggcccggaagacagccgccgcttgggcagcggagcactttcccgactatgacggggatgtggcagctgtcatcggctcctgctacgcgaataccggggaacatggcacccgttcccttgtccgcaggggagaggacgatgaaaagtttgccacggtggcagatatcgagcagttcctttccgaacaggcgaagttccgcaaaaatacggtgagcggcaagttcgaagtcctgatggccgactgcggagaggagtatgcggagctgaccgaccgctacgtcaacacgttgtggagccgcatgaacaaggcagggatgcttgcccgcattgctgacatacgttccgtgctcgattcggagtacacgccgcttttcaatccctttgtagcctatctggaggggctgcctacttgggacggtactactgaccctattgcccgtctggctgccggcgtacatgtgaaggacgaccagaagcttttcggcatctacttcaagaagtggctggtggccaccattgcttcgctgctcgataccaaggtggtgaatcatgagattctggtcttcatcggtaagcagggcatctacaagactacctggatgcagcgtctgcttcctgtcgaacttcagcgttatttttacgtgaaaagcaacagccggcgcgtcagcaaggacgacctttttacgctgaccgagtttgcactggtatgccttgaagagctggaggagatgacctctgcccaggtcagccagttgaaggccatcaccggcatgacagacgtgaacgagcgtgccgcctacggacacttcaaggagagccgtccgcatattgccagtttctgtggcacgagcaacaacgtcaccttcctcaacgacctcagtggcaaccgccgttggcttcccttcgaggtggattccatagacagtcctttcgattatcccatagattatgccggagtgtatgcgcaaggctatgccctctggaagagcggcttccactactggtttgagcaggaggagattgatgccgtgaatcttcataaccgttattttgaggtgccctgcctggagcgtgagctcgttcaggtgtactatcgccgccccataccgggcgaggagtgtatgttcttgaccaatgcccagatactgggacatatcaacataggtatccggcaacccttgagtcccacgcgcctcggtctggtgatgaagcaggagggctatgaggctgtccgttccggtggccgccgtggttatcgggtggtcgagctgaaaggggatgaaatctaccgcaaccaatgcgccatggcgcgctatgtgggggattgattctttcatggttttcctaaatacctgaatataagttccacctgtagggaggtgaatattttctgggagcctttgtagccggtatgccgcagggcttcgtccagttccaaattcagcttcatccatttggacaagcggttgagtgcggatgccggtgaaatggtgggggcgtatgcctctgccagttcacgtttgtaataggggcggacgggccactctttgccggggatattttcgtagtcttcaacgtacttcataaacaatgctttaactggttattacactgtaaatgtacggaattttttctgtatacccattgccggaacccggtataatcttacctaatctcacatttttccacatcccttcatatcacttcaccgcatctcttattctgcccggaggtacgtcgtatctttgttctgtcagacgatgaggggtgaagattagtaatcgtgacgcgcgaagattagtaatcgtaagcccctgggattagtatcgtctccctatcttttaatttttaacttataatttttaatttatgattaactacagtatcgtgatgcgtggcaatcctaccgataagacggttgccaaaaaagcgtacgcaagtgcgcagtattcggaagtgatggacatcaaccgctttgccgagcatatagccagtcatggctgcgtgtacaagcgttcggatatcgttgccatcctcaccatgtccgtggattgcatgcgggagcagttgctggccggacaaaaaatccagttgggcgacctggggagtttctacatcagcatcaacagtatcggcgcggcttctgccaaggagttcaatcctgccatccatatccgtaggctgaatgtgaactggacctgcggccagcgttttggagagctgctggaggaggcggaattcaatctggtggcaacccgaagtgcagcccgtgccgtggtgaaagccctgaaggccggaaagactaccgtggacctgaccggagccactggcgggggtgaagatgccggtggaggcagcaacccgggaggcggttcggacggagaccagggggaaaatccgttaggatgaaacgaaaagacaaaagagagaaaataaatatgttcttctgtctaaaaaatgcagctaaccatagtgtttaattccttaattgcaaattgttatgagtgagaaaacaaaatcaaaatctgtatggggcattgtccttaaagtgattattaccgtggccactacattggccggagtgtttggcttgacttcctgcatcaaccgttagccggatgaaagcaggcagtttctatcagaactatcgggaggtaaccctcctggtagttcattgcagcgctacgcgctgtgaccgtcacttctcggtggaggcgcttcgccgcagtcatctggcacggggctttgccgatatcggttatcatttctacatcacccgtgacggcgaggtgcatatttgtcgcccggttcatcagattggagcccatgccaccggctggaacgacaagagtatcggcatctgctatgagggtgggctcgacgagaatggtgtccctgccgatacacgtacctatgcgcagaaatgctctttgcttgacttgctccggcagctgaagaccgactatcccaatgcccgtatttcagggcatcggcaactcagttcctctatccataaggcttgtccttgttttgacgccaaaagcgaatacgagacaattaaaaattaattctctccacgtatcctatcggcatgtccacatgtgcgcagcccagcatatccagccggactgccactttgctttttcctcctatcatgaccagttctccctccaatccggcaagggggccttttattactttcacggcatcacctgctgccagaggtgtactgcaaatctctacagcctccgggctataatccagcataaagcggaaacgttccatctgttcctcgggaatgacggcgggacggctttcaccgcgcaataccatgtaccgactgatagcttgtaaggtaagcggcagggggcgttcctgcggagtgacatgcacgaaaatcatcatcgggatgaccaggcggtccactttcttgcgccggtcgctccattggcgtatttcgctttgtatgggtaagtaatattccactcccatagctttcagccgttcggcagtcttcttttccagacaagactgcacgtatgccaccagccattggcgacgaggaataatatgaggggtgatatcagtatggttcatgtaaaatcctttaaaggtgtatttctatggttcataaatagttgaggttcgggcgcgctacgcggtcgcctgtcacattggaggggcggggttaattaaaaattagaaattagaaattagaaattaaaaattagacactcgattatttactctcaactcttaatagctagtcgctaactcaactgtatccgtatttcttaccgtagccgtaatactttccgtatttaccatagccgtagtaataaccgtattttttcttcttcatatcgattccgttgactactgtgcataagttggggagacgatgatgctcctgaagctcgttgatgagctggtaatcggtcttatgcgtataatctgcacgacagacgtagatgctggcgtccgctacgcgcgaaaggatgagcgtgtcggtcaccatgccgataggggctgtatccagtacgatatagtcatattctttgcgtaatgtactgatggtgtcttccagtgactggcgtgccagtagttccgtaggattgggtgggatgggaccgcccaatagcaggtcgaggttggaagttatgccggaaggctgtatcagcgcatgaaggtctgtggatttgggggcgacaaggtattgggtgattcctttttctttgtgtgaaagatggaacaacttgttcaatcccggtttgcgtatatccaatcctaccagaatgacctttttgccgagcagcgccagactgagggcgaggttggaagctatgaaagtcttgccttcaccgcttatggtggaggtaaccaggacgactttcttatccggatcgcccatcatgaagagcaggttggtgcgcaggctgcggaaggtttccgtcatgatgtcgttgtcgttttcgcgtacggcaatggcagactcttcatgcttgtttgaaccggtaagggggatgtcaccgataatgggaacctttgtgagcttttccacatcggtatgcccttcaatgcggaaacggagcaggttcaataggaaaatgatgcccaagggaatgccgatgccgatgacaaaggtaatcatatagatttttttgccttggggagaaacgatgccggcaggcatgggttcttcgataatgcgtccattgttagcggttgcagccagtgtgatggcgttttcctcgcgtttctgcagcagcatgatgtagagggtggccttgatttcctgctggcgtgcgatactcatgaactcctgctcctgcttgggggcgttgctgatgcggctttcgtacttgcgcgactgtcggtcgatgttgctccgggtgatttgcaggcctttcaaaacactgtttacggtggttttcacattgtggcgcatggcctcgatccccgtgttcagattgatgatggcgggattgctttcggaggaggtacgtagcaggcgcttacgctccacgatgagattgttgtacttgtctatggcggaggtcaggttcatgtcgctcagtcctacgttggcagggatgatctcgtcgttgtttgcaggattgttgatgtagtcgcgcagatagttcacgaggttgatttgggtggcgttctctgcatattgctgttcatacttggaactttcctgaagggcaagctgcgcgtcgctgctgatgtcggtcagtccggcgcgttgcttgaattccgccagttcggtttctgtggtgcccagttcgtggttgatgatgctgatacgttcctcgatgaagtcggcgcttttctgggccacttcattcttttcggtgttggtgtcctgattatagagtattatcagttcttgggtgaaatcggaggctcgttgtatatgggtgttttgtacactgatggtggcaatggtactggtattggatataggggctacggtcagacctgccctatagcctgctgctgcggcagtgggggtactgatgatagccttcagattgacgggctcttgcggagcaggcgatgaatcattgtgcgaaatggtgatgacacctaccgggagtggtagaatggcaggtagttcgtcgaaagatttggtcgtttcttgcttgtctccgttttgtatataaaaggctgtgacaatcagttggccggtaggggagtatatcagttccagccgaatgttcccttccagtttgtcagcttcctcggcggtcatgaacacatcaagaggggagtttttgtaaagtggaacatcgtagccgaaagattgttcgatggcgatgttagtataaaggttcagacgtgacacgactttcttgatgagtgtccttgatttcagaatttccagctcattgtcaaagttgctggtcatggaaagcataccaaaatcctgcatggcagacagtgcattgttggtacttttcttgtcgtcttctttaattaggatagaagatgacacttcgtagacgggtatttggtaacggagataagcaaaggccaggccagtgcatatcaatacgcttgccacaaaccagggccaatgaatgatgtatttgaaaaagagggcttggaaatctgttttttcctctttttcgtttaaaaggtcatcgtataaatcttctttcattttttgaggattaaaattatcttacaatgttgacaatcagacttgcgagtgaaacaagggaagtaatcacagaaacccagatagtggtactgttactgacgcttgcactctttgccttggttttatttggagctatataaaggatatcattctgctgcatgtagtagtagggagaatgaagaatattctgctcgttcaagtttaggctgatgacatttcgctggccgttacagtcttcgcggatgagcttgacgttgtttcgtataccgtaaatggtcatgtcgcctgccatggcaagcgcctcgaaaatattcactttctcattattgatagtgaaagttccgggactgttcacttcaccgaggacagaaattttgtagttggacatacgtacagtgacaataggtatttctttgagataaggacgaagctgttcacggataaggttctcggctgcatttttagttaagccgcctacttgcagtctgcctatcacggggaagtctatctcacctgcattgtctacgagatattgttgcagagctggttgcgatgtagtgctggcattggattgtgctatgttattataggtctgcatggtcaggttgaacggtgcggcagcttgcggatcagtggtgtttatggtgatattcagcaagtctttaggttggatacgcgcatcgtagagggtatcctgctggttgacttcattgatgacgatttccttataactcttatctgtaagtgattcgtaactttgtagataaggtacttttttgtaagattggcagcttgccaatgtaattgccgccatcaagatggctatacttttcttgtttttcattactgctccttttaatttttgattttcaattttaattctcaatacgcttctttctcgccttgaatggcgtttctgattgtcttgtatataatgtataaatccaatagaaaagtccagtgttccagataccatacatcgcgctgtacacgtccttccatttgccagagttctttggtctcaccacggtagccggtgacttgggcccaaccggtgatgccgggctttaccagatgtctgaccatatatttgtcgataaggcgtgaatattcttcagtgtgtttcagcatatgggggcgtggccctacaacggacatttgccctagtaacacattgataaattggggaagttcgtcaatgctggctttacggatgaaatctccgatttttgttttgcgcgggtcattggcggtggcttgtagttcgtcactgtctatgttgacacgcatcgaacggaatttgtaacaccagaattcatttccattctctccgcttcgtttttgtttgaagaagataggaccgggggaggatagcttgatagcggtacctatgatgatgtagacgaaggggaatactgtacacagaaaaacgagggagaaaaagaggtcgaaggctcttttcagcaggcgattttccatttgtgccaaaggttcctcgcggatagtgagtacggggatattgccaaacatctcgaagtgcatgcgacgatgcaggtaattgcgaatattaggtacactatagaaacgaatcaagtgattttcgcaataattgatgattggaagtatttcatggctacgtgcagaaggcaagcagcaatagacttgttctatatggtgttgctgtaaataagtgacaacttctttaggctgccctaaataggggacatcttcgggaaaatcatcagaaggtacatcacagaaatagccggtaatgcggaagcccgtggtgggatctccggtcatttcttgatagagttctgtcatgtttttgttactgccgattaaaatgacggtacgtgagttacctccatgttctcgatattttttcagtaaataccggaaaagaagacgatatatagcgaggcagataaagaaaatactataaaagcatgtaaaaaaacggagtgaactggtaccgatatctgctaaagtagccaagctgatgaacagcgtggcgtgaaaagttgtattacggagagcccgacgtacaatgcgttccggacgtacaatacgttcatgcagtacgacgccattggagtaattgcaaagtagatagactagattcaataataccaatagctgggacaatgaatgtgtaaattcattgcccagtgtttggtagtcaaaaatgtgatatagcgagatgaaaatgatgttcagtaagcataagtcaccaaagataatgacgaacttaatcactttattgaaatggagaacttgtttcataattcacactaattcaatagcttttttctttctcaatggtattgaaagagaaaaaactgttcattcttgtttgtttaataattctcttacttacaaggtaagaggtggtattttatttggagaataatcttataaaccagccattaaaaggtattttacattaaaagactatatatgtaattaaaatgtaaaacgatattttatctcataattaaatttaatttttgaattcaaaatgggggcgtttatgtaaatatataagacagaaatacaagtggctgcaatgtgtcttatatctatatatgagataaatatgaattaaaaaataaatctatttttttgcgattgtagtaatctttttcatatctttgcagccacaaaacatattctcttaccttgtaagtaagagagtattggtatccattaccttgtaagtaagagaataaaattggataataaaagtactcctatacaaataggaatacttttacaaattctagtttttagggctttttctttttgtttggatggattgttgcaatcacttttttatttgctttactcatcgcattgttgtcaaaagaagcaaggtaaacgtgagttaccttttcagaagtatgtcctaagctttcactaatcacagaaatggccactccttcgtctttggcagtggtggcccagctatggcgggctacataagatgttaatggaatgcttaaccgtaacatcttcgaaagtgtgtgtaaatgttggttgtagagccgtaaagcacttttgtattgtctgtaaccatcttccccggtcagtgataatatcggtagcaaatagggggaagaggcggcttcgttcttatacctatttataatctgtgcggcatacgactctatatgtacggacaattgctgacgggtcttatgacggtaataataaatggtattgtgcttgacatccgttttgcggagatgtacaaggtctacgaacggaatgcctcgtaagtaaaaacttaacagaaacatgtcgcggctgaaacgcaaggcgggtttcttctccaaatcaagatttaccaagcgccggattagtaaaggagagatggcccgtttggcggtaggctcataaccggtgaatacataggcgaacaaatcgtctatactgtgtgtgaatggaatgccttgttcggcagcttggtgagagatggaacggagcatacgcatataggtggatatggtattatggcgccgtccttcaccgagcagccggtcttcgtattgcttgatgaggctgggggtaagctctgcaaaagtgatggaacggtggccgacgaagcggaaaaagctgttcactgtactggtatatataccggatgtactgtatcgtccggcttgttttgtccgctgtatcagggaagcggaaaaattatgtatagtattcataatctgaattttaatattttaaatacatataaaacaaccttgagcatgaaatgattgtatggcaatcaatgcacgcttagggaagaaatggtaaaatttctatataaattcagatatgtattctccgggcagacaggaggagggttacagtatgcccgaacgtacccgactcagtgtttcgggggtcatcagcagataggacgcaatgtgcgacaaaggagcccgcttgatgacttcgggctgatgttccatgagctggttatagcgctcgcgtgcagtctcaaaccgccaggagtcagcctttatctgtgaaacaatcagggaatattccagaatcttccgatagaacatgtttatttcccatgagatttcggtaagtgtcagcagcttgttgtatggcagcaggtatacgacactcggttcgagtgcctcaatcatgaggtgggtgggttcctgcttcaaggtactttctatgcagatgatgatgcagccttcataggaaaagtgttcggtgacgtctttaccgtttttataatagaattggcgcaacatgccttttcctacaaatacgatattatggcttatctgcccttcattgagtaataatgcgcccttttctacttccttgcgaatgaggatttcctctatcaaccttcttccctcgggagccatgcctggatagcgggagttgatagcggcatctacggtttctttcaatagtgcatccataagaccatgatttatttgttcagtaagcaagaccggtaaagttcggtccgcttctgctttcggggagcaaagataggacttttggaattaaaaacaattccggatgaagcttttgtttacccatttcatgccataccagcggcggacgaaaatgaagccgcggatattctcgtccaacaggaaggctacccacatgccgcagataccccagccgaagggaaagccgaaaaggtatcccacacctacagctacactccactgcaccaccaaccctacgtagaaggggtagttgacatctcctgccgcacgaagggcgttggtggcgaagatgttgatggggcggcctatttcgaggagtacatctatgataaggatggtggcacccatacgtatgatgtcggggttggacgtgagccagccaaagatggcatgccccgaaagggcgaggatgcaggacagcatgacggtaatcatgacggatttcttcatgacgtattttcccataaggaaggctgcgtgaggtttcttctcgcctatcagatgcccgatacagatggcgccgccttgtgccatggagatgctgaacagataagcgaacatgatgatgttgacacaataggtacgggtggcgagcgcttccactcccagcatgttgatgaagtaggtgatgacgacttgcgacgagctgtacgacaattgttcgccggcagagggcaggcctaccttcatcaggttctttagttctatccacggaaaagggcggaagtatgccggtgggaaacggtggatgtgcttgcggaacagtatgacgaacagtataatcatggagacaccccggctgaaggctgtggagatggcggcgccttccacgcccagttccggaaagccgaagcggccgaagatgagggagtagttgccgatgatattgaggatattgactacgacggtgaccatcatcgggtagatggccttgttggcactgcgcagggaggcggagagggtgagggatagtgcctggaagaaggcgaaagcgcctacgatacgcatatagtccatgccgtcctgcatcagttcagcggtgagccccatcagccggaggatgggatggacgcaggagaacagtaccaggctgaccgtgatacctaccgccaggttgacgaggatggatacgccgactacttgcactactttcttgtgtagtttcgcaccgagatactgggaacacagaacggacgttccgaggttgatgacttcgaaaacgaggaaagtgagcatgataatttggttgactacccctacggcggcaacactgttgtccgagtggcggctcagcatgatggtgtccaccgcaccgagcatcatgatgagaagtgtctctataaaaatgggggcggccagcttggcaagccgcttttttaggctttcttgttgtatcattgtccgtgtatgtgcactatactttaaaaatcgcgcaaagataaggaaaggttgaaaaggacggtttgatatgtatcaaattttttttcttgttttagggtttgagtgttaacgtgttatctcaaattgtatgaaaacggtgaaaaaaatatgtaggaaagatttgcacagtccaaaagtttgccctacatttgcaccgcatttgaaaagaatgctggttataaaaaaggaagtttgggtgagtggctgaaaccaccagtttgctaaactgacgtacgggtaaccgtaccgggggttcgaatcccccagcttccgccagatgcactcttagctcagttggtagagcaactgactcttaatcagtgggtccagggttcgaatccctgagggtgtacaagacaaatgcgagggtgggttcatctaacggttaggatacatgcctctcacgcatggtatacgagttcgattctcgtacccactacaaaaacaagaaagcggttgactgatgaaacggttaaccgctttttgtttttcatttttctgttgtaatccgaaaatagtttctatatttgcacccgctatggcgaaatgtatattctatatcttgttagggttgttcctcatatcgaagttcacttccgtttctgatgatatggagggatgtaagacactccctactgcggatgtgcattatttctccggagcccagcacagcttgtcgggggcagatggcagacaatgccaggaaaaaggggaggacgcgaattataattgcctggcagatgccggttgcataggaaataccttctcattacggcatgcctcttgctcgaaattgttgaggcttaatccggacttcattgccgccaaggttgcgagaaccctgaaaactctgctcccggaagaaaagacaacttctttcccctttactttccatccccataagatttcatatagatattatgtatatacgctgaggcgtattcttatttagtactttcccttcctctctttcgggagccagagagattgcccgtctccccatgccgagtttttctctattttttaagtactgataatcaatatataatggattttctattagattttattctccatatcgatcagtatatgattgatatagtgcaggaatatcatatgtgggcgtatgccatattgtttctgattattttctgcgaaacggggctggtggtcacacctttcctgccgggcgattccctgctttttgtggcgggagctattgccgcactgcccgacatgcctctcgaggtcaatgtgctggctttgatattgtttgttgccgcggtattgggcgactcttgcaactacatgatagggcatttcttcgggcaaaggctcttcaataatcccgattccagaatattcaagcaaagccatctcgacaagacccatgagttctataagaagtatggaggcaagacaattatcatagcccgttttgtgcctatcgtccgtacgtttgcgccattcgtggcggggatgggtaagatgcattactattacttcatgctgtacaacctgattgggggcgcctgctggattgccatcttctgttatgcgggttatttcttcggtgaccttccgtttgtacaagagaacctcaaactgctgattgtggccattattgtggtttccatactgccggccgtggtagaagtgctgcgtgcaagactgaaacaacgaaaacaaaaataaattaatatacttagtacatttatccattatgaagaattctttttttagccggttcacaccgaaagaaccgaaattctttcctttgctgaagcaattgtctgagattttattgtcctcgtcggctctgttgatagaaatattgggccatgactcgcctgagaagagggcggaagattataaacgaatcaaagatttggagcgcgagggcgataagctgaccaatctgattctggatgaactgggcactactttcattactccttttgaccgggaggatatccatgacctggcttcgggcatggatgatgtgattgatggaataaacagctgtgccaagcgtatcactatctataatccgcatcctatttcggacaaggggaaagagctgggacatatggttcaacaagaagcggccctcatcggccaggccatggatgaactggaggcattccgcaagagtccggataagctgcgcgcatattgcaaccagctgcatgacatagaaaaccgggcagatgatatttatgaatttttcatcaccaggctttttgaagaagagaaggactgcattgaactcatcaaaatcaaggagattatgtatgagttggaaaaaacgacggacgcagccgaacacgtgggcaagattttgaggagcctgattgtgaaatacgcataaacgaacggacgcatggaactattagtgattatcattgtactggctctgatattcgattatatcaacggttttcatgatgcggccaattctattgccaccattgtgtctaccaaagtgcttacaccgtttcaggcggtgatatgggcggctttcttcaattttgtggcctttttcatcgccaagtgtgtcatcggcggtttcggcattgccaacaccgtatcgaaaacggtgatggagccttacattactttgcctatcattctggccggcgtgattgcggctattgcctggaatctgttcacttggtggaagggaatcccttcctcttcttcgcacacgcttatcggaggttttgccggagctgccatcatggcacacggttttgaggccatccagttgagtatcattctgaagattgcggcattcatttttctggctcccttgattggtatggtggtggcatttggttttacgttgttggtcttgtacatttgccgcagggcgcatccccatacggccgaggtgtggttcaagaaactgcagctggtgtcttcggctttgttcagcatcgggcacggtctgaatgattcacagaaggtaatgggtatcattgctgcggctatgatagccggacattcggaaggactgggaatggggataaacagtattgatgacctgccggactgggtggcattctcttgttttacggccatttcactcggtaccatgtccggcgggtggaagattgtgaagaccatggggactaagattacgaaggtgacgccactggaaggggtgattgcggaaactgccggtgcgtttacgctttatctgacggagtatctgaagattccggtaagtacgacacacaccattacgggagctattatcggagtaggggccacgaagcggctttcggctgtgcgttggggagttacgaagagtctgatgaccgcttgggtgctgactatccccgtcagtgctttgctggcagcagggatttattgtatcgtatcccttttttagaagtgctgccgcataaaaaatagacgggttcgttttattttgcatgaggtttgcactatctttgcagcctgaaactgtaaaatagaatgcacattggactggctatatagtttattcgtcgagcactccgccttgcaggcggttgtggtactctcactgatttccgctatcggattgggattggggaagatacatgtttgcggcatttcattgggagtgacgtttgtattctttgccggcatcattgccgggcatttcgggttgtccatagacccgcagatgctgaattatgcggaaagcttcgggctggtgatatttgtgtatgctttgggtttgcaggtgggaccgggctttttcagctctttccgtaaaggaggggtacaactgaatatgctcgccacgggtgtagtgcttatcggcaccctgctgactgtactgggcagctatgggttgggagtatccctgccggatatggtgggcatactttgcggtgccacgacaaacacaccggcactcggtgcggcacagcagacattgaaacagatgggattggagtccagtacccctgctttggggtgtgcggtggcatatccgctgggggtggtaggggtcattctggccgtactgttcatccgtaagacgctggcgcataaggaagacctggaattgaaagagaaggatgacgtgaacaagccttacattgttgcgttccaggtgcacaatcctgccatcttcaacaagagtatcaaggaaataggcgggctgaacagctatccgaagttcgtgatttcccgcttgtggcgggatgggaatgtgagtattcctacctcggaaaagattataaaggaaggtgaccgcctgctggtgattacctcggagaaaaatacgccggctctgaccgtgcttttcggcgagcaggagcatactgattggaacaaggaagatatagactggaatgccatagacagccagttgatttcgcaacgtatcgtggtgacgcgcccggagttgaacggcaagaagctgggttctctccatctgcgtaatcattacggtatcaatatcagccgggtttatcgtagcggcgtgcagctgctggccacagcggaactgaccttgcaattgggtgaccgcctgaccgtagtgggcgaagccgctgctatacaaaatgtggagaaggtgctgggcaatgctgtgaaaagcctgaaggaaccgaacttggtggcggtatttatcggcattgtcatcggtctggctttgggagcaattcctatttccattcccggcatcagcgctcccgtgcggctcggattggcaggaggccctatcatcgtaggtattcttatcgggacattcggtccgaggatgcacatggtgacttatactacgcgcagtgcgaacctgatgctccgtgcattgggattgtctctttacctggcttgcctgggactggatgcaggtgcccatttcttcgatacggtattccggccggaagggctgttatggattgctacgggttttgcgttgactgtggttccggtattgattatgggtatcgttaccttcaagtggctgaagatagatttcggaacaatggcgggtatgctgtgcggaagcatggcaaaccccatggcgctgaactacgccaacgacacaattccgggagacaatccgtctgtagcttatgctacggtttatccgctgtgcatgtttctacgggtaatcatagcccaagtgctgctcatgttcttcattaatggataatgaagaatgagggatattatcaactgtcaattatcaactatcaattaaataactatgggaaatataactccggaaagtattgtcaatgacttgcgttatttgcaattattatcacgcagttttcctaccattgctgatgccagtacggaaatcatcaatctggaggccattctgaatctgccgaaaggtacagagcattttctgacggatattcatggcgagtatgaggcttttcagcatgtgctgaagaatgcatcgggggcagtgaaacgtaaggtgaacgaaatattcgggcatacactgcgcgaaagtgagaagaaggaaatctgtacgttaatttattatccggaagagaagctgcaacttatcaaggagcaggaaacggacctggatgactggtatttgataacactgaaccagttggtaaaagtatgccagaacgtttcgtccaaatatacccgttcgaaagtacgcaaggcacttccggcagagttctcgtatatcattcgactcgctgcatatcgtgggcgatatatacgaccgcggaccgggtgcgcatattatcatggatactctctgtgattatcataatttcgacatccaatggggtaaccacgatattctgtggatgggtgccgcatcgggtaatgatgcttgtatagccaacgtaatccgtatgtcgatgcgctatgccaatttagcaacgctggaggatggttatggcatcaatctgttgccgcttgcgacgtttgccatggatacctatgcggatgacccttgcaccatctttgcaccgaaaatgaactttgccgatgcggaatacaatgagaagaccttgcggttgattacacagatgcacaaggcgattacggttatccagttgaaactggaagcggaaatcatcagccgtcgtcctgagttcggtatggaaaaccggagactgctgcatctggtggatttcgagcgtggtgtgtttgtatacgaaggcaaggaatatccgttgcgcgatgtaaatttccccaccatagacccggcggacccgtatcgtctgtcggacgaagagcgcgaactgatgcaccggattcattcttctttcatgaacagcgagaagatgaagaagcacatgcgctgcttgtttacgtatggcggcatgtatctggtgtgcaacagtaacctgctttatcatgcttccgtgcctctgaatgcggacggcagtttcaaacatgtccgcatcggtcaaaaggaatactggggacgcaagttgctgaaaaagaccgaccagctgatacgtaccgcttactttgacgaggacggttcggacgagaaacagtttgcactggattatgtctggtacatgtggtgcggaccggatgccccttccttcgataaagacaagatggctacctttgaacgctattttgtggccgacaaaacattgcataaggagacgaaaggacattactatgccttgcgcaacgaggctgaggtgtgtgaccgcattcttgaagagttcggcgtgaagccggggccacattcgcatatcatcaacgggcatgtaccggtaaagaccattaaaggtgagaagcctatcaaagcggatggtaagctgctggtgattgacggtggtttttcaaaagcctatcagccggaaacgggaattgcgggatatacgctggtatatcattcccacggcttgcagttggtgcagcatgagccgttccagagccgtcagaaagccattgaagaagggcaagacatcaagtctacaaccctggttgtcgaattcaattcgcagcgtatgatggtgaaggatacggacaaaggaagtgaactcgttacgcagattcaggatttgatgaaactgctggtggcgtataggacggggttgattaaggagaaacaataatttataatttcagtatcgtcaccccgccctctacaatgatgcctttgtcataggttttcccttgggtgtagtagcggctgccgccataaccgccggtgaggaatatgccgaagcggtcggtcaggtggtattccagattgacacgtgcctggagggcatagagacgtgccggaatgccgtagtccttgttcttgaaggtttctatatgttggtatcccagatctccgctgataaacagctgtttgtagagcggtagttcaagaccggcacggtagaagagggcagcggaaaacttatcgccaaaatccagataatgggtaccgccaccgaggatggtatagaagagccggttcttgaaacgggcacctacattcagcttggtggcattaccaccgaaaaacatcagttgaacttttgtttggggattggcattgactaatcccaattggaaaccatctaatttttctttgtagtagttgaatagacctatttgaagccctttggcacgtatggccatattggcagcgcctatttgtaatcctcgggctgtaccacccaccacattgcccaggccggaaacctgaacaccggtcatatctccggcggtgatgttggcaagggtggacatctgcatgccattcaagtcttcaccgattacacttagcaggccggcccctgaaaatcctttgaaatttccgccggaaatattggcgagtccggcaaagtgtatgccggaagcaccttctccgctgatattcaacaggccgcctatggaggcgccacgattatagtccccactgatgtttgccagaccggaaatgatgacgccttgcgcatgggttccggtgatacctaccagtcccgaaacggatactccgataaggttgttgccattgatgttggtaattcctgctatctgcatgcctcgcatgcttccccccaccatatttgacagacctgccatctgtacaccgttcacatccctgccggttacactgccaagaatattcatgccgaggccattcagacggttcatggaggagaacacacccagattgaagcaggtgcttcctatggtatcagtccgctgtgtggagatgtttttccataaggagatattgatacctaccgggccatggtctgttcgtggagagcgttgtttccggaaagatttttcggaggatttctgaatcgtatccggctgtacgctgcccggattatgttcttgggcaagagctgtccctgcaaaaagcagggacacaaggaggagggaaaggtttcgtttcatacttttttctatatttcgtccggccagggagctggttggcgggtggcacgcaacagagggcgctgcgcatccacagaccggaggtaattacttaatttccgtgacaactctttgacaacttcaggcttctctcgggccatatcatgtttttcactgatgtcggcggggatgttgaaaagttcccgtctaccgtcaccgaaataatacaccagcttccactcgcccgaacggatggagcaagtggctccgatgcccgggccggaaggaccccagctattgggataatgccagtagatatcacggtctttcattttaccttttccggtgagcaatggcatgaaactgatgccgtcgcgttgctgtacggttgtatagttatctacgcctgccatctcaaggatggtggggaagaagtcctctatcatcaggtaatggtcgcattgggtttggggcgttacgatgcccggccagcggacaatcatcggttcacgtatgcctccttcgtaggcggaacctttaccactgttgagcggatagttctggacatgcagttgtccggcgcgggtatgggccgccaaaccgccattgtcggacatgaagatgaggatagtgttttccgtcaggttgttcttgtccagataatccataatgtctcccaaacttttgtccataccctcaatgagagtagcataggcggcttctaccggaggaaggcctttgtccaggtacttctggtagaaacgcatgtcaggttgtataggggtatggatggcatagtgtgccatgtacagaaagaatggcttgtcagtctgctgtgcatcgtccagggccttcatggcctctatggtaagggcttcacttagaaaagtgtcggttccatgatatttctccagaccgggtacggcagccagcgggcttttaccgtctgttttgttgccgaaattctccttgccatagtagctggcaggtgaaccggcagcatgtccggctatgttcacttcaaaccccattttcaacgggtcggctccgggagtgccttcagcaccgaagtgggcttttccgcaatgaatggtgtgatagccatggtctttgagcacttcggccagggaggtgacttgtgtggtccgttccacgccaggctcttgacaaatgccgttaacgttccattccggataaatcatgaccgagtcgggttgttcatgggtagtgttcttacggagggtccaactggtgactcgatgcctggcagcattcattcccgtaaaaaggctgacacgcgtaggtgaactgatgctgcatgcataggcctgcgtaaacattttgccttgtgtagccatccgttccatgttgggagtatggtacgtatcgttgtacttggtacgctgtgtccaaaaggggagggacgtgtcttgccatcccatgtcatccactaggaacagaatgatgtttggctgctcttttggagcaggtacggcatccccaggcggcatgccatacgcttctcccgccattccgcatatcggaagcatggcggataataataattcgtttctcatttagataataatttagaaagggttagataggttgtagtttaattgttttttacattatcctttggcctcctgatacaagaagcgtttgatagatttcttcggcgttttttcaaattcttcaggatagattttcattttgaatatctggctgtatgcgggcagttctgcattcagtgccacacggttttcctccatgacgcgttcgatgtcgtcattgttcagcccatgggcaaaggcatcatcgaagtcggggtaaaccagacctaccagtttctcattctgctgcacgatgatgctttcggctacatacggcatattgttcagtttgtcttctatctcttccgggtagatattctgaccgctcgggccgaggagcatgttcttgctgcgtcccttgatgcttacgttgccttcggcatccatcagggcaaggtctccggtgtgcagccagccgtctttgtcgagtacctgtacggtggcctcgtcgttcttgtagtaacccagcatgacattgggaccacggcagacaatctctcccggaatgttttcgggatcggatgataggattttcacctccatacgcggtgcggcctttccgcatgaaccgggtttgaagcgggtccaatcctcgtaacagatgatggggccgcattccgtcattccatagcctaccgtataggggaaatctatcatctttaagaactgctccacttcctggttgaaggcagctcctcctacaatgacttctgcaaagtttccgccaaaggcttgaatcatttgttcgcgtacggttgcttttatcttgtcgttaatgatgggtactttcagcaacagcttcatggcgggggtttccagcttgggcagtacgctcttctttataatcttttcgataatgagcggaacagccacaatcaggttaggcttcacttcggtgaaagcttggaaaatgattttggggctgggcatgcgagtgaggaagaatatgtggcaacctacggcgaattcatacagaaactcgaatgcaagtccgtacatatgtgccattggcagcatggagacaatcttgtcaccggctttcagcggcaatacttcgaaagcaaaagtagtgtttgaccaaaggctgcggtagggcagcatcactcctttggagtaactggtggtgccggatgtatagttgatgaccgccagttcgtcgggctggtccttgtgataactgacatgttccttgcggaagttcttggggtatttcttaccgaacatttcgttgagatgttcgcgggcatagtccaacttttcgctgcgggagacaagaatgtagaagtctgccatcatcatgatgccctctagcagcggcatagcactttcgttgaggttttcccaaacctggtcgcctacgaaaagcagtttggcttcggaatggttcacgatgttgtgtacattgtctgccttgaactcgtgaaggatggggacgattaccgcaccgtaggtcaatgttgcgaggaacgttacgccccagtgggaactgttgcggccacagacggcaatcttatcgcctttcttgatgccgcttgcctcgaaaatgatatgcagcttttctattttgcgggctacgtccttatattgtagggttgctcccttgtaatcggtcaaagcgtctaaatcccaattttcctttatgctattctctatataggcgataaaactttgttccatgatatttaattgcacatttggttgaaaattgtgcaaatataagggtttatatatagaaagcaaacttttataaggaaaatagtttttatggtggctatttgttaaaattcgacagttatacctaaagtaggcaggatagtgccgctttcctgcttgaggtatttcattttatagcgctgttcggcaacgggagcggacggattttcgatgatgcccgtactcattatcacatccggttgcttcagtttgttgccggtgatattctgtatgtccaggtagattcctatcatgcagtgatggaagtagaaggacttgtccacacgcaagtctaactgggcaaatttgggaagccgcccggtattgtagtacgcatagtcgtagtaaggctgtcctttggcatcccatgcttctacgagtgatgatttgtcttcatcatagggagtgtaggggctgccgcctatatagcttagcttgcctcctatgctccagcgccggggcaggttgtatgtaccgctcatgttgagtatgaaacggttgtcccaggcagatggaatgaagtctccatttgaacggttgcggtattcgctgcggtataaggtgaaggaggatacgagattgaacttgccggatgcctgccagcggaacatggtttccagtccgtaggccctgccgctggctgtagggacgagtgcttcgttgccggtgacaccgtaatcgtttcctttgcatgccaacggaatgttgtcttggagggaaagtggcatacggctgtaacgcttgaagaaaccttctgcagaaaccatgaaccggtcttgcaggtgccagtccacaccgaggctgctttcaaagacctgcatgtacttcaggtttttgttgagatattgcccttcattgtctttatatcccaaagcggtgtagggaggcaattggtggtagaggccggtacttccgctcagggtccattgttccgagagtttgtaggatgcagagaggcgtggggagaactgtttccatagctgccgcatctttcggttgtaagtgttgccatccatacggataccggcagaaagggccagacgcttgtcggcggtggtatagttggaagagaagaaagccccccagccgaagatgttgagtgaggtttcgtagatggaaagcgtactcgaatgactgccgtatagtctttgcctgctgtggtttgtatagatggagttgttcagttctgctccttcttttagggtccatgctcccaagcgcgtttggttttcgaaacgcagggtggtcttttgttctgtggagcgtaggcgcagggtcaggttgtcttcggaagagtcatcgttgttgcggtatttcagattgcggttgttcaggtagttatggctcagtataagggattgtacgtgccttccattgtagtgtctgtaagaggctccgagagtgaatgtttcctgatggatagtggggagatagctgagcagatattcggcatcttctcctttttcatcggtattcagtttcatcttgtcaatgcctgcaagaccaagcagggtcagctcgctgtgctcgttgaaacgggtttttgttttgaattgtccgtcaatgaaattgggcaggaagggcagtcccaaagccttgaacaaaagttgcaggtaggactggcgtgcggagaacagataagtggtgcgctgccccagatggcctgctccgctgagcgagacttccgatgcgccgatggtggctttgaacgcctgcttgtccggatttccgtccttgagttggaagtcgaggacggaactcaaggctccggagcggttggcggggaaggcgcccgtataaaatgtaatctcgcgtatcaggtcggcattgacaatacttaccggtcctccggatgcaccctgagtggcaaagtggttgatgttggggatttcgatgccatccatataaaagcggttttcggaaggagaaccgccccgaacaatcaagtcgttgcgatagccgatgggagagaaagagacgccgggataggagcgtacgatgcgcgaaacatcccggttggctccgggacttttctctatttcctgcaagccgatgatacgcatgctgaccgggctttcgatatttcgccggaagggggaaggcaccaccactactgtgttcagcagattggcatcctcttccatctctatctcgatgaacggggttgaggctgaaacgatatattcgggggtggaaacagtctggtatcctatgcaggatgcctcaaggctatagatgcccggaggtacctgctctatcttgaatgtgccgagtgaatcggtggatgcccctttcccggggatgccggcaacgaaaacgttggcgtaggccacgggttgtctggactgtctgtcgatgactttgccgcgaacggaataggtcacgggagctatcatggcattcatggttgggctgatacctgataaaagtatcagcaatataaacaatacagttcccaccttgtaccgtatggcattcatggttaatcagacgtcactaattactttcccaagtaccatcggtacatgcgttgcacaccttcctcgatatcaatcttatgatgccatcccaatgcatgtaacttaccgggatcggtcagtttgcgcatggtgccgtcgggtttggaagtgtcgaaggtcaaccggccctgatagcctacggtgttgacaatcagctctgccaactggcggatagtgatttccttgcccgtaccgatattgatgtgacagttgcggatttccttgtcgcccggcttgaaggtatctttgaagtcgacgtgttccatgacgaagacgctggcatctgccatctcctcgctccagaggaattcgcgcaagggggtgccggtaccccataatctcacttcttcttcgctgatgccgtatttccggaggatattcagaatgtcctctttgctgctgtcgccgttgatgccttccaccggacgcaggttcatgtcgtggcgtacggcatcccagtcgccttgtttcaggcagtgggcgaggtgtatcttgcgtatcatggcagggagcacgtggctgcgttccaggtcgaagttgtcgttgggaccgtaaaggttggtgggcatcacggcaatgtagttcgtaccgtattgaagattgaagctttcgcacattttcagtccggctattttggcgatggcatagggttcgttcgtgtattccagcggagaagtgaggagtgcgtcttctttcatcggctgttcggcatcacggggatagatgcaggtgctgcccagaaagagaagttttttcactccgtggcggaagctttcgccgatgacgttctgctgtatctgcaagttcttgtagatgaagtcggcacggtagatactgttggccatgatgccacccacaaaggcggcggcaaggaatacatattcgggctgttcctcgtcgaagaagcggcgtacggcaactccgtcgagcagatcgagttctgtgtgggtcttgccgatgagattggtgtatcctttctcctcaagatttttccagatggcagaacctaccagtccccggtggcctgctacatatattttggcatttttgtctaacattgttgtctgaaagtttaatagttcattcaaagctctttgcttcttaaatacagtttcttcacaaatttcatgtcgtgctctgccatgatgcgtaccaactcttcaaaactggtctgcctcggattccatcccagcagtgtttttgctttggtggggtcgcccagcaattgttccacttcggcaggccggaaatatttggggtcgacttccacgaggacttttccggtctgtgtgtcgatacccttctcatccactccctggccttcccagcacagagtgatgcctacctctcggaatgccagtgtcgcaaattcgcgtacggtatgcatttctccggtggcaatgacgaagtcttcgggggtgtcgtgctgcaggatgagccacatgcactcgatgtagtctttggcatatccccagtcgcgccgggcatccagattgcccagatacagcttgtcctggaagccttgggcgatgcgggcagccgccagtgtgatttttcttgtcacgaaggtttcacctcggcgttcgctctcgtggttgaagagtatgccgtttacagcaaacatgccatagctttcgcggtagttctttgtaatccaaaagccatactgtttggctacgccataggggctgcggggatagaacggggtcgtttcgctttgcggcacttcctgcacttttccgaagagctcggaagtggaggcctggtagatgcgtgtcttcttttccataccgagaatgcgtacggcttcgagcatgcgtagggtgcctacggcatcggtttcggcggtatattcgggcacgtcgaaggatactttgacatggctttgggcggcaaggttatatatttcgtccggctgcacactctggatgatacggatgagagagctggagtctgtcatgtctccatagtgcaggttaatggtacgtttctgtttcatgtcgcgtacccactcatcgaagtagaggtgttcgatgcggccggtgttgaaagaggaagagcgacgcaggataccgtgcacttcatatcctttctgcaggaggaattcggcaaggaacgagccgtcctgcccggtaatgccggagataagggctttcttcataatgtatgcttcttgttattatgtcttttcggactgcaatattcgttattttccacgagatggcaaaatataaactatttctttcccatcactttgtcgataatcagtgcgattgccccgtcgcccgtcacattgcaggcagtaccgaagctatccatcgctatgtatagtgcaatcatcagcgcttgtgccgactcgtcgaagcccagcatggattgcaggatgcccagtgatgccatgatggcgcctcccggtaccccgggagcggctaccatagtgatgcccagcatgaagatgaatcctgcaaatagagggaaatcatggggcatgccttgcattatcatcagtgccagggcgcatgccacaatcttcaatgtgctgcccgacagatggatggtggcgcaaagtgggatgacgaatccggcaatatcggcagagacgccgttcttccgactttgctccaatgttacggggatagtggcggcactggattgagtgcctagagccgtgaagtaggcaggcatcatccgtcccagtagtttgagagggttcttgcggacaaacagtgccgcaatgctgtattggaataccaggagaaagatgtgaagcaggaagattacaccgataatcttaataaagaccatcaggatgccgaatacttgtccactgtgcgtcatgttgaggaaaatgccgaaaatatagatgggaagcagcggcaatatcactgcactgatcatgcggatgacaatctcttgaaaatcgcgtgccgcatttttcagtacctcacttttcagatgagccaggcccagccccagtgtgaaggcaagtacgagtgcggtcataacattcatcaagggcgggatacccacggaaaaatagggaagaatgccttgagactcactgacttcttctaacggcaccccggtttctatgagggaaggaaataccgccataccggtgaaataggagagaaagccggagaataaggtagctccgtaagcaatgagcgccgtgacgaccagcatccgtccggctcctttgccgatgtcggcaatggcaatcgtgaccagtcccacaatgatgagggggatggagaagttcaggaattcactgaaaatggcattgaatgttacgaacagccgtaccagcgaagccggtaggaaatttccgaaaagtatacctaagataatggcaatgatgatgcgtggcaatagtccgatgtggaagttcttcatgagcattggttttctgtctggttgaaaaataggctttcgctgacaaaagtactattttattttcgtaattcatacgaacaaatgctgttagcattttgtttccatataaagacaaaatttacatgaatatgaagaatttaaataaaacagacattggacttatcggtctggcagttatgggcgagaatttggccctcaatatggcagataagggatggaatgtttcggtatataatcgtacggttccgggagtggaagaaggggtggtggaacgttttgtgaacggccgcgccaaagggaaaaaaattgaaggctatacagatatagccgaatttgtaacttccattgccataccccgcaaaataatgatgatggttcgtgccggcagtgcggtggatgaactgatggaacagctgtttccccatttgtccgaaggggatatcctgattgacggtggtaattccaattatgaggacaccaaccggcgtgtggcattggccgaaaagaaaggcttccgttttgtgggagctggagtttccggtggagaggaaggagcgctgaacggcgcgtctatcatgcccggaggatctgaaagtgcctggcctgaggtgaagcctatcctgcagagtattgcggcaaaagcatctgacggtaccccgtgctgccagtggattggtcctgccggttccggtcatttcgtcaagatgatacataacggtatcgaatatggagatatgcagcttattgccgaagcttattgggtgatgaagaatctgcttggtctggacaatggacagatggcggaaatctttgctgattggaatgagggcaagttgcgtagctatctcattgaaattaccgccaacatactgcgtcataaggacaaatcaggaggttacctgatagataagatattggataccgccggacagaaaggtacgggcaagtggtccgttatcaatgcgatggagctgggcatgccgttggggctgattgctacggctgtgttcgaacgtagtttgtcggcacagaagggcttgcgtgaaacggcttccaagcaatttgtatgccgacgctcgcaggcggtgtacaacaagtcggagatggtgaaggatatctattccgcactctatgcttccaaattagtgtcatatgctcagggattcgccgtgttgcagcgtgcatccgacgcttttgcctggaacctcgatttggcatccatcgcacgcatgtggcggggcggctgcatcatccgtagtattttcctgaacgacatagctacggctttcgaggcaaaagacaagcccaaacatctgctgttggctccttatttcaaaaatgaaatgcagctgttgctttccggctggaaacatctggtggcacaatccatgaaagaggaacttccggtgcctgcattctcgtccgccttgaattatttctattcgctggtgtctgccaagttgcctgccaatatgattcaggcgcaacgtgactattttggtgcgcatacctttgaaaggacagacgagttgcgtggacagtttttccatgaaaattggacgggacacggaggagatacgaaatcgggtacgtacaatgtgtgagaaagggggagaagatgatgaataaattagtgattgttatattcggcgcttcgggtgacttgacgaagcgcaaactgatgccggcgctctatactttgtatagtggcgggcggttgccggaaggattctccattctggggataggacgcaccgagtatacggatgcccgttaccaagaatatataatgagtgaattgagtaagttcgtagcttccagagagcaggtggaagataaaatgagggatttttgcagccatctgcattaccagacattggatcccgccgaggttgaaggctatcatctgctggacggacgtttacaagagtttaccggtgagcagaaaccggacaacctgctgttctatctggctactccaccttccttgtacggtgtcattcccttgcacttgaaggcggccggtctgaaccgtcctgatacgcgtatcatcgttgaaaagccgttcggttacgatttggagtcagccagaaagctgaatagcatttatgcttccgttttcaaggagcatcagatttaccgcatcgaccattttttgggtaaggaaacggcgcagaacattctcgccttccgttttgccaacggaatcttcgaaccgctatggaaccgtaattatatagactatgtggagattacagccgtagagaatctgggtatcgaaggacgtggcggattctatgaaggtgccggagccctgcgcgatatggtacaaaaccacctcatacagcttgtggcgctcacagcattggaaccgcctgccgttttcaatgccgataatttccgcaacgaggtggtgaaggtctatgagtcattggctcccttgacagaggaggatttggaggaacacattgtccgcggacaatatacggcttcgggctcgaaagccgggtatagggaagagaagaacgtggcacctgattcgcgtaccgaaacgtatattgccatgaaaatcggtattaacaactggcggtggaagggtgttcctttctatatccgtaccggcaaacaaatgccgacaaaggtgactgagattgttgtacatttccgtgagacgccccatcagatgttccgttgcgagggtggacattgtccccgcgcgaataagctgattctccgcctgcaacccaatgaaggtattgtgctgaaattcggcatgaagactcccggaccgggatttgacgtgaagcaggtgatgatggacttcagttatgaccagttgggcgggttgcctaccggcgatgcctatgcccgtctgatagaggactgcatacaaggtgaccctacactctttacccgcagcgacgcggtagaggcttcatggcgctttttcgatcccgtgttgcgttattggaaagagcatacggatgctcctttatatgggtatcccgtaggtacgtggggacctttggaaagtgaagcgatgatgcacgaacatggtgctgagtggactaatccgtgtaagaatttgactaatacagatgaatattgcgagttatgaaaagttatgtttaccattcggctacagctacggcacatgcgttgattgaacatttgattgcgatgatggagcgtgagccggaaaagaccttttattttgcattcagcggggggagtactccttcgttgatgtttgacatttgggctaacgagtacaaggaggtgactccttggatgcggatgcggatttattgggtggatgaacggtgtgtgccggcagaggattatgagagcaattatggtaccatgcgccgtttgctgttggatgaagtaggcatgcccgatgaatacgtttaccctatttatggagtgaaccgcccggagattgaagcaaagaactattcgacgctggtttgccgcacggttccgctttggggtggcttcccggccttcgatgttgttttgctcggtgctggagacgacgggcatacctcctctatctttccggggcaggaatatctgctttcttcctttcatccttatgaggtgagtgtcaatccctataatgggcagaaacgcatagccatgaccggctgccttttgtttgctgcgaagaatcttattttctttgttaccggcaagaataaggcggatgtggtccgcgatattcttgattccggggataccggtccggcagcttatgtggcccaccatgccgagcgtgtggaattgttcctcgatgctcaggccaatggcgggaaaatgtctacttagatgtaccgctctccagaatgcttacgatggagaataatgtaaagcagatgcctcccaaacctgccagtacgcgtgcagggacaaaataggcattgtgcaggcttgccatctcaaacagaaaggcggagagaaacagacaagccagggccgtgaagaccggaatcagcgggatgcggttggccagcttgaaagtgttccgccagatggcggcaagcaggatgactttgctggaaatgctgtagcataccagtcccaggcctatcataatatatcctgtggaggagagtgccggattgctgttggtcaagaccagaagtccccagagaatgctgatgctgcccattatcaaaacaagggccggccaccgtttccgttcagcctttgtatagttgttgcgtatctggcggacgatggttgcaaccagcgccactaggctggaacagatacaagcaagtcctgccatgacatggcctgctacataatatgcattgtgctcgctgctttttgacaatagccagaaggcccatatccatgccattactgccataagggtggcaactgctatcaggatatatccctgggaggaattgaatgcatcggcaggttgtagctggtcggtacgttccgagttggcgggaatgagggtgaagcgggtggaggctgtggctgtggtagctacacaagctgtgatgaaaccgactccgcaaatcacgtgtcctgccacgaaattgcttgccgtggcagcttcgtgcatgtaactccaaccatagattactgtgagtacggctgccaggtaaccgataaccggaagtgcgtatctgactatcggattgtaggtatgaatgatttgtctaatgattgttgccgctgtggcgaacaaggcaatgcaaatcatccctaaggaaaatactaccggaccggccacaaattttgccgaatccagtccttcgtggagcacaaaggctccgtagccgaaacagaaaagggccatcaacaagggtatagccctgaaaagaatactgataccgtaattcataactgttgtttttagagtttccccttcaaacagcgtttctgtggctttgttcctccttttaagatttatttgtgatgagaagtgtttccctgtccgtatttagggagctagcctctcctttttccagctgccatccgcttgttgggaatagaggaaacggtcgtgtagcctgctttcccgtccttgccagaattcaaaacggaaaggggtgacggcaaaacctccccagttgtcgggacgtttgatactttgccctatccatgttgccgcttcgcggacgaacgcgcgcattatctccatacggctgccgatgacgtgactttggggtgaaatcctcgccccgattttacttttgtaaggcctgcttgcaaaataggcgtcagaatcggcaggagcgcatctttcagcttttccttcaatgtgtatttgcctttccagtttgtgccatacgaaagataaggatatatacggatttgcagtcagttgccggcctttcctgctttcgtagttggtgaagaagatgaaacggccattttccacccctttcagcaacactgtgcgtgtagaaggatgcccgtctgtcgagactgtagctaccgtcatggcggtgggctcgtactcatcactatggatagcatcgttcagccaatggtcgaattgctcaaagggattgtcgttgaggttacccggtgtcagcctgcctttcttatattctcttctgatgtcaaagagttgtgatttcattatcgtgtggttttatcaggagtgatatattgtttttctatgtaacagtctgagagggctgaatgtttttgtttttctgcggaaagaaaaatatggaagaaggaaatggctgtgttgatacttaaaaaaatgggggtgtgtcaaaattcaccacagattacacggattaacacagaatgagcttaatctactgataatcaaagatgcttatctgtgcaaatctgtgtaatctgtggtgaataccagtttcgacacaccctcggatattggagattaccttatggagacaagtggaaagtggacactggcatgtctgctattgtaatttaaacattacgggaactgtgaatttacaacggaccggtttgcctcgttgctcaccgggtttccatttgggcatggtggaaatcacacggatagcttctttgtccagatagggatctacgcctcttactacttttacatctacgatgctgccgtctttgttgacaacgaattgtactattacgcgcccctgggttccggtctcttgtgcaatagtcgggtattttatactcttacccagatattgcatcagactcatgccattataagaaaactcgggattcttctctacaacttcaaaaatctcatcctctaccggaatctcttcatctacggttggagatatgggtttgatgattacagcttcaccgatttcttcggaagaggcaatggctgtttctttcacattgtcattatcatccacaattgtcaatacctcggcaattgcaggagcttgagggggtggtggagctactaattcgggttgctccgtgataggaatttcaatttcctgctcaaatacgttctcggtaatagcaccgctcatgtcaatcctaacatcacgcttcgaccattcaaatgcaacgaacatgaagaccagcacaattacataacctacaagtagccaacttgacttcttgttttccaggcttgctttggatgttttcttgatttccataatttacaagattattaccgtataatggttgtcgcgaaactaacattatacagatgtgattagtaaaatcataaaacatgcgtgcccacttgtttctgtattaaagataagaaaatgaatgttatgttggtgtttgatatgtagttatatatagttttttaaatttgctttgataatttttctgcttgtggattaaatagtgttgatatgtaaaaagcacttccaacgttcgcttacggaggaagtgcttcacacaaaaactaaactagacttaactaaactattctattgggggagtttcacaactcctatctgttcggtgcaaagataaaaaaacatattttaatatgcaaaaagattctataataaatcgacggtttttccgattttatcgacggattggtcgatttttttagcttctttggtctaaaaattcttgaaaagcttgtttatagctgtcacttatcgggatgtaattctttccgaacacgatgcggccacggtctataatacgtattttattcttctgaacaatgtaggaacggtggacgcgcatgaaacgcgaggcaggcagaagttcctccattgccttcatgctcatgagagacaggataggtttgggagaatcctcctcgtagattttgagatagtctttcagcccctctatgtacagaattttactcaattcgatttgcaccagcttatactcgctctttacgaagatgctctgaatctcttccttgggctgttgcagcaattcaaaccattgcacagctttgttggcagcctgcagaaagtcgacgtaggagatgggtttcagcaggtagtccagcgcattgactttgtagccgtctatggcatactggtcgaaggcggtggtaaagacaatgcgggtgccggaatcgaccatcttcgaaaattccagtccgttcagttcgggcatctggatgtcgaggaaaagcaggtcgatgtgcttctcgggcaactccttgatggcttgtacggcactggagtatttaccgaccaactccagaaacggggtcttgttgacgtagctttccagcaaccctagggcgaggggctcgtcgtctacaatggcgcacttcagattcatatctttataattaaaatagatttatactctttcatgtcctcactcactccttgctgccagtcgtaatgaccgggataggtcagctccagacgcttgcgcacttgttccaagccgatgccgcttccgcttttatctgccacgcttttgggatgatagctgttggttatttcgcaatgtatctctccggggctttcactgaagtggatacggataaagctgggctcggtgggggagatgccatgcttgaaggcattctctatgagggaaataaagatgagcggagctatttcagtacggctgtctggtcggacgtctatctttgtttccacacggacgttggcggagagacggatgcgcatcagttcgatgtagttgcggatgaagtccatctccttgtccagggtgacgaagttctgctgattgtcatacagcacatggcgcagcagtcggctcagttcctgcacggcagtctgtgccttgtcggcatcgaaggcgatgagggcgtagatgttgttcagcgtattgagcaggaagtgcgggttgagctggttgcgcaggttcttcaactcggcttccgtgcggcttttctcggcttcgcggcgggcggcgtccatctgcgcccagcggcggctcagcttgatggcagcgctgaggccggcggtgagaatcatggtcgagacgtcgcgcaagatgaatatccatttgggaggccccatgtgctgaccgtcatcatcgccgcgcatatggttttggaatgtgtattcttgccaaaggtgggcgccggtggtaatgcagatgatgagcagtgtgttcagcaggagatactgccggatgcgtccctcgaacaagtagcggggaatgaggaggcagtagttgatgtagaatacaaggaagaatgagagggtactgctgctaccgtggcgcagatagtccgcaaggctgatattgaagccgctgcgtgtcatcatcagaaaggggaaaccgatgacgataccccagacaatgatgtgtatcagggtttcgatgccgcggcggcgtgggttagggagctgttgtttcatcatgatacaaagatacggattttaggtggatattggaaatatccgctgcctgcgaagcaaatctctgttcgcaggttgcggataagcgtttccaggttgcggatatgtatcccaagcttgcggatgtctatcccaaggcttgggatagagattatccttggtttcgcataacttttttccctattgccggaaacttttttcctaatacttaagaactatttggctaacttccggcaagggagaaaaggttattcgtagcgtatggcctctatcgggtcgaggtccgcagctttcttggcgggataccaaccgaagaacactccggtgacggtacatacggcgaaggagaggaatacactccacggctggatgaagatgggccagtgggcaacgctcttcactatccagctggctccgcatcctatgatgacgccgatgatacctccggtgatgctgatgagaatggcttcgatgaggaactggctcaagatgtcgacaccgcgggcgcctacactcatgcgcaggccgatttcgcgcgtgcgttccgtcaccgatacgtacatgatgttcataatgccgatgccgcccactacgagcgaaatgccggctatgcaggcaagcagcgtggtcatcaggtcggtggtggagttcagcatggtgctgagttcctgctggctgcgaatggtgaagtcgtcgtcgtcactctccttcagcttgtggttgcggcgcagtatctcggtgatttcgtcggtggcattgtccgtcatgtcctcggtgagggcagaggcgaagatgccgctaaggtaggtctgtgccagcaggcgtttcatcacggtgctgtaaggggcaagcactacgtcgtcttggtccatgcccatggagttgtagcctttggacttcagcacgcccaccacgcggaagggcacttggttgaaacggatgatacgtcccacggggtcctctccgccggggaagaggttgtcttggatggtctttccgatgacgcacaccttggcagaggtctgtatgtcggcttcggtaaacatctcgccgttctccacgctgagctgccggatttcgagatagtccgtgcctacaccactcacggaggaggggtagttgttgttacccgcgatgagctgcccgctggaggagacattggggctgacggcagccaggaagttggtttcgttgcgcagggcttcgtagtcggtcagcttcaaggtctgcatggcgctggggtcttggcggacaccgccgcgcatgtcggcaccggggtgaatcataatcatgttggagcccatctcggagatttgcgcctggatgcttttcttcgaaccttgtccgatggcaagcatcgtgatgacggacgccacgccgatgatgatgcccagcatggtgaggaatgcgcgcagcttgttgttgttcaaggcacgcagggctattttgaaaaggtttgttccgttcatatcgttttaatggaaagtttaaaattaatccctaatccttaatcccttatccctcattcctcctcctgcttaggcaatgctgccagggcttcggctgcattctggatttgggtgttgatggtgtcgtccttgatttgtccgtcgcgcagcacgatgttgcggctgctgtactgggctatttcggggttgtgggtgacgaagatgatggtgcgtccttcggcatgcagcttttggaacagtaccagaatctcgaaagaagtacgggtgtccaggttacccgtagcttcgtctgccaggataacggcgggattgttcaccaaggcgcgggcgatggctacgcgttgcatctgaccgccggacatctgattggacttatgttccagtcggtcgcccagccccacggcttgcagggcttcgatggcacgtctccgcctttcggaagccgagacggaggagttatacatcagcggtagctccacattttccacggcagtggttttgggcagcaggttgtaactctggaatacgaagccgattttacggttgcgtagtacggcgcgttgaggcttgctcatggtgcgtacggagataccgtccagcaggtattcgccgctggtgggcgtgtccaggcagccgagggtattcagcaaagtcgactttccggagcccgatgtacccatgatggtgacaaactcgccttcacggatggtgaacgagacgccgcgcagggcatgcacggtttcgtcccccacttggaagttgcgtttgatattttgaagttcaatgactgctttattcataattctttttttgtattattttccgctcttcttcttacttcccggagggccaggcatgaacggactcttctcacctccgggagcttcctggctcatgtccggagcgccgctgccgggcatgctgccgatgttggcttcggtcaccactacggtaccttcgttaatgccgctgataatttccgtgttgactccgttggagatacctatcttcaccggatgggcggtaaaggtgttgccttcgcgggtccagagtttatgttccccttcgcaatccttcacgatatcattgtcgccgataagcggtttttcggggttgaagcgcagggcacgggcaggagcgcacagtacgtctttgcggtcgagggtgaagatggtgacgttggctgtcaggcgtggtttcagtttcaggtccgggttgtgggcggagatgactacttcgtaggtcacaaccgtgctggtgctggtgctcgacgtgctgcttgagctggcatctcccagacgaatttgtgtgaccactccttcgaacacgtcattcgggtaggcatctacggtaaacgtggcgcgctgtccctcttccacaccgcctatgtccgcttcgtccacgtcggccacaacctgcatctgcgtcaggtcggcagcgatggtgaacagtgtcggtgtctcgaagccggaagccacggtctgtcctgcttccacgtcgcggctgatgaccacaccgtcgatgggagaggtgatggtggcgtaggagaggttgcgttcagcctttgccagtgatgcctggctgctttcgtagttgctcttggccttctcgtagttatagacggactgctcatagtccgtggcggcgatgagctgcttttcgttcagcgtcttgttgcgctcgtagagttttttctggtactcgtattcggcctttgcaccgttgtaggcggcgcgttgcgaagcgagttcgctttgcagtgtcacgcggtccatctcggcaatgagttggcctttggttactacggaattgtagtctacatgaatcttgtcgatgataccgctcacctgggtacccacttccacttccgtcaccggttcgatggtccccgtggcggttacggattcggaaatctcgcctttatggatggttgctgtggcgtaggtcaccttgtgcttggccttggcaccaccgaagagccatacgccgccgcccactatgattacggcagctacggcaatgaggatgattctttttttgttcatatatataaggtattataattcgattttttctccttgataaaacttcagtagctgcatattcagtatggccatgtatttggcttgcagtgtctcctgctgtgcgctgagcagattgcttttctcagtcagcagttctacggtattcttcatgcccaggttgaactgctcttgaatcagttcatagctggtctgcgtacttttcagtttctctgtggcggcggcgtagcgctgctgggcgctgttggcatcgagccagagggtttcgatggtcttgtacagcgttttttggtcgtccagcaggtccagttcgctggtctgcttctgaatcttggctttctctacggcactcttggtctgccggttgctgaagataggcacgcttacggtgaagcccagcgagttgttccagttctgtttgacttgctcgctgaaggtgaagtcattgccgttggcatggctggttccgatgccggcgctgaggctcagcgtaggcagatagccagcgcgggcaattttgatgtcgaggtcggatgtctgtatattcagtttgccggcttctatttccggacggagcacgagggcagaacggtaaacgtccgttttggtgggcaggggtgccagtacgttttccgtgccgagtgtggggatgtagaggttcatctcggattcgccgtccagttccaggagttgtttcagttgtagtttgtagtcttgcagggtggcttgtgctgtcaccagctggtacttgtcggtactcacttgcgcttccagttgtgccaggtcgcttttggctatgcttcctgcttcgagaagttggcgggcgcgttcgcattcggcttggctcacttccagggtcgattcgttcactttcacggcttcggcggcgtagagtatctgtacgtaggtttgtgcgatactttcttcgatgctgttctcgctctgtgctacgctaagttcggcaatgcggttgttcagttgctgttgtttgatggtgttgaggcgcttcccgccgttgtagagggtccagttggcatcgatgccgtagctgccgttataggaagtcttgctctggctgctggtgatgttgtcgccgtcgatgatggtgtttgtctcgctcttcgggcgattcacgacacgctggctcacactggccgaaaggctggggaagagagcggctcgggcggtctttacatctacctgggcactttccgcgttgaggcggttcttgcggatggtgatgttttgctgcaaggcatagtcgatgcacgcttgcaagtcccattgggcgggcaggctgtcggctggctgctcggaactgccgggtatctgcgtggaagtgccgttttgggcggccactcccatgcagcttgccatacatagcgctatcactgtcaatctttttacgttcgtcatatcttcgttattctatggttttacatttgcaaatgtagtggggtagagaaaggattgcaaaagtgatagacgttgagtgaattttcctcgcctaaaatcttttttgtaccgatgaatgggagaagtcttttttctgttcaacttttcacctttttatttgttctttatataaaagtattttatatttgtaatcattataattttatcggcatgaaacagactgcggtaaacatttggcgtttttatttggaaggttttcgaagtatgacgttagggcgtactttgtggcttatcattcttgtgaagttgttcatcatgtttttcattctccgccttttcttcttcccacggtttctgaatacccccgtggtgggcgatgacaaggaaggctatgtcagtaatgagcttatccatcggagtctgggcgactaaacacggagacacagagtttatttccttgcccttataaattctccgtgtctctctgttcttacccgataacttaaaaacttaataactcataacttataacttgattcttatgcttggacacattgacacttccctgattgactggtcgagagcccaatttgccttgaccgccatctatcactggatttttgtgccgctgacacttggactggcggtaattatgggcatcatggagacagcgtactaccgtacgggtgacgaattttggaaacgtactgccaaattctggatgaagattttcggtatcaactttgctattggtgtagcaaccggtattattctggaatttgaattcggtacgaattggagtaattacagttggtttgtgggcgacatcttcggtgcgccgcttgccatcgagggtattttggctttctttatggaagcaacgtttatcgccgtcatgttcttcggctgggataaggtgagcaagcgtttccacctggcatctacttggctcacggggctgggcgccacgatttctgcctggtggattctggttgccaatgcgtggatgcagaatcccgtaggtatggagttcaatcccgatacggcacgcaacgagatggtggacttctgggctgtggcaacttcgccgatggctgtcaataagttcttccatagcgtgctgtccggctgggtgctggctgccgtgtttgtagtaggcgtaagctgctggtatctgtggaagaagcgcgagaagaaatttgcgctggcaagtgtaaagattgccgcatgggtaggtctgtgtgccgctgtgctctctgcctggacgggtgatggctcgggctatcaggtggcgcaaaagcagccgatgaagctggctgctatggaaggctattatgaagggcggcaaggtgccggattggtagcgttcgggctgctgaatcctgccaagcagacaccgcaggacggagtagacccattccttttccgtgtggaaattccgaagatgctgtcgctgcttgccgagcgcaagatggatgcttttgttcccggcatcaatgacctgctgaaaggtggatatccgttgagcgatggtaccgtagcgctttcggcagaggagaaaatagaaaaaggaaaaacggctatcggtgcgtttgccgcctatcgtgcagccaaggctgcgggcaatgaggcagatgcagaggtggctgccaaagtgttgaaagataatgtagcctatttcggttatggttatatcaaggacgtgaacgagctggtgcccaatgtgtcccttacgttctacatgttccgtgtgatggtgatgttgggtggatacttcatcctcttctttattgtggtgctgttcctggcctataagaaagacttgtcgcggatgccatggatgcattgggtggctatgctcaccattccgctgggctatctggctggacaagccggatgggtggttgccgagtgtggtcgtcagccgtgggccatccaagatatgctgcccacgagtgccgccatctctaagctggatgtaggctccgtgcagaccacgttctttattttcctggtacttttcactgtcatgctgattgctgaggtgggaattatgctgaaggctattcgcaaaggtcctgaaaccgaaacgcacacaccgtcacataactcataactcataacttataactcataactcacaatgaatgcttatatatttcttcaacactattggtggtttgtagtctctttgctgggagcactactggtattcctgctgttcgtgcagggaggtaattcgcttctgttctgtctggggaagacggaggagcagaagaagatgatgattaattctacgggacggaagtgggagttcacgtttacaacgctcgtcacgtttggaggtgcgttctttgcttcgtttccgttgttctatagtaccagtttcggaggggcctattggctgtggatgattattctgttcagctttgtgttgcaggctgtcagctacgagtttcagtcgaaggcgggaaatctgctgggcaagacaacgtatcgcacgttcctggtgataaacggagtggtaggtccggtattgctgggtggggcagtggccacgttcttcacggggtctaacttctatatcaataaagggaatatcgcagatgcggcaatgccggttatcagccaatgggctaacggctggcatgggttggatgcgttgcttaatccgtggaatgtggtgctggggctggctgtgttcttcctggcacgtatcttgggagcgctttattttattaataatatcaatgaggatgatttggtgaaacgctgccgccgggcactttggggaaatacggcgttgttcctggtattcttcctggccttcgtcatccgcacgttgcttgccgacggctatgctgtacgcccggaaacgggagaggtgttcatggaaccttacaagtatctgacgaacttcctgcagatgccagtagtgctgcttgtattcctggttggtgtggtggctgtgctctggggcattatccgcacgctgtggaagccggcattcgacaagggtatctggtttgccggtgcagggacggtgcttacggtattggcactgctgcttgtggcaggctataacaatacggcctattatccgtctacccacgacctgcaaagctcactcacgttggcaaacagttgctcgagccagttcacactgaaggttatggcttatgtctctatccttgttcctttcgttcttgcctacatcttctacgcttggcgcagtatcgacaatcgcaagattgatgcgaaggagatggaagagggaggacacgcgtattaattaaaaattaagaattaaaaattaaaggaggatgtgtcatctgtgtgctattaactgttttgatacatcctcttcttattcttttgtccgcttctcatttagctggaatttgggtaccagtttcatcaatcgtagaatctgtccttgccttttctttatgtaaggggaggggtgtgctgagtcgaagcgtatggggttgggcaatgttgccgctattagtgcgcactgtccggcagagagcttggctgctgtagtcttgaacttgtatttggcggcagcttgtgcgccatagatgccttttcccatttcgatggagttgagatagacctccatgatacgttctttggaccagaagaattctatcagtacggtgaagtagacttccagtcctttacgtacccaggaagactggggccataggaatacattctttgccgtctgctggctgatggtgcttgcgccccgtttccgttttcttgtttcattctcctttatcgctttctgtatctcgatgaaatcgaatccgttgtgtgtggcaaaccggttgtcttccgaggcaatgacggccataggcaggtgaggggatatcttgtcggaagatacccaagtgtggtgccagcatggactttcacccttaaagacctgttgcacgctgcgaataaccatcagtggcgtgatgtagacgggtacaaaacgataagccactaccgctaggatagtggaaataaagaagaataatatgatgttgcggaggaaccgcaaaggcttcgggagtttcatggagagagtgccaatgtgattaatgtgttaatgtgccaatatgcatattggcacattaacacattaatcactttaccatattaattagctgcctccgcattcttaatcatctgttcgctggcatacatatatacctctacgcgtcggttctggtcggcagacagactttcgtcgtattcgttgtatcccacgccttccactttcttgaactgggccggagatacgccgcaatcctgcaaatagttctctacggcataggcgcggttcttggaaactttcatgttggcttcgtaagtacccactttgtcggtatggccgatgatggcgatatcggttgtcgggtcttccttcagaatctgtgcgagttcgcgcagggaagcctttgcctcgttgctcagtgctgcggagttgaagccgaaaagaatacctgccgcaaaggatactttgacagccggcaagccgttggcatccgtcacctgctccacttgggcgccttcaatcttggcagcttcggcagccttcttgtccatcttgtgtccgatggcaacgccggcacccgtacctactgcagcacctaccgcagctccaatggctgcccccttgcctttacctatcagtccgccgataatggcacctgctgctgcaccggagccaccgccgattattccacctttggccttgttgttcattgtgccgcaactgcccagcagcaatgcgccgcacaaaagtaatactgtaaatttcatcttcttcataactctttttctttaaaagttgactttatctttaatgttgcaaatttatgtatataataaccatattcttctttctaaagttcgccagttctgtccttttttagagaattttccttttgatgaggacgaaccaggctgtcagtataagacctttggcaacggtcgttccacttactgcccaccagatggcatccactcccatacccatgtgcaccagcaataacgccaccggaatacgcatgtaattgcatccgatgctgacaatggcaggcggcactgtccgtcccagtccgtagaacacgccctgcatggtaatttccatcatcatgaacatttgcgaatagccgtcgatgcggaggaaatctccacccacacggtaggcttcggcctcgggtacgaagatagagaacacctcgctgccgaagaagatgaacagtagtgagcagaggcttccgaatacgcccgtcatccacatggtggtgcgccatgcttgcttcacgcgcgacttctgccccgcggcatagttctgggcgatgaacgtgctcagccccgtggagaatccttgcgaagtattccaggtgatggcctcgatttgtccaccggtggtgaatgccatcagtccgatgtgtcctccctgctccgaggcggtgcgcgagaggaacatattgacgaaggcaaatagcgtgttcagcgtagccacgggcagcccgagcttgaagatgcgccgggtgtacttctttttcagcggaacgataaaggagaaacctccgagcacggcgcttttcccccggagtttgtagacgaagatgccgaatactgtagcttcggaaagccatgtggcaagtgccgcgcccactgttccccaaccgaagccgaagatgaacagagggtcgaggacgatgttcattatcagtcccgtcccgctgatgtagaacggaatcttgcttcgtcctgccgcgttgtagatgcccgtaaaggcagcggagagaaagatgaaaggcagtcccgtcgacacgatgcgcagataagtcacggcggcgtccgtgatatgctgtttcagctcgaagatgttcaggatggggcgggcgaaaagaaagagcaggcctccccagcagacggagatgagcagggcaatcgtaatgttgtgcgaggcaaagctgcgtgcgtcctcttcgctgcgtgcaccgatggactggcctacgctgacttcggcgcccactttattgagcaaggcgatggagccggacatccacgtcagtatgcctaccgcacctactgcagccatggactcactgcccagacgccctacccatgccatgtccgtcaggctgtaggccatctggatgaacgaggtggccatgatgggcattgccagcgtgaaaagctggcggttgatggggccttgtgtcagattctttgttccttgcacgttgacgggtttttaggtaaacaatgtgttgctcatccccttttccgctttctgcggagacggtggcggcgtttctgcttgtactttcgtatcttggcatataccagccagatgaagagcagaccgaaaacggcgaagatgagcagcacgatgcctgtgttgagattgtcacctttcacgcggctccacatctcgagcactagttccgtgcggtcgccgaagtcgcgtatcatggcgcagcgttccactactcggcggtcaggatattgtaccgggtctatctgcaggctgtcggctccgggcagggggccgaagaagtagctgaggtcggagtgcacgtcgagcgtggtatcggtcttggcctccatgatttccggtgtggctacggcgctgacgtagccgatggcatccatgttgcgcagtgccacggaaggctggcagaggtagttgatgaaatagcttgccgccttcacgttgcgggcgtagcgggggattacccagccgtcgtaccagatgttgctgccttcgcaggggacggtgtagtccagttccacacccacggcatcggcctcctcgatggcccagacggcgtcgccgctccaggtgaagttaatccacgccttgttcttggtcatcatttccttgccgaagtcggcttcccagccggcgatgttgggtttcatctccttgaggcgttgctcggccagggcgatggcctgcggggagttgtcgttcatcagttgctctacggtgacggtgctgtcggccagctcccgggcgtgggcgtagatgatggcggtaccgtaggcatcgcggtagctgtccttcatcagtattttgccgcggtttttggagtcccagaggatgtcccatgtgccggcctcttcggcggtaataaactttttgttgaagaggataccagcggtgccccacatgtagggcacggcatagtcctcggtctggcgttccggttgcgaggtcttgttcagctcgtggcgaatgtagggcgacacgttggggatgtagtccggcgtgtggccgaagttgcggtcgatgggtagcaggaggtctttgcgaagcatgcgttcgatgatgtactccgaggggcatacgacgtcgaagtcctcgtgcccgcgctcaattttggtgagcatgatttcgttgatatcgaacacctggtagatgatacggaggtcttcgcccgtctgctgcttgtaccagtcgggaaattcggcaagcacatcttcatcgatgtagtccgcccagttgtatatcttcagtacacggctgcgctcttctgtggagtttccacaagaagagagggatgcgatacagcacagtagaatcagtatgtttattatccttttcatcatcttgttcttgacaattgataacttataactcatcactcacatcaatcgtttttcgtccgttcggcccgcttgttgattacaatcagcagcaccagcaccgtcacgaagatgatggtggagagtggccgcagttccggcgtcagtccacctttgcgcgcatcggcgtagatgtaggtggagagcgtttccagcccttggttgccgatggtgaagatggtcacggcaaagtcgtcgatggagagcgtgaaagcaaggatgaatccgcttatcatacccggaaatatctccggaagaataaccttgcgcagtgcttggaacggtgtggcgcccaggtcgagtgccgcctcgtagacattctggttcatctttttgagccggggcattacgctgagcaccacgtagggcgtgcagaaagtgatgtgtgccagtaccactgtggtgaatccttgcgatatgccgaagctgacgaacagcaggaacagcgacacaccggtgataatgtctgcattcatcatcgggatggcattggcgaagttcattacctgccgtgtgcgcgagcgcagattgaagatgccgatggctgcaatgctgcccagcgccgtactggcggtggcggcaagcagggcaatggcgaatgtgttccagatggcattcatcagcgagtggtgcatcccgcccgtaaacaaggagctgtacagcttggtggagaatcccgtccagttgcccagcacctttgcctccgtgaaggagaatatcataataattaagatgggcgagtagagcaacgccagcagcagccacaagtagccgcgggttaagattcgtgtcatcatatcacacctccgctttcattcgatgccccgtcctcctcgttggtaaagaggatggtgatgcctatcagcagcagcatgatgagcgagagggcggcaccgtagttccacattccgttgtaaatattctcttgcaccgtggtgccgaacagtttgatgttgttcattgtcagcaactcggcaatggcaaaggtagaaaccgtaggcataaacaccatcactatgccgctcatcactcccggcatggagagcggcagaatcaccttgccgaatacgcgggtaggagaggctcccaagtcctgcgcagcctcaatcagattgtggtccatcttctgaagggtgttgtaaatggggtatatcatgaacggcaggaagttgtagaccataccgaacacaagggcaccttcgcccagcggcaggttcaggaagtcgaacagcgccactgtggcaagcgtacgtatcaagatattcacccacatggggaggatgaacagcaccaccatggtgcgtgaggtgttgaattgcttctggctcaggatatacgctgccggatagcccagcagcaggcagaccagcgtggtgataacggctattccgatggagtagacaaacgtgttcatcgcttcggggtgcatcatgaacttgcggaagttggccaacgtaaacgcccctccgtcgtccgtaaaggcatagagcacgatgagcagcagcggtactatgacaaatacaagcagaaacagcgcgtagggtaccgtccagttgcgccggcgcatgaagaaatgggataacttattgagcacttccttccttattaagagattgaacaatccgtatattttgaggggcgatggtgatacctacgcggtcgccgtcgtcccacacgtcgttggtgtcgacaaagatgtcttcgtcccagtccgtaaacacggtcaggtggtaatggttccctttgtagaggatgaatttcacttcacccgtcagacggccgtcctcttcgttgtcttcgaggatgacgtgctggaagtctacttccacttgcacggcgctgcccggctcgatgccctgcacggggaggcactcgaagttacagcccaggaagtctacgtgcgtctcgtccaccagctttccctcgaaggtgttgcaggtgcgttccttcttcatcacgtggatgtcgaagggtttcaccagcaggccgacttcgcgtcctgcctcgaaggcatggtagtcctgcaccatcagctcgtagccttcgcgcgtctgcaccagcatttcgtagtgtacgcctttaaagatgcagctggttacggtccccgtcagctgtgcggcgtcggatacatcgaagatgtagatgtcttcggggcgaatcactacgtctacctgcatctgctcgccaaatcccgtgtccacgcattcaaattcgtgtccgcagaaggtgacggctttatcctttatcataactccgttcaagatgttgctttcaccaatgaagtctgctacgaaggagttgatgggttcgttgtagatgtccgtcggcacgcctatttgctggatgcgtccttcgctcatcacgacgatggtatcgctcaaggtcagtgcctcttcctggtcgtgggtcacatatacgaaggtgatgcccagcttctggtgcatctcctttagctccatctgcatgtccttgcgcatttttaggtccagggcggcaaggggttcgtccagtagcagcacttcgggttcgttgacgatggctcgggcaatggctacgcgctgttgctgcccgccggagagggagtctacgtcgcggtcctcatagtccgtcatgcccaccatgcgcagggcttgctttaccttcttctcgatggtggcaccgggcagcttcttcagcttcaacccgaaagcaatgttgttgaacacgttgaggtgggggaagagagcgtacttctggaacacggtgttcaccggacgcttgtgcggcggtgtctgcgtgatgtcctttccggcaatggttatcactccttccgaggctgtctgaaagcctgcaatgaggcgcaacagagttgtctttccgcagccggacggtcccagtattgttacaaactcgcccttacggacagacaaattcacatcattcagcacggccttgtctccgaagaatttcgatacgtgctccacaccgatgatgcaatcggacttttgcataagcgtcttttactttatccaaacgaattaaacaaatctcagaagaaagctgaaataaaatcaaaacagtttctcgggctttcaaaaagcgggtgcaaagttacataatttatcgggatttttcgccttactctaaaattcattattcctatgaagttaaaataataagtaatacctttgttggcagtattgatattaaaacttaataacatgatggaaaagaagattgtactcatcaccggagcctcctcgggaataggggaaggctgcgcacgtaaatttgccatgaacggttaccggcttatactcaatggccgtaatgtggagaaactgaatgctgtaaagaaagaattgttggagaaatatggagccgatgtgtatctgcttcctttcgatgtccgcgaccggcaggctgcccgtgccgccctcgaatcccttccggaggaatggaaggcggtagacatactggtgaacaatgccggactcgtcattggggtggacaaggaacatgaaggcaacctggatgaatgggacattgtcatcgacactaacgtgaaagccttgcttgccatgacccgcctcgtggttcccggtatggtggagcgtggccgtggtcatgttatcaatatggggtccattgccggagattacgcttatccgggaggcagtgtgtactgtgcttgcaaggctgccgtcaaggccctttccgacggactccgcatcgacctggtggataccccggtacgcgtgacgaatatcaagccggggttggtggaaaccaatttctccgtcgtccgtttccgtggtaaccgggaggcggccgataatgtatataaaggtatacgcccgctgaccggcgacgatatagccgaagtggtctatttcgccgctgccgtccccgagcatatccagattgcggaagtgctggtgatgcctgccaaccaagccacggggacaattgtcagccggaaatagaatttgtataaggatatgataaaatgatactattttatcttcggggaaacgcctacatttgcgcacagctaaatgaatatagaatctaaacaagaaaagcatgaatttcaagaaacgaacaaatttcctctttggagtactgctgctgaccggcagtttgttggctcaaaacgtatgtgtatccactccgaaaacctctttggtgctttcggctcctgaaggcggtacactgagacacttgtattatggtaacagactttctgaagccgacttgcagaatatctctgcggcagaagcgaaccatgcagcctatcccgaatatggattgaatgctcccgtggagacggccctcgctgtgaagcatgccgacggtaacatgaccctccagctcgaagtattgaacgtgactaccgaaaaggaagggaatgccgtgacgactgtcgtggcactgaaggataaggtgtatcccttcttcgtcaacgtctgttaccgtgcctggcaggatgccgacgtgatagaatcctggactgaaatctcccatcaggagaagaagccggtggtgctcaatcagtttgcttccggctatctgcccatccgccgtggcgatgtatggctgtcccatctctccggttcctgggccaatgaaggggttttgacgcaggaacctctcactccgggcatgaaggttatcaagaataaggacggtgtgcgcaattcccatactgaccatgccgaagtgatgttctcccttgacggccgtccgcaggagaacacgggcaacgtgattggtgcagccctctgttacagcggcaactacaaactccgcattgagacacacgatgatgaataccaccatttctttgccggaatcaacgaagagaactctacttattccttgaagaaggacgagcttttccgcactcccgaacttgccctgacttatagtaatgaaggcttgagtggcggcagccgtaacttccatcgctgggcacgcctgcacaaactggcgcacggcactaccccccgcaagattcttttgaatagttgggaaggcgtgtactttgacatcaaccagcaaggtatggaccaaatgatggcggacattgcctccatgggtggcgagttgttcgtgatggacgatggctggtttggcgacaagtatccccgtaagaacgacagctcatcactcggcgactgggtggtggacaagaacaagcttccgaacggtattgaaggcttgctgagtgatgccaagaaacatggcgtcaagtttggcatctggattgagccggagatggcgaacactaccagcgaactctacgagaagcatcccgactgggtacttaaagcttccgaacgtgacgttgtgttgggacgcggcggcacgcaggtagtgcttgaccttgccaatcctgccgtgcaggacttcgttttcggtgtggtagacaacctgatgacctcttatcctgaaatagattacatcaagtgggacgccaatatgtctgtccagaaccacggttcgcaatatctgacgaaggataatcagagccacatgtacatcgaattccaccgcggcttcgagaaaatctgccagcgcatccgtgccaaatatcccgaccttaccatccaggcatgtgccagtggcggcggtcgtgccaactacggagtgctgccttacttcgacgagttctgggtaagcgacaataccgatgccctgcaacgtgtctatatgcagtggggaacttcctatttcttccccgccatcgctatggcatcgcatatcagtgctgcccccaatcatcagacgttccgcaccatccctctgaaatatcggatagacgttgccatgagtggtcgtttgggtatggaaatccagcccaaaaatatgacggaagaagaaaaggctctttgcaagaatgccattgccgagtacaagaccattcgtcccgtagtacagttgggagacatttaccgcctgctctctccttatgacaagcaaggtgtggcttctctgatgtacgtggctccggagaaggacaaggcagtcttctattggtggaagacggaacatttctgtaaccagcacctgccgcgtgtgaagatggcagggctctgtgccgacaagcaataccgggtgcatgaactgaaccgtatagataatgttcccttgaactacgaaggaaagagtttcagtggtgcctacctcatggcaaacgggctggagattccctacaaccataaggtggactatcacaagcagaacgactattcgagccgtgtgctttatctggaagaggtgaagtgacataagcaaaggtgaggttgggccgtgtaaaggtgaacttgagcggcgtaaaggtgaggtttatgggtacagttggtacagtgggtacagcgtctcttctatctcacacacgcatgtatataaataatgtacgcgttatgaagtaatgtacataagcgcatgtgtgtgaagcagaagaggcgctgtacccactgtaccaattgtaccactgtttggatgttcaacttttcttttcgtacccttttgggactttcaggtaagatggaaacataaaaaaagtcccacaatacattgatattgtaggacttttttctttttgtcgccttctggctttgtttctatgtgaaccgcttggggctcgaacccaagaccccaacattaaaagtgttgtgctctacctgctgagctagcgattcaatccttcattgctgttaagcgggtgcaaagatagatacttttttgaaatttgcaaaataatatcatctttttgcttatctttgtccccatcaatccttgatattaatcattatcactgaacattaatcattaaatacatggcaacagtagacgataaaaagattatcttttctatggttgggctgaataaaaccattcagcagaacaacaagcaggtactgaagaacatttacctctcgttcttctacggggcaaaaatcggtatcatcggtctgaacggttcgggtaaatcgaccctgctgaagattatcgccggattggataagtcctatcagggcgaagtggtgttctcgccgggatattctgtggggtatctggcccaggaaccgtacctcgaccccaccaagaccgtaaaggaaattgtaatggaaggcgtgcagcccattgtggacgcgctggcagaatacgaggaaatcaatcagaagtttggcttgcccgaatattatgaggaccaggacaagatggacaagctcttctcccgccaggccgagttgcaggacatcattgacgcgaccgatgcctggaaccttgacagcaagctggaacgcgccatggacgccctccgttgtccgcccgaagaccagtccgtagaacatctttccggtggtgagcgccgccgtgtggccctttgccgcctattgttgcagaagcccgacgtgcttcttcttgacgagcccaccaaccaccttgatgccgaatccatcgactggctggaacaacacttgcagcagtacgagggtacggtgattgccgtaacgcacgaccgttacttcctcgaccacgttgccggctggattcttgagctggaccgtggcgaaggtattccctggaaaggtaactactccagttggctggaacagaagaccaagcgcatggagcaagaggaaaagaccgccagcaagcgccgcaagacgctggaacgcgagctggagtgggtgcgcatggctcccaaggcccgtcaggcaaagggaaaggcgcgtctgaactcctacgacaaattgctgaacgaggatgtgaaggagaaggaagagaagctggaaatctttatcccgaacggtccccgtctgggtaataaggtgattgaagccaagcatgtggcaaaggcgttcggtgacaaactgttgttcgatgacctcaacttcatgcttccacccaacggtatcgtgggtatcatcggccctaacggtgccggtaagactacgcttttccgtcttatcatgggactggaaaaggcagacaaaggcgaattcgaggtgggggagaccgtaaaggttgcctacgtggaccagcagcacaaggatatcgaccccaacaagagcgtatatcaggtcatttccggcggaaacgatctgattcgcatgggagggcgcgacattaatgcacgcgcctatctgtcccgtttcaacttctccggtgccgaccaggaaaagctctgtggggtgctttccggtggtgaacgcaaccgcttgcatctggcgctctgcttgaaggaggaaggtaatgtgctgttgctggacgagcccaccaatgacatcgacgtgaatacgctccgtgccctcgaagaaggtttggaggactttgccggatgtgctgtggtcatcagtcacgaccgttggttccttgaccgtatctgtacgcatatcctcgctttcgaaggagactccaatgtgttcttctttgaaggttcttattcagaatatgaggaaaataaacagaaacgtcttgggaaagaagaacccacccgtgtacgttatagaaagctcatgaatgattgatttcggtgcgaatttgaaagtatattcttttacttgttgacaatacgaaagccctgctgtagaatgcagggctttttttgtttaaaaatatctcaaaaaagcctttctaccttcaaaaaatgtaacataaatataacattaatctcgtttttattagttatatttgcgacttaaaacataaattaatgtttaattaacactatctattaacaaaaaacagaattatgagaaaacatctaattcaattcctgttggttgcagtgttgtcggtatttagtgccgctgcatttgctcagactacagtgagaggtcagcttgttgattcagaaacaggtgaaccgttagtgggtgccgccgtcatggtggaaggtactacacaaggatcggtgaccgacattgatggctatttcaagcaaagcgttgcttcgaatgcgacattactattcaagtacgtgggttataaagaccagaagaagaagattgcgcagaagggcgcttctgtggatttgggagctattcagatggagccggatgcggtgatgctgaaggacgtggtgattacatcgtcagtggcagttgtccgcaaaacgccagtagctctttctacggttgatcctgtatacattgaagaaaagttgggaacgcaggaatttccggagattttgaaagcgactccgggtgtttatgcaactaaaaatggtggtggttatggtgactcaaaaatcaatatgcgtggattccaagctgctaatatcggtgtgatggtaaacggtgttccagttaatgatatggagtggggcggtgtttattggagcaattgggcaggtctttccgacgtgacccgttctatgcaaacacaacgcggtcttggagcgtcgaaggtgtcttcgccgtcggtaggtggtactatcaatatcgtgacacgtaccactgatcaaaagaagggaggaagtgtttcgtatggtataggaaatgatggaatgaacaacatcatgttcaatgtttcttccgggttgaccaaaagtggatgggcatttacacttcttggcggaaaacgttggggtgatggctatatccaaggtacggaattcgaaggctataattggtttgtaaatatatccaagcaattgggcgataaccatacattggcgttgaccggtttcggcgctccgcagtggcacaatcaacgctctcaatatgacggacttacagttgaaggttggcagcaagtgcgtaaatacatgcctgatggtcaacaatatcgttataatcctacttatggttttggaaagaatggtgaacgtaaggcttctgcaaaaaatttctatcataaacctcagataagcttgaaccaccaatggcaaataaacgctaagtcttcattgagtactgctctttatgtgtcaatcggtgaaggtggcggtaataaaggtttgggacagacttccacggattctaataattggtatggaaccagcaatggcgtgttgaatacaactttccgtaatgcggatggtacatttgcttatgataagattcaagatttgaatgagcaaagcgaaaacggttctgtaatggtgatgtctaagtctaagaattctcaccgttggtacggtttgctgtctacttacacaactaaaataaacgaaagtattgatttctatggcggtattgatttccgttattataaaggtattcataccaatgaaattaccgacctttacaatggggagtattatactgactcttattatcgcggtcgtgtgaaagctgctaataacgctgctgctgctaatccttcatggcaatatgaaaagttgggtgtaggtgatgtcgtataccgtgattatgatggtcatgtgatgagtgaaggtgtgttcttccaagcggaatacaataaggataaactgtcgacatttatagctggttcattgagtaacaccggatattggcgttatgaccgtttctattatgacaaggaacatgcggaaagtgaaaaattaaactttttaggctataccatcaagggaggtgctaactataacttgacagaaaatcacaatgtattctttaatgtgggttatatcagtcgtgctccattcttctcaggaggagcattcctgaatagtaccacaagtaatgaaacgaatcctgatgccattaatgaaaaaatattctcggcagaaataggatatggcttcaaaagccgtattttcagtgctaatttgaatgcttatttcactaaatggttggataagactacaaccaagactggtgattatacgacggcagatggaacggacgaccggtttatgctgaatatggcaggcgtgaatgccaagcatatgggagtggaactggatttgaaattccgtcctttccgttggttggatgtaacaggcatggtttctgttggtgattggaagtgggacagcaatgcaactggatatttttataattcggcaggcgatcctttggcagaccttaaaggtacggtagcttccggtattggagcagaagaccatactaaatttacattgaagcaaaagggaataaaagtaggaggttcagcacagactacggctgctttgggattgaatgcgaaagtgactaaggatttgcgtgtaggtttggattacacttattatgctaatctttatgctgactatcagctttcgtccagtaatatcattccgggagaacttaatgtagttgatccttggaaagttccttccggaggacaattcgacttgaatgcaagctataaatttaatattggcaaatgtaatgctactctttatggtaatgtgaataatttattgaactaccattatattgtggatgcttatgatggaggaactggtacttgggacagtgcataccgtgtgttctatgctttcgggcgtacttattccttgagattgaaaataaacttctaaatgaaacctaaaaagcataagagatatgaagataaataaatggttatatatgtctgcggctctgctggtgcttgcaggttgtgatgacgattggaacgaggacaaattggatggatttaaacgtcctgaagtaacagatataaagaaaattgagtacacgcttctggatgctgactataaggcaatagccactaataaaacgaataaggcattggcagaatctcttggtttatctgatgcgttgtccaaactgactaatgataaatatttcacggatgaaattccggcatccaaatttataccggctttcttatctgatacttatcctacagcagatgataagtcggctatcaaagtgacttatagtaagctggtgggagaaccggaatatctggcaactataggaggagctaaacattaccaactgacgtcagatgactatgccaaggtgtggggagagtctgtaaaagcgccgtttttgtctcccaaaacagaaaaccggatttcaaaattgctgggtgaggcaatggaggatgcggccgaaggagatatggtaatggtagattatgcatattcggaaaccgagccgagcattggcggaggtgaagaaaagatggtttaccagcaagtatcggagattacggaagaaggcggcaactatgtgattgtggctcctgataaggaaggcaatctgatacctttcggcaagttgcaagatgagtcaaagaattatggctatatggcaggtgaagcagtcaccgtgacaaatggatttattaccagtgatgtaacggattatgtgattgcagttgcaccttcgagcgtaggatataccttgcagcgtcctgatggaaaattcatttatcagcagggtacctataatagtttcaatctgggtgctacgattcctgataatgcttttgccgattgggtgttccagcctattcaagacggaatgtttacgttggttaacgacaaaaacaagaagaccgtgaagttgaacttctatgaaaaaggaggaacttactcttacggttgctatcctggtacatcttttggagagtatttgaatgcttcaatgaaagtgaatgacggagacttcaaagcgcagaacatagcgttggaggaggtttcgtatgtatggaagtatgatgccggatacggctattggaaggcaggagcttatgccaataataagaataatccgactgaaagctggttggtgtctcccgaaatagatttgtctaaagcaacaaagccggtgctttcttttgataatattcttaatcacttgaagggccatgagcgcgcaggatatgttgaagcttatatattggctgattatacagatgacgtgcagactgctgccaagactcttgtagagggaatcacttggggaagtgggtcaagctggactgctgtgaattcgggtgatatagatctttctgcctatgcaggaaagaaagtccgtctggcctttatgtataagagtactacggaatgtgctcctacgtttgaagtatataacattgcagtaaaagaacctgtaaacggttattatgctgatgtgaaaatctttaagcaaattcctgaatcagaagcagctatgtcagtttctgcatacggtatggcttctactcgctcagccgatggttgcaaccgtacggctttgtatgcttatgacggttcaggttggaacaaacacgcattgaatggcattacacttgatgtaatgcaaccggaggcatactcctcattaggtgtgggttatttgacatcggcttcaactgtgctccctgtctacttgaaaaacgcatatccttatgcacaagaggaagatgtgatagctgtggcttattatgcttctgccgaaaatgctgtggctgccaaggaattgatttacaatggagccgaatggattatgacacaaaaggccattagctttgtcgatcagtttgtgaagtccaatggagcttgggtttacgacccgagtgtagttctggagttaccggtaggaaagaaccagccagtgtcatcagtttattatcaggctatgactgattgggtatgggagaatgtggatgttcccaacggcatggtgaaaggacaaggatatgtgacaacctatggaaataatgagtattataccggtgcttcggcttaccagggcaatgctgattggcgtccgagtgctgccaagaaccaatatcccgcagagtatgagtcaatggcagatgctgatattgtggctttgcttcagaaacgctttgttgaagtaatgggagaggttcttgcctctttgaatccggatgcaaaaatggtggacggtgtcgatgtattctataccataaactttggtgtgtatacgggtactgctgagaattggacggtagtttataaacttgttgctgatggcaagtttgaatacgtggaaggttctttggcaaaaagatgataatagagtgagtatataattagtgagggcggttttcttacaaagattttgtattttgtaaagtgagccgtccttattgtctgatagaaaaatgattatgatgaataaaaaatatgcaatttgtcttttaggattgctcatatccgtttgttttgcggcatgtgacaatgagggagattcgctggtaaaagcgaatgggtatattgaaaataccgaaaatggcacttccacagccatactgaaaggatatgaaaatcctaatatagagttcagtgtgcttaaaccttcaggctttgattcccctttctatattaacgagaaatcttttataggagattcttatagttttatcgaagcttccgaaagcaggctggatgccatgactacggttcccgtcaatgaaaattgggcagaaacagcgcttgtaactttgggaaatacttattgggtgcgttatgaaaaaccggacttttatcattacctgaaattgcgtgtagcctatattatgggtaatgaaataggggtagaatatctaataatcgatacaaaaagcgaaggccctaaccctaattcaaatttccgttatcaatccaagtatccgtctgcgatgaatatggaaactcccgctttgaatgaaagcaatcagtatgtggcatacaacgtgacttttaacaatagccagcgtgtgaattttgctttggagtatgtggctgagaagaagcattcggcatgggtggcattcagtttcgaccagtggacaagtcaggacaatgtatccagaaagaatgagtgggagcaggacgaccctaatattgacaattctgtggaagtgaccgaaagcatgcacaaaagtgacgggtacgacaaaggacatcttgtggcgagtgaagaccgggtatattgcagagatgctaaccggcagactttctattatgctaacatttctccgcaaataggagtgttcaatcaaaaatactgggctgcattggagaaacaagtgcagacatggggacgttctactcagcagtctgtctacgacaaggtctatgtgaccaaaggcggtacgataaataaattgctgaccaacttcaccggtacactgaaagccaatgaccaactttatcctacaacagatgctgatggaaaaactgtgagaggtctgattgtacctgcttattattatatggctattttatctgaaaaaaatggagtgtataaaacgattggcttttatgtgcctcatgcagaaacgttgccacagaaacctacagccgacgacttcctggtatatgccgtaagcatcgacaagctggagcaagaaaccggtatcgacttcttctgtaacctgcctaatgagatagagaagactgtagaagctacttatagtgctgacgattgggcttggtaaaagcttcagaaactataaggagagtctccccttttagtatgacgggcatgtcatgatttaggtagctttcttaaaagctgttttcgttttgatggaaactgacttcttatccgtatctttgcatattgattaaaaaaagagatattcatggaactttcggatatacttcataatttgaagatacaagaacttactccgatgcaggaggctgctaaggaagcctatcaatcagcccaagatttagtgcttctttcgcctaccggttcgggtaagacactggcttttctccttccgctggtacagaccttgaaagcggatatacaaggtgtgcaggctcttgtactagtaccttcacgcgaattggctttgcagatagaaactgtgttcaagtctatgggaactcctttcaaggctatgagctgctatggcggacgccctgctatggaagaacaccggacaatgaaaggcattcatcccgccgtcattatcggtactccgggacgtatgagcgaccatttgaggaaagagaatttcaatgccgccactgtcgtcactctggtgatagatgaattcgacaagtgtcttgagttcggcttccatgatgagatggcggaggttatcggacagcttccctcactgaaaaaacgtgtgcttctctcggccaccgatgcagaggaaataccgcaatttgccggattaggaggtgattccccgtcttccggctcccggctcatgaagcttgattttcttgctccggaagcccttgctccgcgtctgcggctgcataaggtcgtttctccggagaaggacaaactggaaaccctctataacctgctttgtaccctcggctatcattccactttggtattctgcaattatcgtgaaagcgtggagcgtgttgccgggtacctgcaagccaggaagttcccttgcgacatgttccatggcggtatggagcagcccgaccgcgaacgtgcgctttacaagttccgcaatggcagttgcgccgtactgatatctacagaccttgccgcccgcggactggatattccgggtattgagaatgtggtgcattaccatcctcccgtaaacgaggaagcctatacacaccgtaatggacgtactgcccgctgggaggcatcgggaaatgcatatcttgttctgcatgtcgaggagcgggtacccgagtacatttctgaagacatcgaaacgtacgagtttccggagacgcttcccaaaccggccaagccccgatgggctaccttatatataggtaaagggaaaaaggataagttgaacaagatagatattgtcggcttcttgtataaaaaaggaggaatggcgcgtgaagatgtcgggcaggtggatgtaaaggaacactatgcctttgtagccgtgcgccgcagtaaaatgaaacaattgttgacgctggtacgcggtgaaaaaatcaagggaatgaaaactgttatcgaggaagcaaagtgatttatcttataaatattcattttatttgcgcttattcttttgaatatgaagtaatgaaaccgccttgcttttagtttctctaaaagtattatccttgataagtaaagataacaaaatggtgcatatatcttgtataaaccattaaaaagtaagctaaatgcggcttaaaaatagaatttcatcaggaaaggtttgttttgaagaaatatttccgtaatttcgcaaagtcgaaagacattaatgaacgaaattgtataaccaaaacaaacttcaaatgaaaaagcataatttcaatgcaggaccttctatccttcctcgtgaggtgattgagaatacggcacaagctattcttgatttcaatggctcaggcctctcactgatggaaatcagccaccgtgccaaagacttccaacccgttgtggacgaagctgtggcattattcaaagaattgctcaatatccccgaaggatattcggtactgttcttgggcggtggtgccagtttggaattctgcatggtacccttcaacttccttgaaaagaaagctgcttacctgaatacgggtgtatgggccaagaaagccatgaaagaagctaaggcattcggtgaagtagttgaagtcgcttcttccgctgaatctacttatacctatattccgaaggactatacagtgcctgctgatgcagactatttccacatcactaccaacaatacaatctacggtacggaactgaaagaggatttggacgtaaacgttccgatggtggccgatatgtcttctgatattttctcccgtcctatcgacgtgtccaaatatatctgtatctatggtggtgcgcagaagaatctggctccttccggtgttacattcgtcatcgtgaagaatgacgctctgggtaaggtatcccgctatattccgaccatgctgaactatcagacgcatgtggacagcggctctatgttcaatactcctcccgttgtccccatctatgcagccctgcagacattgcgctggattaaggcagagggtggcgtgaaggaaatggaacgccgtgccatcgaaaaggccgatatgctgtatgccgaaattgaccgtaacaaaatgtttgtaggtacggctgccaaagaagaccgttcacgcatgaacatctgctttgtgatggctcccgaatacaaggaattggaagctgacttcttgaagttcgctaccgaaagaggtatggtaggtatcaagggacaccgttctgtaggtggattccgtgcatcctgctacaatgccatgccgaaggaaagtgtgcaggctttgattgactgcatgcaggaatttgagaaacttcattaataatattgtttttcaccacagattacacagatttgcacagattgtttttatgattaaactctgtgataatctgtgtcatctgtggtgagtctttttaatatcatgaaattatgaaagtattagttgcaacagacaaaccgtttgccaaagtggcagtagacggtatccgtagagaaatagaagcagcaggttacgaactcgtgctgctggagaaatatggcgaaaaagccaagctgctggaggctgtgaaagatgccaacgctatcattatccgcagtgacatcattgatgctgaagtgctggatgccgccaaggaactgaagattgtggtgcgtgccggtgccggttatgacaatgtggacctggaagcagctactgcccacaatgtatgtgtaatgaatactccgggacagaactccaatgctgtggccgagttggctttcggcttgatggtgatggctgtccgtaatatgtataacggtacttccggtacggaactgatgggcaagaaactgggtatccacgcttatggtaacgtgggtcgcaacgtagcccgtattgccaaaggcttcggtatggagatttatgcgttcgacgctttctgcccgaaagaagtaatcgagaaggatggagtgaaggctgtgggttctgccgaagagctttactctacttgcgatgtcgtttccctgcatattcctgcaactgccgaaacgaagaattccatcaattatgcattggtgaacaagatgccgaaaggcgcactgctggtgaacacagcccgtaaggaagtcatcaatgaagccgagcttatccagctgatggaagagcgcaccgacttgaaatacatgaccgacattatgcctgctgccaatgaaacatttgcagccaagtttgccggacgttatttttctacaccgaaaaagatgggggcccagactgccgaagccaatatcaacgcaggtattgccgctgctaagcagattgtaggcttcctgaaagacggttgcgagaagttccgcgtaaacaggaaatgagatgaatagtaagactacctataaatgttcagttctttatttagcaataggtgctggtatatttccattaagtagtatattcagaaatgaattgtcagatttcgccctcggcttttgcgagggcgtatctgttgtactgatattaagtagtgctatttatctgataagatattttgtgaaaaagaaacctcaataatccatataaaacactctcttatggctataattaaaccctttaaagggattcgcccccctcaggatttggtggaacaagtagcgtcccgtccttacgacgtattgaattctgcagaagcacgtgcagaagcggaaggtaatgagaagtccctatatcatatcatcaagccggaaatagattttcccgtcggtacggatgaacatgacgaacgtgtttatcggaaagctgcagagaactttcgtatgttccaagagaaaggctggctggtgcaggatgataaagaaaactattacgtctatgcccagaccatgaacggcaagacacagtacggtcttgttgtcggtgcctatgttcccgattatatgaacggtgttatcaagaagcacgagttgactcgtcgtgacaaagaagaggaccgtatgaaacatgtccgtgtgaacaatgccaatattgaacccgtgttctttgcctatcccgataatgctgcgctggatgccatcatttcccgttatacagccgggaaaccggtatacgactttatcgctccgggtgacggtttcggtcataccttctggattatagacaagcaggaggacattgatgccataacccaggagtttgccaagatgcccgccctctacattgccgatgggcatcatcgcagcgccgctgccgctttggtgggtgcggagaaagccaagcaaaatcccaatcaccgtggtgacgaagagtataactacttcatggctgtgtgcttccctgccaaccagttgactattattgactataaccgggtggtgaaggacttgaacggcatgactcccgaagagtttctggctgctgtgggcaagaatttcatcgtggaggagaaaggtgaggacatctataagccgtccgaactgcataacttctccctctatttgaacggaaagtggtacagccttactgccaaaccgggtacttataatgataacgaccccattggagtactggatgtaaccatctcctccaatctgatactggatgaagtgctcggcatcaaagaccttcgttccgacaagcgtatcgactttgtaggcggtatccgtggtctgggagagttgaagaagcgggtggacagtggtgagatgaaagtggcattggccctctatcccgtttccatgaagcagctgatggacatcgccgatacgggcaacatcatgcctcccaagacaacttggtttgagccgaagttgcgttcgggactggtgattcataaactggactaaatgaattgatataaactgaaacggggatgtcttccactaaaagacatccccgtttttcgttcagaactctggaagcttaggagtgtgatgtttgaaatacagttttctcatccaccggtcaaacaggatgaaaagcggaatggtcagaatcagtaggagataaaagcaaggaatctggatactttctgactgtgggagggtggtgggcgtaaaggcttcccggatgctgtctccgaagtacagaaccaatcctgtcccactgacacctatcaagaagatagcagcggcaatagttgcaagcagaattcttctttctgatttcttctcgcgcagacgtatggcttcttctaccttctgcatggtgcggtaggtaaaattggacggcaggcggaaagtagtctgttctcttaccgcctttttcaatcctctatcttttagttcttcgttcatactttttcttgtttcatcaacacataaatctttttacgtatacggtgtagcttcacttttgcgttgctttccgtcagtcccaggatgagagcgacctcattcaatgttttttcttcataatagaacaggcttatcagtgcctgttcctcggaatcgagttgctccatggctctgttcaatttggcaatttgctcttccccttcatcatttaaggcttcatctacttgtgtatcggatatgttggcaagcagtgcatcatccatgacaaaggtatcaaatttctttttccgtgcactcgagatggccgtattatatgcaatcgaataaatccacgtcgaaaaagaactggtgcccttgaaagacgagagatgctggaaggctttcaggaagacatcctgggtcagttcttcggcatcttcctggttggagacgatacgggccaccaggatgaatacctgctggccgtatgtgttgagaaaatgctcgtaaagagcagtctctcccctcaagatgcgctggatgatatgtctctcgtcgtctttcattttgtctgttagacgcaagtttgtttggttggttacagattttcggaagaaaaaatatttttccggaaaagtgtaacctcatgtaaactgccgcgtctaaagggtacaaagaaacgaaattactaatttaaattgaaacgaatatgatggattttattatggtgcctgcggtgatgacaatcattactttaggagtttacaaattgtttgagctgtttgtttgtaagaaggaaagaatcatgctgattgagaagatggacgagcggggactactccctcagatggatacgcctaaattacgtggaagtagcttttcgttctctgccctgaaaataggatgtctgttggctggtatgggacttgggttattgctgggttatcttatctgctatgcgacgattcccaattactttactgcggacagagactggatgtatagggagactgtttcccttatttatggggcttgtgtgctgggtgttggtggaatcggactgatagtggcttttattacagaactaaaactgaacaagaagtaaggttattatgtagaaaatgccgacctttgctgaaaaattaagagtatgcaatgaaggtattgattcttaacggtagtcctcgtcgtcatggcaacatgtcgaaaatgttggagctgatgaagcaggaacttgaaggctgcggagttggaacagtttatatagacgttccacagttgcaggtacatccctgcatcggttgcatgaagtgtcgcagttcattgaagtgttgtctgcccgaggatggggcacagagagtgttgcagtctatgaaagaagccgatgcagtgataatcggtgccccttgctattggggaaacatgccgggagaagtgaaagtgcttttcgaccgtatggtttacggtatgatgggggagaactcttgggggatgccccttccgcttcataagggcaagaaagcgattgtggtaagcacttgtactaccccttatcctttcaatattctctataatcagacgcacggtgtggtgagagctttcagggagattctgaaatggagtggtttcaagattgtgaaaaccattgagaggggaggtactaagaagcatcctgagctgacggaaaaggatatgcggaactgcaagaaagcagtgcacaaattattgtaaagtattgaaaaagtcaatatgggtagaaaagaagaatataaattgcagaacgaacagtttctggagcagttgcgtacggcagaaggaatcaaggaattgccttgcggcatactttatcgggtattggaggaaggcagagacggtctgacgccacgtctcaacagtgtagtatctgtgcattataaaggcactcttatcaatgggcgtgagttcgataattcgtggaaacggaattgtccggaggcttttcgtctgaatgaagtgattgagggctggcagattgccttgctacgaatgcatcccggaagtcgttggattgtatatatcccttacaccatgggatacggtacacgtaccagtggacccattccggcgtattccacactgatatttgaagtggaattactaaatatctcgtgacactgctgaacaatttgcttttttatcttgttctcatataagaatttagaaaaactcaataggtatgaatatagataagaaagcagggcatattgacccgaaagtagcattgtcccaggcagaacatgaaaagggaacagtacccggacaacagattggcctttacggtaatgcagacaagagagatgttcgtcaggtcgtaaagattctgaatcctgacaaaaacagtatggagagcagaggttaaccctctgctttttttattacatgcctctttcttcgtcgagtccagatgatttgttggagggttttgtatctttgtacccggaaatgaaactcttaaaaacaaaagcaggatgctacggaaaggagacctcactcaaggaggcataaccggtactttattgcattttaccctacccatgctggtagggtcttttttgcagcaatgctacaacattgcagatacgctcattgtaggccaatgcattggtgcaggggcgttggcggcggtcggttcggcatacacactgatggttttccttatatccgttttgctgggactggcgatgggcagtggcactgtgttctctttacattatggtgccggaaaccatgtagcactgcgtcgtagcatattcagttcgtttgtactgataggtatcgtgacactgatactgaatgtagccgtttttatctggctcgatcctattctccggctgttgcaggttccgcaagacatatacggcatgatgcgcagctacttgtggataatcttctgcggtatagttttcacctttatctataacttctacgcatctctgctgcgtgcagtaggggattctgtcactccgctttggtttctggcagtttctgtcgttctgaatatagcgctcgacttgttttttatcctacaactggattgggggattcagggtgcggctgcggccactgtcctcgctcaaggagtagctgctctgggcatcatcatttatacttacagaaggcgtccggaactgcgatggcatcatgaagacatgtgttttgaccgtacttgcttgaaggaaatagcttccttctctacactgacttgcatccaacagtcggtgatgaatctgggaatcctgatggtacaggggcttgtcaacagctttggaacagcggtaatggcagcttttgcggcagcagtgaagatagactctttcgcctatatgcccgtgcaggaatttgggaacgccttttccacctttattgcacagaacttcggggccggacgttacgaccgtatccaccggggtgttcgcagtgcgtttgtcacagcggttgttttctcactcctcgtgtccgtgctggttttcgtgtttgccgagccactgatgcttatctttgtccgtccggacgagacggagattattgcggtgggaatggcgtacctacgcatcgaaggtgctttctactgtggcatcggcatcttgtttttgctgtacggatactaccgggccatccgtatgccgggcatgtctgttgtgctgactgtgctgtcgctgggtacccgtgtcgttctttcctactggctggcctcgatgcccgaggttggggtgacgggcatctggtggtccatccccatcggctggctgattgccgacgtagtcggtatctggtgctatcggtatgttaaaggagttagagggagttaaaagaaaatccggcaaatttgctccactgtccttcggatattttcttgagcaaattcaggctgcatggcctgctccaaagagacgggagagggggtaatggagaatacgccccggaatccggctgcattcagtatcccggcatcctctatcgctcctgccagcaggatgacgggaatatgttgcctccttgcttcctgcaagatgcccgaaggtactttccccataagagtctgccggtccgatttcccttctccggtgatgaggaggtcggcatccttaatcttttctgcaaagtccagagtttccaaaagaagctctatgccgggttgcaactgtgcatccagaaatgcgtggagaccgccccccataccgcctgccgcaccggcaccgggatgcaaggatacgtctttgccggtagtgcggaatatgacgtccgaaagatgctgcatagcaacatccagttccttcaccatatccgcgtctgctcctttttggggagcgaatacgtgggctgctccattgggaccgaagaaaggattgcgtacatcacacgccgccgtgaaacatgcctttttcagtgcgggatgggcagaagagctgtctatggagctgatttccgatagaagggcaccgcatagggcgatgcctttttccatgcttcccacttcgtgtccttctttatcgaagaaacggaatcccaatgcttgcagcattcccagaccggcatcgttcgtggcgctccctccaagtccgatgacgaaacggaggcatctccgttccaaggcatcgcgtatcagttcgcccgttccgaaggtggtggttttcatcggattccttttgtcggcaggaaccagtggcagtccgctgatggcagccatttctacgaatgcggtattgccgtctccggagatgccgtaactggcatcgcacggttgcatcaacgggtcgtgggcacggacggtgatacgttttccgttactggctgcaagcaggacgtcgagcatgccttctccaccgtcggccacggggagcacgatggtccggcattcgggacatgcggcatgtaccccttgggcggcagcttctccggcttctgccgaggtgaggcatcctttgaaggaatcgatggcaatcactatctttttcatgaatctgctttaatcttttcggttcggtgtgtttcattgattttcttgataaatctggctggattcccggctaccacagtcataggaggaacgtctttggtcactacactgcccgccccgataattgcgccgtagccaatacgtactccgggaaggacggtcgaattgattcctatccataccttatcctcaatggtaatcggacggccataggtagcgctgcgattctccggatcggggtcgtggttgattgtaatcagattgactttcggtccgataaatacctcatcgccaatcgttatgccgccgcgaccgaagaaagtgcagcattgctggatgaagcacccttttccgatggtgataggcttaccgtagtcgatgtagagtggcggcagcaccgttgtactttcttcaagcggtttaccgagaatcttgtccatatatccgtgtacctcttcgggggtgcggtaacccgtattcatttctgtggcaaccttgatggtagcgaaaatgtcctcaattaatgcattgtagcccggctcgttgggtgaaaccatctctcccgataaatctttttcaaaaatacttttcataatcgtttgatttaaattgttgtacactctaatcatttttcgggtacaaatgtaaggaggctatgctacaatggctttgttgtacggttcaatatgctttgccgtgcagtccacggatagaaaaagttccgcaatctatgtgagactcacttcctgctgtatgtcttctgtcggaggaataccgtaggtggttttataagctttcgagaaatgggagaggttcttgaagcctacttcaaaacagatttccgatactttgcgccctcctttccgtatcagctcacgggcggcttcgagacggcgctgtatcagccattcccgtggggagagtgtgctgcattttttgaaatcgcgtttgaacgtggataggctgcggccggtataattggccatttcttccatggatatgtcgttcatgtaattgtgttccagaaagtccaatatgtctattttccacgggtctgcaaaatcaaaaacggaagcatacaggtttttactcgtattgagcaacacgtatatcccctccatccttttcagttgcagcaactcctcagtcgggtggatgctcgaatcgaaatagggtgtcatggattcgaacagacttacaatgtcggggcggttggaaggtagcttgtacaagcttattttatctcgtttggcatctttaggcaggatgtcccggttcagcctgctgtaaaagtcacgcaggaacttgggagtgaacatcaagaaaatggctttgaactgctctccattccaggcttgtttggtcatttgcacactaaagtccttacggataaaggcacagtctcctttatgcagccgagtgattttgcctctttcatcgataaccatttcaccggagtacatatatactaacacgtgcgaatgattccggtgcgtgcagcttctccctccctcgaaatacattgccaggaagaggtccgaatagtgcaatgtcttgattccgtctgtcattttttctgtttgattataaatctgattcttcgtacaaagataactcttttcggcagaaatcagcttgcttatttctgctgcttttgattttgcattatctttagataagataagctgcacttcaacataacttttttcatgcaagcatgaaagttctctcttcagtttgcattatctttagataagataagctgcacctcaacataac

SEQ ID NO: 4443 - DNA, 41541 bp, Unknown
  gut microbiota DNA sequence
cagtagaggaggtgaaggcgcatctggaaacttaccagaagaaatactacgacgcccgccacgtgtgctatgcctacatgctgggccatgagcggaaggacttccgtgccaacgacaacggggagccttcgggcacggcaggcaagccgattctgggacaaatcaattccaacgaactgacggatattctcgtcatcgtagtgcgctacttcggcggtatcaagttgggtacgagtggactgattgtagcttataaggctgctgccgccgaagccattgccgctgccaccatcattgaaaagacggtagatgaggcggtgactttcctcttcgaataccccttcatgaacgatgtgatgcgggtggtgaaggaggaggagccggaaattctggaacagtcgtatgatatggactgccgtatgacgctccgcatccgtcagtccatgatgccgaagttgcgggcacggttggagaaagtagaaacattaaggtttgaataatacaacaaatgggataagagccccttttaatagggaagttgttcgtttcctttaacggaacaagttgttttcctatgaggaacagactgttttctttgcggaaacggcatcactccttatgaaaggctgactccctcctttaaacaaaagaaagtttatggcatttagtgcaacaaaaagagaactgggtgagctctacaccttctttcgcctgctggcggatggagccgtgtcattgggcacaccgaaagctgaaaaagacgaaaccctgcgctggcccgttgccttgatacagagggaagagcatgacggtacgcgccgttactatatcgaagcgcaggaagtgcgcattgtcagcggaactaccgggaaggacggttcgtttgttccgggcgagaaggaggaactgcgtttcccccgcgaagactttggtgatgcggcagagttgattctgcatcagttgaagaacgtttcgggcgaggaagtggaagtgactgaaggcttggaagctttcctggatgctgtcaatatcttcgacctggaagcaaagacggaggaccgtaccgatttctccgtagctttctggcatcccgaagctccgctaacgggcttcaatgtccgttgtcgccttaccccgatgaatccgttgctggacggagggcgcacggcgaatctgaagctggagcaaagcggtgtcaagtttgtcgtgcccacggtgaacaaggtgaatgccctgccggaatcttctacggaagtagcagaacgcatgatgatgattgagcgactgggcggcgtgctgaagtatgccgacgttgccgaccgcgtgttccgctgcaacctgctgatgatagacctccacttcccccgcatgcttgccgagatggtgcgcttgatgcacttggacggcatcacccgcatcagcgaattgacggagcgcatcaaggagatgaatccgctgaagataaaggacgagttgataaacaagcaccgcttctacgagttcaagatgaagcagttcttgctggcgcttgccctcggcatgcgccctgccaaaatttataacggtacggactctgccgtcgaaggcatcttcctgacggacggcaacgggcagatactctgctaccacaaatcccgtccgcaggtctttgcagacttcctttatcagaacacgcgtttggagaaaggtgccgtagagaaagataaatacggcttcttggagcgcgagaacggcgtctggtacttcaagctgaatgtgaagattggactggtgaaacgatgaaacagccctactgaatacgcaccgatttgcattatcaataatcaactatcaattctcaattaaacaaatgaacgagacattacaaactatcaaggcacgccgtagcgtccgtgcctatatggaacagcaggtttccgcagaagatttgaatcttatccttgaggcggctacttatgcccccaacggtatgcatttggagacgtggcacttcactgccattcagaataaggaagtactgaaagagttgaatgataaaatcaaaggcgcctttgccaagagtgacgaccctcatacacgggaacgtggacatagccagacttattgctgctactatcatgcccccacgctggtcattgtctccaacgagcctacccaatggtgggctgctatggattgcgcttgcgctctggagaatatttttcttgcagccaagtccctcggcatcggttcctgctggattaaccaattgaggcagacgtgcgacgaccccgatgtccgcgctttcttgacaaagctgggtgtacccgaaaatcataaggtatatggctgcgcagccctgggatatgctcccgccgatgctccggtgaaggagaaaaaggtgaaggaaggtacggtgaccatcatccgctaaacagagatacccgcaggagaggtgacggtcaggtaattaatcatacatgaagcaaaataacgtataattccgccactctccgttgggcttcctcttcacagaggaaatgggttatcgctgcatattgatgatgccgctgtccgtatcactgttgttcagccccttgttgcctgccttgtgcttgcgtccgaactcgaatgtataacccacgcgcagcacgaccatctgtcccgtctccctgacgaatgtctcggaacggaaaggagccactttgctgattctttcttttcccactttataattattggtgaagggaaacataataccgattcccgcctgaaggttctgccgggtgtacattgccatgaatgccgtctggttttcgttttttttaatggtttcgccgaagaaattgttctgcactttccggaactgcccgagcagcgagaggcctttatattgcacttgcgccatcacgctgtaatagaattcatcgtacatatggctatagttcaggccttccgaccaactgcgcgtatatcctcccgaagcataaagcgtcaggaaatctttcagtccgaacagtgtagcgccatttatgccggccatcagttccgtattcaggctttggaacgaccgctggttttcatccttcagtatcagtttgccgtcctccacgaagatgctttccatgatgggattgtcataatactggtggcgcacgctcagattggcattgaactgcttcttcgaatagctgtaagacaaggagttcgtgaactgttgatacgttttcagcaacgggttgccgcggactatctgtatcgtgtccatcgcctgctccacatccgtcagcgaaccgagtgacggtatggcaggactgatgttgaaccggtagcgcaggaatcccgccttcttcagattatagctcaaccgcacggtgggcgtgaaggtatagtaggcatggtcttcctcactctccttgaaccaggcgcgcgtcatgcctacgctgcccgcatagctgaagtcctttaccttgccctgcacctcgaagaaagcggatgtctgcgactggtccatcttcgaagtggtagggttggaacctttatactcattctctgtccgcatctgatagtggcgggcaccgccgctcagcttcacctccttgaagttcttttcatagatggcttcgccgatgacggagcgcttgtcaccgtccactaatgtctggatgtctgccagcggtgcgttctcgtccttgtactccttgtatttccggttgttcttggtatggatgagcgttcccgttacattcacctggatgctctgctgatggggcagggtatgttggaagtaaaggtcgagcgccggagagtagctggatgtgtggttgttgacgtacgaatagatggactccgtgctgcccactgcccacatcttgttcagtttattctggtagggggcattgctgaggttgttacggaagatggcattgaatacatatttgtccgctttcgtcagattgtacgtcagattcaggttgttgatgaagctcagagagggcgactcgtcttcgatgccttccttgatgcggtcgatggtgcggtcgcccagatagaaggtttcgtgggattcgaggcggctgtgatacttgccgttcttgttgaagtagtcgatgccccattcggagttcttgtaattgaacttcgcgctcaggaaattctctccccatagggtgtggggcgaatcggagagttggaagttcacaacaccgcccgtttcacggcggcgcaggataatgttgactacggcgcccagctcgtcgtctccgtactgcttgccggggtcttcgatgaactccacacgcagtacgtctttggctctgacggccgctatctccttgtctgtcactttaatgccgttgatacgggtttgtacggacccaccaccgctgacgctcatgctgttgctcagattgtccacttgcagacgggcaatgccgagattgttcagcaggtcgtaggcaccgaacgagcgtttcagctggctttcggaaggcaggataatttgccggtctacccgctgcagcacattgctggcggataccgtcacttcaccgaggcttacggcatcttcctgcaactgtacatcgcccaggtcgaggcttttattcagtttcagcagtatgttttcactttggaggccgatgaaggagatggaaaggcggtaatcgcctgccttgattttatggagggtgaacttgccttgtgcatccgaggttactccggtcaccaaagtagagtctatggtccataatgacacattggcggctataactgcctcttgcgaagtgtccgtgacgcgtcctttgatggagaggctctgtgcctgcgtacggagtacggagagggcaagcaatagtaaaaaaagtttggttttcataatcgtttgtattagtctgttactgttggatagggatgcaaaagccactccttccgttaaggaaagatgttgaggcttgtatgtcagttgtttatactttcctcgtctgtccgatgaaagtcaggaatgcatgaaggaataaatctcgtacatcagtgtcgaaactttgacaatcgtaagtccgaagaggagtccgaaggtaatccataatgcagtctttgcgtatctcttcatgaaccgtcttttttaagtttgttatatcgttctgttatttcttctatactgatgctgagcagctccatgctgcggaacatgtcggcaagctggttttcaaaaaactctttcttctgtattcgcatcactttcttcaccgcatctttggagaggtagaaccccattccccgttccgggtagatgatgtcctccgtctggaggtattcataggccttcagcacggtgcgcgagttcactgccagttgtgtggagagctccctcacggataccacccgctcttccgcccgccattcgcgggtgagaatcttgctgaaacagaagtctacaatctgctggtatatcggcttgttggtcttgaagtccataggctacagttgtttttctttgagcaggaagtagctcgatgcccatgaaccgagcagcacactgataggagccgcataattgcagaaagtcacgatggcttgtgcaccggccgacagcggatagttggtgtggggccatgtggcaatgttatccatccagtatccgtccgctctggcttcgggcatgagggaggccacaaaagttacaattcctatgcagacggcaatggagcctacaaagatggtgaaacttttcagcaggacttgccggctgaaggcgaagtatccgatgaaggcggaagcatgcaggattacataggtcagtatctgggtgttgtgtatccggaacatcgtgatgtgcgttgcaaaatactgcaggaactcgctgccgcttaaggacagcagacctttgaggcaggctatcagcagactgcagaataggggaagcagcagcaggtattttatccagatatgcaggaacttctcgaatgccgatgccggcagcagtatatcgagagtggagctgtgtttgctgaaatttgtttccagcaggcagggggccatgaggataaaccatagtacgtagcgggagaattcggtggcagaggtatgtttgccgtagtaacttccaccgcggtttatgtcgtagaggatgcacaggatgcagatgaacgatacgacggctgccgaccaaagcaggtgtctgccggtctcattccttttatattgttccagtagcaggaagcgtttcagattaaaagttgcgttcatagttctgtttgtatgatggattttcattgaaacatgctctttatcttttccggttgttgcagcaccgctttatacagcagctcgatgtccggtgtgttctcttctccgtcctcgttgggaatgatggagaaataacccgatagattctcttcgctgtagatgctttcttccggcagaatgcttgtccgggcaaagagaagccggttactgatttcgtccagcgaacggttcagtaatatttcgcctttgccaaggatgacgagatggtccagcagattctcgaagtcgtgcgcctgatgggtggagatgagcagcgtgctttcatcgtccatgctgcggctgatgatacgtttcaaggcttggcgggaggtgatgtccagcccgtttgtcggttcgtcgagcaggatgtatggagtatgcagggcaaaggcgtatgccagcattgccttcttctgttgtccgtaggagacggaagagagtttttgtttccggttgattttcagctcttccaggttcagcttgaattcttcctgattgaaatgtggatagaatacggaatggcgtgcagcgaagctggcaatgctttcggtaggcatctgcaactcttcgggcaggaagaagtaacggttcaacccttcgggctgtctctctgccgtgtttcttccgtctatgctgcactttccgtttttgggaaagagtagtccgcagatgagatgcatcagcgtcgttttgcctacgccgttttctcccagaagtccatatataccgtttcctatttccaaagatatgttgttgaaaataagtggattggacttgtatccgtagcttgtgttctctatcgttatcataactttattagtgttgtactgatgtacaacactgcaaacgtagggtaagttatggagaaaagcaagggaaagagatacttattaacttcttttagcggttgtgcgcttgccgtttgcttacagcatcttcaccagtatgtcccatacagccaccatgtggcaggctgaaccgcccaatacaaagaaatggaaaaccgaatgcatgtaccgtgccttgcgcaaggagtagaaagcagctcccgtgatgtagcatactccttcggcaataatccagtagcaggctgtaggggagagggcgaaaagctgcttgaatactaccagtacggacagtcccatcaggatgtaacacactgtttccacgtaactgtgctcctccatcttgcggaagctgacaacagtgccgatgatggcgcatagccagacgaagccgaacagtccccagccccaaccgccgtcctctctcaatgcaatgagtgtgatgggggagtaactgcctgcaatgtgccaatagatggctgcatggtcccaatgccgcaagcgccgtttccacggattatgatgtttcagggagtggtaaagtgtggaggcaagataggagccgcccatgccgaacagatagagccatacgccgcatgctgcccaaaggttctgtgcctggtagcattttatcaggaatagtgcacttacaattactcccatggcaatgccgatgccatgggagatggaattgatggtttcttcttttttactataaaatagtccgttacgctttcttttcatcagtcgaagcatccatagcatgtgggcaacagtttacggtctcccaacgtgttgtctacacgtgccacgttcacccagaacttgttttcgcgcacgctttctatcgggtaggctgccttttggcgggtatagctgtgctcccacgtgtcggctaccacttcgtattcgggatggggggcattcaccagcacgttgtccgtcttgtcggcttcgccgttcttcacctcttgaatctcgtcccagatggtcagcatcacgtggacaaagttgtcgagttcggcaaggctttcgctctccgtcggttcaatcatcagtgtgccgtgtaccgggaaggagagggtaggggcatgatatccataatccatcaggcgcttggcgatgtcgttttcgctgatgcccgtctcttcgtgcaccttacggcattccaatatcatttcgtgtcccacgaagccggtagcaccgcgataaacaatgccgtatgtatccttgaggcaggctgccaggtagttggcgctgaggatggctatctttgtggcccgtgtcagcccttctgttcccatcatgcggatatagccgtaagtaatggggaggatacctgcactgccgaaaggagctccggacacctggttggcggcattgccgaacaatttgtgtcccggaaggaacggaaccagatgctctgccacgcagatgggacctacgcccggtccgccgccaccgtgaggagaggcgaacgttttgtgcagattcaaatggcagacatccgcaccgataaagccgggattcgtcaagcctacttgggcattcatattggcaccgtccatatatacctgcgcaccgcaggcgtgtatgatgtggcagatttccacaatttccgtttcaaagataccgtgtgtggaagggtaggtgatcattagggcggcgaggtccgccttgttttcttccgctttggcgcgcaggtcggccatatccacattgccttgtgcgtcgcaggcgcaggtcacggtggtaaagcctgcctggatggcagatgccgggttggtgccgtgtgcggatgccggtatcagtattttgttgcggtgcccttgtcctatgctttccagataggcgcggatgacgcgaagtcctgcatattcgcctgccgcaccggagttgggttgcaggctgacaccggcaaagccggtaattatcttcagctcttcactgaggttgcttatcagttcgcggtaaccttcggcctggtcttcgggcaccaggggatgcatgttcatgaattccggacggctgagcggcagcatctctgcggcagcgttcagcttcatggtgcacgagccgagggaaatcatggagtgtgccagcgagatgtccttgcggtcgagacgcttgatgtagcgcatcatctccgtttccgtatggtatttgttgaatacttcatgtgtcagataggtgctttggcgtttcatctccgcgctgatgctgcttgccatgggtacgtcgcttgccttttcccaatcccttccggcggcaatggcaaagatggagagcagtacgttgacggcagtgatgtccgtagtctcatcgatgctcatacctacgtccccattcttgaaataacgcaggttcacttccttgctcaaggcgatggtacgtatctgctgtgccgaaatggtgtcgggcagtgcaaagcggagcgtgtcgaaatattgtgcattgacctgcttgtaccccagtctgttgatgctcttttccaggaatacggcaatgctgtggatgcgttccgcaatggtgcggatgccttccggaccgtgatatacggcatagaagccagccatcgtggcaagcagtgcctgcgcggtgcagatgttggaagtcgccttttcacgcttgatgtgctgctcgcgggtttgcagcgccatgcggtagcacagcttgccgtatttgtctttcgaccagccgatgatgcgtcccggcatattgcgcttgtactcgtcgcgggtggcaaagtaggctgccgacggtccgccgtagaacatcggtgtaccgagccgttgtgtggttccgaagacgatgtcagccccccattctcccggaggggtgagcagggcgaggctcagaatgtcggcggcaacagccactttgcagttggccgcatgggctttttccacgaaggcgcgataatcttccacgttgccagcggcgttgggatattgcagtacgcaggcgaagatgtccggtgtgaattccatttcatggtattttcctatacgcagctcgataccttgcggaatggcacgggtagtcattactgccagcgtctgcgggaagacggcttcgtcaacaaataccacgttggcgcccgatttctgcatgtcgcgcggacgcagggcatacatcatcgtcacggcttcggctgcggcagttgcttcgtccagcagggagcagttggcaaggggcatgccggtgaggtcgcatacggcagtctggaagttcattagggcttccaggcgtccttgtgagacttcggtctgatagggggtataggaagtgtaccaaacggggttctcgaatacgttccgttggataacggcaggagtgatggtgttgtaccatcccataccgatataggttgtgtagagtttgtttttggcagccagccctgcaatgtgctgtccgaattcatactctgtcatagtcttgggcagagccagcggttctttcaggcggatgttggcaggaatggttttatcaatcagctcgtccaggcttttcactcctattttttggagcatcttctcctcgtctttttcgctgatgccgatgtggcggtaggccaataggtcgtttttcatggctgtaatgatttaaaagtttgctgtatatttaccggaagaacggattctccgctttctctattcctatggtagtcggtgctccgtgtccgggatagacaatcgtgtcgttgggcaggatgaacagacggctgcaaatatgttctatcagttcgtcgaagttgccaccggtgaggtcggcacggccgatgctgccttgaaacaacacatcccccgagaacatgcagtggtctgccgcgcaataatacaccagactgcccggcgagtgtcccggtacatggatggcttccagtttcgtattgccgaaggtgatgatgtctccgtcgtgcagataagtgcccaggggcacgggggcttcctgcagctggaagccgaacatgcggctttgtttcggcgcttcgtcaatccagaactcatcggcctggttggcttcggccttcagaccgaactctttcagcatgaaaggattgccgaagatatggtccagatgcagatgggtattcagcagatgtttcacattcagcccattcttggtgatgaagtttttcaaggcctgcttttcttcctcataaaagcagcccgggtcaatgacgaccgcttcattggtttcgtcccaaagcacataacagttctccgggaacatattaaattcgaatctctttattttcatattatgtatttagatttctaaacctcaactatctctcaacaccctacatatactactttctttgtctcgaagaactcctcttcaaagaactccttcaggtcccacaacgtggtcttgttcttgacgggcatggtttcgttccccaattcgccccccttgaggcaaatcagtccgttgggcaatgcgttctgctgttttggggagatgttcttacggataatcttcagcaggtctgtcagcggcatcacggcacggctcaccacaaagtcgaacttccctttttcctcttctgcacgggcatgacggaaggtggcgtttttcagcccgatgctgttggctatttcggaggctacgcgtactttctttccgatgctgtccaccagatggaattgtacttcggggaaaaggatggccagcgggattcccggaaagcctcctcccgtgccgaggtccataatctgtgtccccggcctgaagtggattaccttggctatgcccaaagaatgcagcacatggtgttcgtacaagttctctatatctttgcgtgaaatgacattaatcttagagttccagtccagatagaggtcgtagagtgcggcaaactgccgtttctgttcttccgtcaggtccgggaaatatttgagtattaaatccattgtgaattttatattgatagacaattgattacagttcctattcgccgtctgtttttatagcgctgcttaatacaatgaatttaccgttcatcagaggagctatgtcctcataagacaacgtgattttggttgctcccattacgtatggggcaatttcatatacattataatagaaggtgattcccgttgggtccaggtagaaattctcgatgggctccagatcgccggtggtggcgtagcccatgtcctccagctcttggcgggtgctgacgttgttgtctgccatcagctgtttccaaagcaagtcggtcagcgcttccttatagtcgccttcaaagaggtcgtccaggcggatggggcttagggtctttaggtcgaggttgaggaaggtggacatatagatgccgtgtgcgccgccggtatattcgttgtaatctatacggtaggtcagtatcaaggtattgcacaactgcacatggctttcgattcctttataataggaataccaagctcctatgctttcttcgtcctccttgtcctgctcatcctttttgtacattggctccaggtcattgcggtagtcgctgacatatttctccgtatatttcttgacagcttcttcgggtgtcatcgccatgtacttgtcgccgaagcaggcggagaggaagaaggcgttcagactgtctttcagcctcacgtcggatgactggctggcgtaggcaaagttgaggatgaggttgcaggccggcttggctgtgtctccgaagagatgtacggtttcgtttacttgtatactgtcgaactccaatgcgtatgcgtttttgttcacggtgttaccgcaggaaaagaaaaagccgcttgccgcaagcagaaggacaagtaggctgacagtttgctttttcatattgaatttcgtttataaatcaacatatcaatcaaaaaactttatcgacaaatatagaacttattaacgaactgcacacataaaaaaggaaaaattaattccggcaaacggttaaaactttctatctttgcagcgcttatgaaggaactccgttacatactggctgtactcttttcctcccttatcattataagcggagtggggatttctgtagttcagtattgctgtgccggatgcgagacgacgcaaagctgctgcacttccggctgttccaaatgccataatacacatcgtgcctcacggcaaacatgcaaggataccggctgtacagccgtctactacaaggtggatttcgtgaagcatgcacacgagtctgtttcgttcgtgccattccttacactgttttgcgagcaactgccgctgtttgatcactccttgccgcaggtggcttgtactccgagagttgtttcaggagcaccgccatatgtcgtcggctcgcgtcattatctggcgctctattccacgcttctcatttagtgttgttttatacggggcaatgacctggattgcccggagggaactgtttgttttttaatcacttctttaagtataaaacagaaatgaaatatagtttgatagccattcttctgttctctttcaccgccttgcaggcgcaggtaaagggaacggtaaaggataatttgggcgacccgattgcgggtgccaacctcttctggcagggaaccacccaaggtaccaccacttcggcggatggtactttctccttgtccaaacccaatgacaagcatatgcttgtagtcagctttatcggttttgagaacgatacgatacacgtcagtaaccgcaatgagacgctcgacattgtcttgcgcgaaggggtggaactgagcgaggtgaatgtggtcagccgtaagttgggcaccatgaagctgcgtaacagtgtgatgaacgaagatatgataagcagcgccgagttgagccgtgccgcttgctgtaatttgggagagagttttgtgactaatccctcggtggacgtcacttactctgacgccgccaccggtgccaagcaaatcaagcttctcggcttgtccggtacgtatgtgcaaatgatgacggagaatatccccaactaccgcggctctgccgccccctacggactgggttatgtacccgggccatggatgcagagtattcaggtgagcaagggcagttcatccgtgaagaacggctatgaggccatcacgggacaaatcaatgtggaattcaagaaaccccagttgcccgaagccgattggttttccgccaacctctttgccagcagcaccaaccgttatgaagccaatgccgatgccacggtgaaactctccaaacgttggagcacctctttgctggcgcattacgagaatgagaccaaagctcacgacagcaacgacgacggctttgccgacatcccccgtgtggagcagtacaacctctggaaccgctgggcatacatgggcgaccgttacgtcttccaggcaggcatcaaagtgcttacagaagaccgcaacagcgggcaagtcagccatggcaaaacgtccctggcagacccttataagataagtataggtaccgaccgctacgaagctttcaccaagaacgcctatatattcaacaaggagaagaataccaacctggcattgattctctccggctccctgcacaagcaggatgccttgtacggacggaaaatctacgatgtggaccagcacaacgcttatgcctccttgctgttcgagacggaactgaccaagcgtcaaagcctttctgccggactgagcttcaactatgactcctacgaccagcactaccgcctggacaatgacgccgcacagcctttgacgaagaaattcaccaaagaagccgtccccggcgcctacgtgcagtacacctacaactgggacgataaactggtgctgatgggtggcatccgcggcgaccatagcagcgagtacggctatttcgtcaccccgcgtttccatgtgaagtacaatcccaacgagtatgtacatttccgtctttcggcaggaaaaggataccgcacgaaccatgtgctggccgagaataactatctgctggcaagtagccgccggatagacatcgccaaacgtcttgaccaggatgaggcctggaactatggcgcaagcacttccgcctatattcccttgtccggcaaaaccttgaacctgaatgcggaatactattacacggatttccgcaagcaggtggtggtggatatggatacggacccgcatgccgttctgttctacaaccttcacggccgttcctattcgcaggtagtgcaggtggaggcaagctatccgttcttcccgggtttcacctttaccgcggcttaccgttggacggatgccaaaacgaattacaacggagagctgatggagaaaccccttaccagcaagtataaaggtttgctgacggcttcttatcagacacctttgggattgtggcagtttgatgtgactttgcaactgaacggtggcgggcgcatgccggctccatacgaactgacagacggcaactggtcgtgggaaaggcgctatggcggcttcgagcagttgagtgcccaggtgacgcgctatttccgtcgctggtctatatacgtcggtggcgagaacctgacaaacttcaagcagaaaaaccccatcatcgatgcttccaatccctggggaagcaactttgatgctacgatggtttggggacccatgcatggggcaaaagcctatgtaggtgtccgttttaacttgccgagaatataatattatttattaaatcaatagcgaaacaatgaaaacaagaagatttttaatgactttggcagttgtactcttctgtgcatctgccgcaatggcgaaagacatccgtacagccgtgttcaaggtagcacagatgaagtgtgagaactgtgtaaggaagataaacaataacatccgttttgagaagggactgaaggacttccacacagacctgaagacaaagacggtaaccatcacgtatgatgccgacaagaccaatgtggaaaagttgaaaaaaggtttccaaaagttccattatgaagcggagtttgtcaaggaaaccaagcaggacgataagaagtaattgaacaaactgctcattccggttgttgctttattaaagcggaacaacaaccatctaaaaaataaatcgaatgagcaatataattactaaggcacatcccgtgccggatatgcacagcacgggattgcgcgtcgtcggtgcatggctttttgccatcgtactgatactgttttctacagtctttgtgcatgtaccctatacccgtgaaatacagatggtactggcaattccggtactgctgtttttcggcgctcctttttataccggtgcctggaaggggacccggtcgggccgcaacaatatagaccgtctggtggcgcttaccacctctgtggcttttctgttcagtgtgttcaatactttcttcccggattattggctgggcatcgggctggaaccgcatgtctattatggggttgccgccgtcatcatcgccttttccctgaccggcgagtttatggaggaacgtgcccggcgaaatgtgtcggcggctatctgccggttgggaggctggcagcataacgcagcccgcgtactgccggagaagcaacgcattgacgaccgcgttgccgagctttttgttccggtcattctcatcatttccctgcttaccttttttatatgggtgttcttcggaggcatagatgtagtgtcacacggtctgtttgccgctttgtccgtattggtggtggcttgtccgtgtgtggtagggctggccactccagtagctttggcggcgggcctcaataaagctgcccgcaatcatatcctaatcagggacacttccgctttagagcagatgcgcaatgtggatgtggtggtattcgacaagaccgggaccctgacagaaggacatcctacggtaataggctggctgtgggcgcaagggcaggaggagcattataaagatgtattgcttgctgccgagtctacttcggaccatcctctggcagaagcaatcgttacggccctggaaggggaggagcaggttatccctgcccacctggacggttttgaaaacattaccggaaaaggtgtcagagtggcctatcaaggtgcggaatattgggtaggaagccataaactgctgaaagattatcaagccaatttgtcggatatcctggccgatatgctgacacaatatgaatcggacggaaacagtattgtctactttgggcgtgagaacgatttacttgccgttattgccatcaaggaccagttgcgggtgacttctatggaagctatccgggaactgcgtacccaggacatcgagatatgtatgcttacgggagacggtgagcgtacagcttcttccgtggccggcagtttgggtatcatgcgttttatggccgatgccatgcccgatgacaaagaggatttcatccataagctgcagcttcagggtaaaacggttgccatggtaggtgacggcgtgaacgatgcgcaagccttgagctgtgctgatgtaagcattgccatgggaaaggggaccgatacgttgatggacaccgccatgattactctcaggacttcagacctgctgctgttgcccaaagttttccggttgtctcgccagactgtgagcctcatgtaccggaatctgttctgggctttcatctataatacagtgggtatctttgtcgcggccggagtactctatcccgtctatgacatcctgctgagtcctgcgctggcaggtgctgccatggctctttcctgtgtatccgtggctttgagcagccttcgtctgagttccaggttctgatggctgtattctcagctgttcctatactccagcggactcatgcccatgtgcctcttgaagtattttccaaagaaagaagcactggggaagttcaaggaataggcaatctcctgaatggtcatgttggttgatttcagcttggctttcacgtctacgatgacgacgtgggcgatgatgtccaatacatttctgccggtcacttgcctcacggtggtgctgaggtgttgcagggagatgcccagtttgtcggcatagaattgcgcgcggcgttcgcgggtatagttttcgatgacgagctgcaccagttcgcggcatatttcctctttccggctcttgttccctttttgcatctgcggacggtggcaatacattctgtctatgccgctgaggagcatgctcagagtgctctgtgccattttggtgtcaggaggatagggaccggtcgtgatgcgtgcccataaggcaaaatagtccttgaaataggaggcgacggtagggttgatagccagtaccggatactccagtatgttggagaaggagcttaatgtagactggatgaggttgactccattgaggcaatgggaagaaaaccccacgaatcccaggcacactttttccttttgttcgtaaaactgtatgatggttccgggaagcagggtgataaaatccccttgcttgatttccgtatccatcaagttgatggataccgtgatggaaccttctatgcatagtgcaaagatgcatgctttcaggcggcacgactgtttgtatatgtttagaatgtcttccgttacttcagtccatgcaatcatgtctactggcaggtcgacttgaggaaattccatacgctttgtcgtttagagttcgcacaaaggtaattcttttccgggaaaaagtaacggaagacattctgtttttaaaatgaaatgttctttttagaattcaaaaaagtactatatttgcttgcatgaaactggaaatatcagattggaacatgattccttatgccggggcatggagccggcagacggaatggtttgacgcacttgtacacgccaagcaggcaggagagtgctatgtcaatcatattgtgctctgcgagcatccccatgtctatacattggggcgtagcgggaaagaaaggaatatgctgctgggagaagaacaactgcgcaggataggggctacgctctatcatattgaccgtggtggagacattacgtatcatggtccgggacagttggtctgctatcctattctgaaccttgacgacttttctttggggttgaaggaatatgtgcatctgctggaagaggcggtaatccgtgtttgtgcttcgtttggcatcgcggccggacgcctggagaaggcaacgggcgtatggctggagggcgatactccccgtgcccgtaagatttgtgccatcggcgtgcgcagcagccattttgtcaccatgcatggattggcactgaatgtgaataccgatttacgttatttcagctatatcaatccctgcggattcatagacaagggtgtcacttctttgcagaaagagctgggacacgaggtgccgatggaggaggtgaaggagcgtctttgcaaggagctggtaaatcttttgtcatgaactatctggcacatatattcctttccggttcgaacagaaaagtacagttgggcaattttgtaggcgatgctgtaaagggaagctcctataagaattatccgccggatatagccaagggtattcagcttcaccgcgctattgacgactataccgaccgtcatccggctgtctgcgaggtggtacataggcttcaacctgaattcggacgctattcgggggtattgctggatatttatttcgattatttgctggcttcccgtttcgagtcgttctccggagtttccttgaggaggtatacccggactttctatctttccctcctcatcaattaccgctatcttccggtacggttcaaacgtttcatctggcattttatcctgaccgaccgtttgcggaaatacgccactctgaacggaataagagagtctttgaacatcatggtggaatatcatcatattgatatatccgtagacaaggctattcgttaccttgaagagcacgatgaggaactgtttgctgtgttccagccattttttattgaattgcagaggttttgtgctgaataccggcatgattataaggtatagttttaaggacgaagaagaaattcatatcgtgtcggcaaggaattaatttcctgccggcacgatatttgttttttgtatcacacgttattgatttcctgcatgacatgttattgatagcttgtgccctgtggaatcagcttcccgtactccgcttctctcttgccagtaccgagatgatgtaccctcccttgctgttcaccttgctccagttcgtcccattgaatattttccagacgtagtttcccagcctgccgtagtccgataacttcagaatcttcctgatttcctcccggtcggtgatgtagagcttttccagattcagcatgaggcattccaggttgtgcgtattcctgttgtaggcatatccgggaatgtccagatcaggattcccctgcgctcctccgctttcccccgggggagtaagagggggaagtgctttactttcttttgctttgctttcttctactttgctttgtttggaattgcatgcattttcggggaaaatgtccgcatcctgcgtacaattttcccgtttttgcgtacaagtcttgtccttgtccggtttatcttcctccgtctctacctgcagatagggtagggtggtgaggtccctttttcttcttttggtggcttccagccatattttctgtatctcggtagaggtcagtaccccttgctccttataggttttggggtcgaaaaaggctttctccaccaggatgtccacgattccctgcatctcctgctcgttgatgtcctttcccgccttgtttgtgaacagtgtgcattgctccgcgttccatttcaggtaatatccgttttccttgtgtatcttgcacagcagtttcattaccgccgccgttcctttcagtccgaacctggcttccaccagttccactgctatctcttcgaatagatttactttgagggggaagtatagcattcccccgtacatcatggccattatttttagtgtttaatgattagtgattaatggttaatggttagcatatggggctccattcgaggaagttctccagctggaaagttttccatgcctgcagttccacatcccagaaggctatggtgcttgtcactcttgtgatgtcataatctcttctgaagtcagccttgtagggcagtaaggtggctttcgccagcctgaatgtcccgtcctgcttgtggtaggctatgagtgcgtgtccgtattgcatgtggtctatcaggctttctatccgtcgggccatccatgtggcgcatgtttccgtgtagttcttttccagcatgatacgtattttccataggtttctcagtgcttcgtgaagtgaagcgttctttgtcgactttctcatcttgttgtctttaaaattaataattgtattagtttggcaggaggtacgcttatatataaaaaagatgccgcattcgttgagaaagcggcatctataggcggtgtggcttcatccttaccaaagtggcggcaaagataagtggtttattccttaagttgtttatatttaattattgtcaataagtttcgtggtttctgcccttttttgttttattccctatatttctcctgctaccttcatttcccgccacacttcaccgaactcttgtattatagtgttttctgacagtcttttatagtctggcgttctgaagtcgaaatgtgagtatgcccattgtgccaatgccttgttgcttgtcggcttttcttctataaagtatcttgattttttccataggatgatgtctttaatgacttctttcctatattgtggcagtattcctataacctccccgcttgagggacgtcctactcctgctttaggagctgatatgccgtgctttacatccgttttaagggtgtctctttttgttttttttccttactttggagtgtctcttttgccttcattttctaatgtttttgggttaataattaaaattactgtagtttgtaaaataaatgcaaaggtatatcaagttttttgtttttgtggagtaaggatggagataaaaagctgggttttatctttatgatgggttaatgcgttgatatataaatggaaatgactttgatttggaagtgttttttaaacgttcgtttaatggacgtcaaatttcaggaaatgaaatagggaatgagttaataaaagggaatggaaattttaaatattaaataagatacttaatatactgaattactgtagattaaactgatatacgatgggttttccaaaatatttttattaaacattttgaggatataaaaaacagtcttatctttgcgtccattaaacgaacgtttaaaaaacgctttttgtttgtaatccgttcgtttatagtctcttaccagaaggtaatgacgaactgcaaaaaaactgttggcaagaagggcacaatgcttgctgtattttacataaggtgctcgcaaatgattggataccaggtatataccgagggttcaaagccctagaggaacactcttttgtgaacaaaacaacgaaaatggaaacggataacgaggttgaagtctggcatgccatgcgtgccacataccgcagagagcttgatgcggtgcatcttctcgagaaggagaacctcggctgttttgtccccatgcaatataaggtaagtatccgtaagggtaagaaagtccgtactttggttcccgtcatccgtaatctggtttttgtccatgcacgtccttccgacgtacagcgtgttaagtctcaaattacttatttgcaatatataaccgatactcgcagtggtcagaagataattattcccgaccatgagatgcagcgcttcgtcgccgttgccggaacctataacgaccatttgctttatttccagcccgaagagttgaatctgtcgaaaggaactagagtccgtattacgggtggtgactttgcaggtcaggagggtatttttctgaaagtaaagggtgcacgtgaccgtcgtgtggttatagagatacaaggtgtcattgctgttgccatggctaccatccatccggaccttatagaagtgatcggctgaattataattcataatttacaactcatagtttacaattcataattcaaaaaatgtcctcctcccttttcgaagaagcaattaatctccagcgtgctgcgcacgaactgatgtatttaggtatggacggtagtcctatctatagtgatgacctttcccgccgcaacggtgaggtttaccgcttgactgcggctttgtatggttccagtgctcgaggtactactacggaagaacaggcaaacgtctgtcttgctctcttgatgggttataacgcatcgttcattgaccatggcgagaagcaggatcacctccaggagatattaaaccgttgttggaatctccttgatacccttcccgcttcgctgttgaaactccgtctgcttactgcctgttatggagaagtgttcgatgagctcctggtcgacgaagcccggaagattatttcttcctgggactccgcatcgctcactgccgaacagcaggaagctgtcgaggaattccggaatgtagttgacaatccctatccgtgggaatatcttgaggactaaaacaggtgaaagttttctcgcaaggcaaaaaaaaatggagtggagaatgtaagagacacgggaaaagttaaagacatatagagctaaacatacaagtgatatattcatgtaatgagtgaaaaggattccacgcattgtattacgaaaaatagcctccagagaaacggattatatggcatttctgccaatgaatatagtaaaataacttattatttgattaaaaatataactcaaagtgggttatcccccctttagtagatgcccaatatctattgaatatccgggaagcgtggtactaactctttcattactacgcgaagtaataaatataaatcacctttggttccaccttcccggattagtttgattttttcagtgtgtgacatataagaatctaacaaacattaaattatgcgtcgaatcttatttctgattttatgtctttttattttcttcggttctgcctatgcccagcgcatgtccgacgagcaagtggttgaatatgtgaaacaagcacaggcagccggaaaatctcagaagcagatgactgccgaactgttgcgccgtggtgtgacccgcgaacaggtgctccgcatcaaggataaatatgagaactcgggtgttgctgtcccgggttccgaagctccctcacagatgcgcaagcgttcggttgctgtgggagaatcctacgaggctgccgaactggatgaccagaaagcggttgttgatgagagacttgaaagccagtccgcccctgaggctgccggcatacagattttcggtcataatctgttccagaaccgtaatctctcctttgaacctagtgtgaatctggctactccggcaaattatcggctggggcccggtgacgaggtgatcatagatatttggggagcttccgagaataccatccgccagaccatcagtcccgagggtagtatccaggtgaaagatctcggtcccgtttatctgaacggcatgactgttaaagaagccaacgcttatctgcaacgggaactgtccaagatctattccggtatcggagggggggatcccaattcacagatccgtctgactttaggcgatatacgtaccattcagattcatattatgggtgaggtcacggtgccgggtacttatacactttcggccttttctacggttttccatgccttgtaccgtgccggtggtgtgaataatatcggtagcttgcgtgacatccgtctggttcgtaacggagagacgatagagcatttggacgtctatgagttcatcatgcagggcaagatgaatgacgatgtccgtctgcaggagggcgatgtgattatcgtgagtccctaccagtcgttggtcgagatagtaggtaaggtgaaacgtcccatgtattatgaaatgaagcctgccgagacggttgcttccttactgaagtatgcgggtggctttatgggagatgcctataagaaggctgtacgcatcatccgtaaaagcggacgtgaacatcaagtatataatgtggatgagatggactattccgtattccgtttagacgacggtgacttaatgacggttgacgccgtactcgaccgttttgagaacaaggttgaggtcagtggtgccgtctatcgtccggggctttatcagttggacggtgaggtgaatacggtgaagcagctgataaagaaggctgagggactccggggagatgctttccttgcccgggtccttctggaccgtgagcgtgaagatcttacgcacgaaatggttgccgttgatctggagggtattatgaacggtacggtttctgatataccccttcagaagaacgatcatctgtatgttcccggtatccacgacctgaaggagagcgagacggtctccatttatggtgaggtgctcaatcccggtactttcctatactccgacaacttaacgatagaggatatgattgtccaggcgggaggtcttactgaggctgccgccactacctgtgtgagcgtgacgcgccgcatcaaggatcccaagagtactgcctacagcagcaagcttgcggagacattcacctttgacatcaaggacggtcttctgacgggtgccggtagtttctacctgcaacctttcgatgtagtccaggttcgtcgcagtcctgcctaccaagttcagcgcatggtgacggttgcgggtgaggtgcttttcagcggcagctattcgttgttgaaaaagaatgaacgtctgagtgatgtgataggtcgtgcaggcggaattactccggcggcatatataaaggggggacgtttgattcgcaagcgcaatgatgaggaacgtcggcgtgagacggatgtgcttcgcatgacacagggcggtgaaggttccgatagcattgcagtgaacaagcttgccatctctgagacttacgcagtaggcatcgatatggaaaaggctctgtttaatccgggaagtgactatgatattgtcctgcgtgagggagatatcgtttatattcctgaatacgtcaatacggtgaagatcagcggttcagtgatgtatcctaatacagtaacctgggagaaagatgccaagctgaaacattatatcaatatggcaggtggttatggcgaaaatgcgaaaaagaagaaagcatacatcatttatctgaatggtacggtagcccgtgctaagaagagtgacagtgatttaatccagccgggttgtgagattgtggttcccacgaagtctgagaggaagcgtctccagctttccgagattatgggtatgagctccatgactgcgacgattgcggcgatggtggctacgttgactaatgcttttaaataagaaacaagtggaagatataaaaagaaaggatgctgatatgaatgacggacaacagaataaacatccacaggaagaggagattgatttgcttgagcttgctttgaaggtctgggcagagcgcaggtggatattgaagtgttgcggctatgcagtgattgtgggactggtgattgcttttagtattcccaaggaatatacagcaagtgtaatgattgctccggaagcttctgataataagggaggaagcctttcctcactggcaagtttggcaggcattagtctgaatacatcttctgggtctgatgcgatttatcctgatttatatccggatattgtgagttccactccttttgtgacagggttgtttgatgtccctatccgggatatggatggggagataaacaccacactttatgattatatggacgaataccagcgtgtgccatggtggtcgtatatcatatctgccccattcaaggctttaggctggattgtttctctgtttaaggaatcagaagaagaggtggaaaaattagatccttttcagctgacaaaagagcagactgatattgtgaaagcactgagtgatcatataggtgtttcggtagataaaaagaccggggttactacaatttctgtcacgatgcaggatccccgtatttcagcatgtctgacagatactgttgtaaataggttgcagtcttacattattgattatcgtactaataaagcccgtaaggattttcattttcaagaaaagctttttgaacgtaagaagaaagaatatgagatggcgcaggagaattatgccaagtttgccgatgccaacaaaaatatcatcctccagagttatcgtgccgaacaagtgcgtctagaaaatgagatgaatcttgcttatcaagtctatacatccgttgcacagcaattgcagatagcagaggcaaaggtgcaggagataacccctgtttatacaattgttgagcctgctactattcctgtaaaggcgtcaaaaccgagtaaggctatgattctgataggagtcatttttctgacagggatgggatgtattggctggattcttatgggaaaggatttgttgtatagcatgaggaagaaaaatattccgaaggtttaaggtgataattctgtctattgcatgcagggatctttgagagataagaccgcccgtggagtagggtggagttttattgacaacatagccaactcgggcataacctttctggtagggcttgtcttggcacgtttattgacaccggaagagtatggggttatggccatgattgctatttttatagcggtgtccgattcgattatagacagtggcttttccaatgcgttgatacgtaaggtggatattgaacgtattgattataatactgtcttctattttaatcttatagttagtatttcactctatattcttttattttttgtttctcctgctattagcgcttttttcagagagcctgttttggttgatgttatgagggtcataggttttgtgctgattgtaaatgcattggctattattccccgtaccatatttattcggaatataaactttaagacacaaactaaagtttctttgatagcttccatcagtagtggtgttgtcggcatagggatggctttatctggaatgggagtctggagtttggttggacagcaattgtcccgtcagctgttgaatacggtttttttgtgggggtattgtaagtggaagcctgtttttgagttttctgccaagagtttcaaggaaatgtttggttttggttccaaactacttgtttccggattgttggatactatttataaggatatttattatttggtcataggtcgtttctttacttcatttgtattggggcaatatacccgggccaaacaatttaatactatattttctagtaatctgaccactgttgtccaacgggtcagctatcctgtgcttagttccattcaaaatgagccggagcgtttgtgcggagcttataggaaagtcataaaatcaacgatgttggtgacgtttgcatgtatgcttggattagcagcgatggcaaagccgttaattataattcttataggagagaagtggctacctgctgctggctatttgcagattatttgcttttcgggcatgctttatccgcttcatgccatcaatctgaatatcctgaaagtcaaagggcgttcggatttattcttgaaattggaaataataaaaaagattcttgccataggtcctattgcattgggggtatttggggggatagaatgtatgttgtggggtagtgtacttaattcttttgttgcttatttcttgaatagttattattctgccgatttgataaactatcctactgtgaaacagataaaggacatactacctacattttgtgtatctatagctgtggctgctgccatgtggggattgtctttttttagattgtccgtttacctgcttcttcctttacaattactgttaggagtttctcttgcttatctggtttatgaaaggactgctcttccggaatatcttgaattaagacaagtgactctttctctcttaaagcggaaatcatatacttaaataaaaatggaaaataaagttattacagtaacttctccgttacttccttccttggaagattttataccttatttggaagatatttggaatcgtaagtggttgacaaataatgggtattatcataaagaactggaaaaagccttgtgtgagtatttgaaagtaccttatgtcagtctttttacaaatggtacattacctttgatatgtgcattgcaggcattgcgcattaccggtgaagtaattactactccttatagttttgtggctactacacattccttgtggtggaacggcatcaagcctgtgtttgtggatatcgaccctgtcacttgtaatattgatccggataaaatagaggctgccattactccaaaaactacggctataatgcctgtccatgtttatggtaagccttgtgatacgtcacgtattcaagaaatagctgacaaatatggattgaaagtaatttatgatgctgcccatgccttcggagtagaagtgaacggtaagtctattttggaggccggtgatatgtccactttaagttttcacgcaacaaaagtttataataccattgaaggtggtgctttgatatgcaaagatgaaaaaacgaaaaggcgtatcgactatttgaagaattttggttttgcagatgaaactacgattgtggctcctggcataaatggcaagatggatgaagtgcgcagtgcctatggtttgctaaatctgaagcaggtggatgcagctattgaatctcgccatcggacagctgtaaaataccgtgaagcattacgtggtgtggagggtatcagttttatggaggatatgcctggcgtacgtcataactattcctattttccgatttttattgatgcggaaaaatatggaatgacacgtgatgaactctatttcaagatgaaaggacagaatgtgttgggacgtcgttatttctatcctttgattagtgaattttctgcttatcgcggactggaatctgctcaacccgaaaatttaccggttgcctctaaagtagccgatagtgtgatttgcttgccgatgtatcataatctgaatgattcagatatccaaagaactttagagttaattgtgaggtaaaaaatgaaacagaagaaactcatgcttttaggaggtattcgttaccttcttcccgtgatagatgcagctcataaacaaggctattatgtgattacagcggattatttgcccgataatattgcacatagatatagtgatgaatacgtaaatgtgagtattgttgataaagaggcagtattgaaggttgcgtgtgagaaagaaatagatggtattatgtcgtttggtgttgatcctggagttgtggcggcttcttatgtgcagaacaaaatgtctcttccttcttttggtccgtacgaatctgtagagattcttcagaataaagataagttcagagagtttttagctattcatggatttaatgtaccttggagtttggctttttcctctttagaggatgctttgtcggatcttgctatattttcttaccctcttatagtaaagcctacagattcagcaggttctaagggggtgactcgtgtagataaagaaaagaatttgaaagaagctttattgcatgcttttgcccattcaatcaagaataaaatcattgtagaacagtttatagagaaagaaggttgttcttcggacagcgattgtttttcaataaacggagaacttaagtttgtctcattttctgcccagcgttttgatgagtatgcggcaagtacattcgttccagctgcatactcatggccttctactatgactatacagcaagagtcagaacttagttttgaactacaacgattgcttaaacttttgaatatgaatacttctgtgtataatatagaaacacggattggtgtggatggcaagccttatattatggaagtttctccacgtggaggaggtaatcggctttcagaaatgattcgttatgctacaggagtggatcttattactgctgctgtgtgtgcctcagtaggagatactattggagaaataaagcaaaaaacttaccaaggatattgggcagaaattgtacttcatgctgataatgcagggcgttttatggggcttgaaatatcaaagagcttttcggcagaaattgttgaagaagatttgtgggtagaggtcggggatgaagtagagagctttgaaggagcgaacaatgctataggaatgttgattttgaaatttgattctttgaaagaattggaacatgctttggctacacaacgtcaatggttgaaggtgaatgtgagataatggaagcaatagggggatactttgagttggaattacataaaggagaggagtatcataaagatgctatttcactgaatacagctcgtaactgttttgaatatatattattagctcgtaattacaaaaaagtttatataccttattatacatgtgaagtgatgttgcaacctttggagaaacatcatatttcttacgagttttattctataaatgagttgttggaacctattggtataacaaaactacttccggaagaagcatttctttataccaactattttggattaaagcagagttgtgtggaaaagttggttaccatttatgggacacaactgattgttgataatgcacaagcattttttgcttctcgtatagatggtatagacactttttattctcctcgaaaattcttaggagtatctgacggaggatatttatacacagactgttgcttaaaccgagatattacttatcattattcttatatgcggatgcagcatttgttacaacggattgatgaaggagctgagcagggttatatttcttttagatataatgatgatgctcttgattatattccaatttctaaaatgtcacgattgacttgtaacattttatgtggaatagattatgaacatataaagaagaaacgaatagataatttcaatattcttcatgaggctctattaaggaacaatttactgaatatagattctttggacttgtttgaatgtcctatggtttatccttattatgtggatgataaaacattacgtaaaaaattaatagataacagaatatatatagctacatattggccgaatgttttgaaatggtgttcggaagatatgttggaatatgaattgactaataatataatagcattgcctatagatcaaagatatggaagagaggaaatggattatataataaaacttttagcttgatgggaaatagtatttttttgagggggtttgagatagaagatgctcttcttatcaataagtggagaaatgattttgaaatccagaaattagtttccacttcgtttaaatatgtttcattggaaattgaaaaggagtgggttaaatcaaaaatgatggataaccgaaaagatatttatttagctatttgtttgaatgacgatagccggaagatggtaggatatgtctcggtcaataatatagattatctcaaccgtacagccgtgggtggggggatagtaatagaccctctttatcaagatggtatcattaggtatgaggtaggaatgcttatccgagaattggtgtttaatcatcttaatatcaatcgctacgaaggtaaatgtttatcagaacatattgcttcaagagtaattatggaagctagtggatataagttggaaggaatatatcgtgaagccatctataaggatgggaagtaccatgatcagtgtgtatattctcttttgagggcagactatgaggaatggatggagcgtggcgattattcattgtccgtatttgccaagaaggtgagacatttaaggaatagttatgctgcgagtaggctgtaaaacgatattatttatttttgtcttgttggaatgtgcattttctggtgtagcttctgataatgagaatcattcatctcttgaggctcagatagaggccatttttaacaagatgaaaatgacaggtctgggaattgcggttgtcaaaggagattctattgtttatgttcattcttggggatataaagaagtaccaacagttaacaatcaaggaatacttttgaagaatgatgacctatttcgtattgcttctgtatcaaaaacctttgtggctaccaccatattgcaacttgtagaagaaggtgttttgaacttggatgatgatgttcagaaatttctcaaattccctttgcgaaatccttcctatagagataagcccataactgtaaggatgttgcttactcacacatcaagcattaatgattcacaacgttggtggtcgcttgacataatcaatcctattatttctgacaactatgctaagtgcttttctgaaactaaacctggtatggagtacaaatattgcaattacaattatttgctactcggtgcggtgatagagggggctactggaaatagatttgacactgagattgatagtagaataatgaagccgcttgatattcaaggtggttttaattgcaatttgttagattcaaccaagtttgttaggctctatcgttataataaggaatcgggggcgtttagagaggacgatgaagcctatcgtccttatagatatcaaattcagactcattatacattaggtaaatctatagggttggtttatcccgattctggtatgaaaataactactacagatttggccaagtatatgatgatgcacatgaaaggtggtactcttaggcaggctaccatactgtcattaagaagtgaaatgatgatgcgtgagaattatgtaggaaagaacaattacggttttgcatttcggcagtatcgtggtttagttcccaatacaacattgtacggacagactgggggcggatttggactgaaaagtgcaatgatattcgaccctaagcatcaaatgggctttgtcattatatgcagcggtagtgcatcagaatatattgatgggtataacgatatacataagccgttaatcaaactactatacaattatttttctgagaatgactgaattcctgtacgaaagtaaagtagctattacaaagccaaaatttgacatctttgtgttggcttttgccgtgctgttgctgatgttcaagtctcaacgtattctgtgggtaagaccaatacccgagattattattgttgtttttggcatagctgtttttttgtttcacttaagattgtatgtcaatcattttagatatacatatattagtgtatttcatagtatggctttgcttcttttcttgttcgcatatgaaactttgtgcgtatccgacttgaatccgatagctatcctagcttctatgtcaacgctgttttgtaccgaaatactgatacttattcctgttcagttcaaaaggcagatactaaactttgtcataaaggtgattcagttttgtgtaggtatttcattggtcggttggatattgttcttgttgaagtttccattgcctcattatacggatgcttcagacccatattactatcacactatctattatttattcaatctgaatggtgatccagacctacaacttgtaccccgctttgccggattttttttagaaccaggacatttgggcacgatgtgtgtgttcttactttgtataaaccgctttcgtttgcgtgaatttggaaataaaatcttgctggcaggggtgttgttctctttgtcacttgcagcgtatggtttgttggtcggggcagtgataatatatttcatccaaatgagaaaaattatttggattattgtatttggaagtctttttgctacagttggtataatatcttatttctacaataatggagataacgtactttatcagatgattttccatcgtatagagtttgaagatggtgagatggtgggtaataatagaacatccatgtacttcgatgcggaatttgacaaatacctatctagtagtaaagtgtggacgggtatgggaagagacgcatttggtagtgagaaaaatgccaatcaaaacattacgattggatgtgctggttacaaacgatatttctttatccgaggggtattgggtacagtgttgttactgctgtttctggtggcttattattggaattatcgctctatttggactttgggcttcttgatagtattcatcgtaggtaacttaatccgtgattatcctttgaaaccaatatggctctacctttttatattgagtttacccattttgaagttagaaaacaaataaattatgtcggctttacatataggttttgaccataactttatagaacattcaaggcgtgtgtttgaggagtattatcccaatacgaatactttcgttatcctaaagaaaacaggcgcattgagaataatcaaacatccagagaattttgttatattgaatctttatgatgaacgaaactttgggaaactttggaagctatgcgttgacaatgatattgataagatagtgtttcatgggtgttcgattaagtttgcatcaatcttgaaattcctccagacgaaaagaaagtttactgtgtactggctgttctggggatatgaactttatcagacgttggggtatgaaaagaactataaattattggatgaacctttttcgccttttaaaatatcttcttattatgtgcccaatgcatgtagtaagctcattcgtaagttgtgtagacgttatttgccgtcagtagtgatggaaatgcttcctcatatagattatttctgtttttggtttaaggatgattatgatttgttgaagaaatactttaatgttcctataaagtataagttatttgcttactcagccagtaagcgaggagaagcaccaccttatctttttgacctgaaagataggcagactgcaacaataatggtaaaccatcaggcttcagctttcggtaatcataaaactgtatttcgtaggcttaaagagcttaattgcaccaagcaatacgatgtgatagtaccattatcttatggtagtagttgggtgaaacggggtgtcgttaagatgggtgataagttgtttggaaattcattttctccgataactacttatttaccgaaggaagagtatttcagattacttgaaaaagtggatgttgccatcttcggacagcgacgtcaagaggcatcaggtaatattatccagctattgagaaatggcgtgaaagtttttttgcgaaatgataatatgttgcttaattactacagagcaaggggctatataattttctcattcgaagatgatttgatagatgagtattcattgcggtctttgtctattttagagaaagaacacaataggcagtgttatatggatactcggctctactatgatgattttatgcccacattttttgattgatataatgaagaatttagtaataatcggtgctggtggtatgggacgcaccatttttgacgtagctcgtgagagtataggttatggcatagagtatactatcaagggattcatagacgacaacttatctgcactggatggttttgaggattatcctcctatgttggggacaatatcccattatttgcccgaagtggatgatgtctttacgttctctattggtggcgaatcaagaagggtttgtattgagtacttgatggaacggaatgccaagtttatcaatatcgttcacagtacagctcgaatagggtcaaatgttcgcatgggcgaaggtaatgtgataggtgcttttacctctttgggagctgattgtagcataggtagttacaacatgattcaatcgtacacagtgatagggcatgatgctaagattggtgattttaacagaatagatactcatgttacttgtgtcggaggaattcaaataggaaacgagacaacaattcatacttctgcggtcattaatcataaagtgatagtcgaagataatgtccatgtaggtgcatgtagttttgttattagaagagttaaagctggtacaaccgtattcggtaatcctgctaagaaattagtttaaatatatatagttatggaaatcaaagattttattgaaaattttgcggaacagtttgatgatacaacagttgaaatgttgggtgctggaactaagtttagagaactggatgaatggtcttcattaattgctttgtcagtcattgcaatggtggatgaggtttatgggataaccataaatggtgaggatattcgtagttctcaaactatcagtgatttgtttaacagaataatggataaaaagtagatgtataatcctttctctttgagaggcaagacaatacttgtaacaggtgcttcatctggtattggacgtgctactgctatagaatgttcaagattgggggctgcgttggttttaaccggtcgaaatgagaaagccttacaagaaaccaaggaacaattggcagatttaggcaatggtcattctattcttgttgctgatttgacgaatgaagaagcttgtgaagatttggtttctcggcttcctttgttggacgggtttgtcagtaatgccggaataggaaagatgcttcctttacaattttattctttggaggtattagatgaggtgtttcggataaattgtttttctccaatgcttttattaaaactgttggtgaagagaaagaggcttaaaaataattcttctgtggtgtttactgcttcaatttctggttacaataatgttgctccagctaatggtatttatggaacttctaaaagtgcattgagtgcttatatgaaatatgcagctttagagttggctggaaaggggattcgatgtaatgctgtacatcctggaagaataaatacccctttgatatccaatcggatgttgacagaagaagatgtagccaaagatgtagaacaatatcctttgaaacgttacggagaaccaagtgaggtggcttatgccatcatctatttgttgtcggatgccgcatcatgggttaccggaactaatctggtaatcgatggtgggcgtagcctgaaatgattgatatggaaagatttttagagaataaggtatgtatcattaccggtgctgcacaaggcattggtaaatcgatagccgaacgttttgcttcggatggtgctttggtttatgcctgtgaccgtgtagagggagttatggatgaatgggcgaaagcttgttcggagaaatacggcacacgtgtgtgtcctttgtattttgacgtgactgatgctgtggctgtaaaatcagcctttatgtctgtattcaagcaggaaagacggattgatgtattggtgaacaatgcgggtgttgtgttcaacaagaagatcggcatgatacttcgtccggagaccgagcttatgtttagggtgaatgtcatagctgtgatagaaatggtacagctggtttcccggctgatggccagaggacatggcggctccattgtgaatatagcttcggtgacagctgtactcggctctcccggccagtctgcctattcagcaaccaagggggcgatcatagctttcaccaagtctgctgccaaggaactggcatctcaaggaatccgtgtgaatgcggtggctccgggcattgtaaagacggagcgtttttccgaactttacgaagagagcggtgagaaaattgacaaccgtatccagagaatcgcattgggtcgtttggggactcccttggacgtggccaatgcctgtgcctttctggcatcagaccgttcatcctatatatcgggacagatattgggggttgacggttgcgcttccatttaagataaaaataagatgatattaagtttgaacgagcgaccacaagaggcggttgccacaatagatgcttcgggggctgtcttgaagtacggggagttgtcggcattttcggagaaaatcggtgctttacttcctcagcgttccctgttgttcttgttgacagaaaataatgttggtgggatagcatggagtatcggtagcattaattccggtaatgtccccttgatattgaatgctcatattgaggaagggctttttcataatttgtttgagatttaccgtcctccttatgtgtgtgtaccatcatcgatggcagacacactgcaatatgagtctgtgtatgagtattatggctatactttactatgtaccggaatggaaccatgtagggtacatgatgacttgtcccatctgctgccgacttccggctctacgggaagtcccaaattggttcgtcataaatatgagaatatagaggcggcagccctgaatatctccactttctttggactgacctccgctgaccgtccattgctggtgctgccattgtattatacaatggggctgtccgtagtatttagccacctatatgtgggtgccactatattgataacccaccaaagcatgacggacaaggctttctggagtttcatgaaggaacagcgggccaccagttttacaggagtgccctacagctttgaaattttgaatctgatgcgtttcttccgtatggatttgcctgatttgtctttgcttactcagggtggcggtaagatgcctcgccagctgaatctgaagtttgctgaatattgccgtgatactggcaaacgctggatagctacttacggccagtctgaaggtactgcccgcatggcctatcttcctgctgaatatgcaatatccaagtgcggaagtataggctgggcagttcccaatgcggaactgtccttgatagatagtgacggaaatgtgatagaaggttctcacacggaaggtgaaatgtgctatcgtggcaggaatgtgacaatgggatatgcctgcagtcgggaagatttgctgctgggcgatgaacgtaatggctttatgcgtaccggtgacttggcttacagggatgaggacggttgttattacattgtggggcgtatgggacgttttttgaagctgtttggcatgcgcatcggtctggatgagtgcgagcagataatcaaagggaaatatccgatagagtgtgcttgtgtgggtacagacgataagatgaccgtctatttgaccgatgaaaaacatgcggtggctgtaaaggagatactggttgaaaagaccaaactggtagcctcggcttttgaggtaaaagtgattgctgacatacctaagaatgaggcgggaaaaatattgtatagtaagttgaattcataaaaaagataggaacgatgacgaatattgaaaagtataatgacgcttttgtagaagtgtttggggtggatagtgcagtgttgaacgatagtttttcaaaagacagtgtggaatcctgggattctgttcaccaactgaatataatcgcattgctggaagagtcctttgacgtaatgtttgacccagaggatatcatggaatttacttcctatggaaagggacgtgagatattgaaaaaatacgaagttgaactttaagggtcaagataatggcaagatgggaaattaagaatgtcggcatgaagggagtggctatgaccgttccggagaatgtggtaaaaacttccgaactgggacttctttcccaagaggaagctgatgtattcgataatacagtcggtataaaagaaaggcatatcgctccggacacaatgtgcgcctcggatatgtgccaggctgctgccgagaaactgcttgaagagctgggttgggagaaggacagtattgatgtattgttgtttgagtctgttacgggtgattatcgtactcctcctacttcctgcatattgcaagacaggcttggcttgtcggaaaattgtttctgtatggatattccaatgggttgttgtgggtgtatgtatgccataacagttgccggtaacctgttgacggcaggtaatgtaaagcgtgccttgttgcttgtaggtgatacggctttgcggatggggtccatgaaagacaaaagccgtatacctttattcggtgactgcggtacagccatagctttggaatatgatgagactgccaatgatattgtagttgattttcatacctacggtaagggacatgaagctttgatgacccctcacggtggttttcgccatccggctacacctgcttcctttgaatatgaagattttggcaatggtattgtgcgtgctcctattcatacattgataaatggaatgaatgtcttttctttcgctatatcccgtcctcctagatccgtcgaaacctttttagacgattataaaattaatcgtgaaacggatatagactatttcttgattcaccaggcgaacaagatgattgtggatcgtattgtgaagaagttgaagttgcccaaagagaaggttccttataacctggaggagtttggaaacttgggtggagcttccattccttcattaatggtgagccgcttgcgtgaacggtt

SEQ ID NO: 4444 - DNA, 330 bp, Unknown
  gut microbiota DNA sequence
gctttctccagctctttaatgcgcttttttaattgggtattttcatctttgtaggcttccttgctgcgattggacatatctggtgattcttgttcagaaggcaaagatagctcttctgctaaatttgaatactttttaatccaactatttagcaaggcagggcaacaaatgccatgtgcccggcaaaaggcatgcttactcatacctgattggtagtaagagtgaagaaaaaacagtttttcatcttcacgataaagctttcgttttgaagtcataatagtaacacatttattagtttgtaaatgtgtctacctatatcaggataagaca

SEQ ID NO: 4445 - DNA, 254 bp, Unknown
  gut microbiota DNA sequence
aaattggattattcgcaagtcaggtttcaggagaacggcagactgaaacttctgattatagtgggcacccgtccggaaatcatccgcctggcggctgtcatcaacaaatgccgcagttattttgactgtcttctggcccacaccggccagaattacgactataacctgaacggtgtcttcttccgtgacctgaagctgaaagaccccgatgtgtatatggatgccgtcggcgatgacctcggtgccacgatggg

SEQ ID NO: 4446 - DNA, 916 bp, Unknown
  gut microbiota DNA sequence
ctacgctccctttaaacccaataaatccggataacgctcggatcctccgtattaccgcggctgctggcacggagttagccgatccttattcatacggtacatacaaaaaggcacacgtgcctcactttattcccgtataaaagaagtttacaacccatagggcagtcatccttcacgctacttggctggttcagactctcgtccattgaccaatattcctcactgctgcctcccgtaggagtttggaccgtgtctcagttccaatgtgggggaccttcctctcagaacccctatccatcgaaggcttggtgggccgttaccccgccaacaacctaatggaacgcatccccatcgatgaccgaaattctttaatagttctaccatgcggaagaactatgccatcgggtattaatctttctttcgaaaggctatccccgagtcatcggcaggttggatacgtgttactcacccgtgcgccggtcgccatcaaacttagcaagctaagttcatgctgcccctcgacttgcatgtgttaagcctgtagctagcgttcatcctgagccaggatcaaactcttcattgtaaaagtatcgtgactgcgcaaattaaaaattaaagtgcgacagcttaattatctgttcaggacgctcgaattcaaaaagtttatctttacctatttatataaaacaggtattgacggttcttttgttttacccaggtacgacgcgccttaatcattagtttccaattattaatttgcgaagcacctgctcttgtactacttgtattgtttatgtaaatctgttcaaagatcgctcgtttcacgattgctgttcttttcagaaagcggatgcaaaggtaagaactttaaagcatatcttccaaatattttcggaagtttttttttcatttttct

SEQ ID NO: 4447 - DNA, 28297 bp, Unknown
  gut microbiota DNA sequence
ctgtggtgggattgcaagtgataaacgatgtcttacgttagaaataagaaaaatatgaaaaaattgaagaaactattatatattgttccgttgcttggtttgatggctactgcctgcacggatattgagagcattgagatagatcatatcggtggtaacaataccaaagatgacgtggagagcgaagcgtactatgccgacttgcgcgcgtataaagaaaccgccaagaattatggccgccccgttgcgttcggctggttttccaactgggcgccgacgggagccatgcggagggggtatctcacttctgtgcccgatagtatggatatcatatctatgtggagcggtgccccaggacgttatgaaatcactgaggcgcagaagaaagacaaggagtttgtgcaaaaagtgaaaggcatcaggttattggaagtctgcctgctttcacacttgggcaaagggcgcacccctacttcggtatacgatgaagtggaaaaaaaagccatagaagagggttggagcgaagctaagctgacagaagaaagaaagtttgctcgctgggacttctgggggtttacttcgcatgacttgaacaacaaggaagagctggaacgggctctttccaaatttgccaaagccatctgtgactcgttggtgaccggcgagtgggacggatatgatatcgactgggaaccgggtaacggtttcaatgattccgacggtactatcggcagccgtaacatcggtttcgtggtgaaagagttgggcaaatacatcggtcctaagagcgacccggagaacaaagggcataaactgctatgcatcgacgggcatatcaatgatttcttgcctgagatagaagattatgtggattactggatagctcaggcgtatgggcaagcttctccttatttgcattcgcctggcaatatcaatgagaaactcattgtcacggagaacttcgaatcgtttgcttccaatggagggcaattgttgaaacaggccgcctggatgccggaagaagggtataaaggcggtgtgggagcttatcgctttgataatgactatgacaatgcacccgattataaatggatgcgtcaagccatacagattaatcagcgtgtgttcaacgaatggaaagaaagcaaaggaaaaaataagtagtgaatcaaattttagaatatgaaagatatgaataaatatttgttgaaatatatggtgttttgcttcatagccatgctgtcggtcagttgcaatgatagcgaaagtgatttgctggaacctaaggtctattttgaagaaagggagtaccggatagaggtggaagagggcgaagcgatgacccatgagttgcgggcacgtgtgtcatccttgtgtgcttcgcaggtagaggtgtcttatgaagtggccgatacttctgtaattgaggcttataacaaaaagtatggaacggaatatgagatgttcgatgctactgccgtagatttgggaaatgctgttgccactgttccttccggagaggtgtatgccggatcggtatcggtgaaattttctaagttggataaggtggaagaaggtaagtcttatctgcttccggtgcgtgtacggtctgcttctctaccggtttcccaagggggagatgtggtttattttatcctccacaagcccgtgcggattatgaaggtggctcgtgtgtataacaattatgtgaggatacctttgcttcccggtacccaattcacatccgttacttacgaagcattgatttatattgatttctttggaaacaataatactgttatgggatgcgagggaactctgattttccgtatcggtgatgcacctttgctggagaaagaccatttgcagattgcaggcaaatcggaatacagcgtttctcaggctttgggaaccgggaaatggtatcacgtggcgttcacttacaatcagtctaccggcaagactgccatcttcatcaatggagaaaaagcttccgaagcggtttgggatattccgagcttcgatttcggtaagggcgacttctttatcggtaaggtggccggattcatgtggggcgaacgtccgttctatggtcgcatgagcgaagttagactttggaatgtgtcgcgcacggagagtcaaatcaaggaaaacatgattacggttgacccgaaatcggaaggccttgctgcttattataagttgaacggaaccgaccagttccaagacggagagacgtggaaagtgaaagatgcttccggtcatggaatggacggattggtgaatggaggcgataaagccctcggcatcgtggaattggatgaaccgataactattaaatagcaggattccggtttggatatgaatgcaagttcttgcaactaccaattacaagaacttgcattctttcttttaccgacatgtctttattctttatccttctattctgctaattaaaattaaaaaataatctgcagtattagtgtttttgccgagtgaattgttttattaaccaataaaaggcaaaagaatgtgtctcaataaacttaaatttaggatgaaaaacatgaaatctattgcatggcaagccggatgtctcttgtggttgggcatggcggtatgcaactgtactccggcttcttcaggggaagactatgcatcttacgtaaatccgtttatcggtacgggtgggcacggacatacctatccgggcgcagtggtacccaacgggatgattcagccgagccccgacacgcgcatctttcagtgggatgcttgttccggttattactatgccgattccaccattaacggattctcgcacacgcacctcagtggaacgggttgcggtgattatggcgatgtgctgctgatgcccaccgtgggccgtcaggactatcatgcgatggggaagaagagccagcaaatggcatacgcctcgcctttctcgcacgggcgggagaaggcagaaccgggatattattccgtattcctcgaccgttatggcgtacaagccgagttgacctctaccaagcgcgccgccattcatcgctacacgtttcccaagtctgggaaagcaggatttatccttgaccttgactacagcctccagcgtcagaagaatgaagagatgaagctggaagtcatcagtgatacagaaatccgcggacataagaaaaccgtttactgggctttcgatcaatacataaacttctatgccaagttctccaaaccgtttacttatacaatggtgaccgattccatggcattggacgaaggggaaccgctgctgcccaccgccaaggtgctattgcaattccagacggagaaggatgagcaggtgatggtgaaggtgggtgtttcagctgtggatatggacggtgcccgccggaatgtggaagcggagatacccggatgggattttgacggagtgcgtcgggcagcccgccaatcatggaatgaataccttgccaagatagatatcgagacggaggatgaagaccagcgtaccatgttctatacggcgctttatcatacgggtatgcagcccaatctgtttaccgatgccgacgggcgttattttggcatggatttgaaagtgcatcagggtagcgtggaagagcccgtctataccattttctctttgtgggacacgttccgtgcctaccacccgttgatgacgattatcaatccggatttgaaccaagccttcatccgctcgctcatccagaaggagcgcgaaggcggtgtatttcccatgtgggaattggcgggcaactatacgggcacgatgataggctatcatgctgcctcccttgtggcagatgcctatatgaagggctatcgcgactttgatgtacagaaggcataccgcgcttgcctgcgtgtggcggagtatgacactactggtattatcacccatcctttggtgttgcctcatttgatgccgcaggccaaatattggaagaacaaggtcggttacgtgccttgcgacaaggataatgaagcagtagctaaggccttggagtatgcctacgatgactggtgcatctctgtgctggccggtgagctgggcgacacgctgaaccaacggaagtatgctgatttcagcaagggctatcagaactatttcgatccagttacccgttttatgcgtggactggatagcaaaggcaattggcgtacgccgttcaatccccgctcttccaaccatcgcagtgatgactattgtgaggggactgcctggcaatggacctggtttgttcctcacgatgtggagggactggtggaactgatgggaggccgtgaagcttttatcggtaagttggactcgctgttcgtggccgattcttcactggaaggtgaactagtgtctgccgacatttccggcctgatagggcagtatgcccatggtaatgagccgagtcaccatatcattcacttctacaactatgtgggccaaccctggcgcacgcaggagttggtggacgaggtactgcagacgctttatttcaacaatccgaacgggctttcgggtaatgaagactgtgggcagatgtcggcatggtatgtactgaatgccatgggcttctaccaagtttgcccaggccgtccgctctattccatcggtcgcccgttgttcgacaaggcgacagtgaaccttaaggatggaaagaaattcacggtggtggccacggacaacagtcgtacgaacaagtatgttcagaagatgttgttgaacggcgaggaattggtacgcccgttctttacgcatcaggacataacggacggtggcactttggagttgataatgggcgacaagccggtaaagacaaacaattgataacgtgcgattagttatgaatcacaataattaccgtaacccggtttcctgggtgccttccgtttattttgccatggggctgcctttcattgcagtcaacctggtctctacgttcatgttcaaggatttgggcatatccgacacgcagattgccttctggacttctatcatcatgatgccctggacgttgaagttcctttggagtccgttcctggagatgtaccgcacaaagaagttctttgtggttatcacccagttgttgagcggattgctgttcggactggtggctttttcgttgaagttcgattacttttttgccattagtatttcgacaatggcagtcatcgctttcagcggagccacgcacgatatagcctgcgatggcgtgtatatggcggaactgtcacctgccgaccaagccaagtacatcggtgtgcagggggctttctacaacatcgccaaattggtggcgaacggcggactggtggcgatggcgggtatgctggcccagagtttcggggcgatggaaggccgttctatgcaggagaacatgtctgcttataaggaagcgtggatgattatctttatcgtcattgccgtgttgctgttgctgttgggtgggtatcattcacggatgttgccgtgcacgcagaagcggcaggacgccaagcgttcgggcgcggaggtgatgcgggaactgtgggcggtgataaggaatttcttcacaaagcgccacatcttctattacatttgcttcattatcctctaccgctttgctgaagggcttgtgatgaagattgcaccgctcttcttgcgctcctcgcgtgaggtggggggattggggctttcgcttactgaaatcggtacgttgaacggtgtcttcggttcagcggcttttgtgctgggatccttgttggcaggcatctacgtgtcgaagcgcgggctgaagaagacgctgttttcgctctgcatcgtgttcaactttccgttcgtggcctacacgctactcgccatttatcaaccggagaacctttatctgataggtgcgggcatcgtggcggagtatttcggttacggcttcggcttcgtggggctgacgttgttcatgatgcagcagattgctcccggcaagcatcagatgtcacactacgcctttgcttccggcatcatgaatttgggagtgatgcttccggggatgatgagtggtttctttagtgatttgttggggtacgagaagttcttcacttacgtgctgttggccgccgtaccgtcgttgctgataacatacttcattccctttacgcatgacgatgaggtgaagtaagctttgcagcatgaatgagacttgttgcataaaaaactattgaataaaagaatataatctgtgcccatctgtgtaatctgtggtgcaaagataaaaatccaaaatattatgaacaataaatttacttcaatcccttgggaagagcgtccggcagattgtgcggacgtgatgtggcgttattcgcagaatcccgttatcggacgttaccatattccgacgtccaacagtatcttcaatagtgcagtggtgccttttggcgacggatttgccggtgtgttccgttgtgacaaccgggcggtgcagatgaatatttttgccggtttcagcaaggacggcatccactgggaaatagagcatgagccaatcaagttcaaggccgggaatacggacatgatagagtccgaatataaatacgacccgcgcgtgacatggattgaggatcgctactggattacgtggtgcaacggctactacggtcccaccatcggtatcggctatactttcgatttcaaggagttcttccagtgcgagaatgctttcttgcctttcaatcgcaacggtgtattgttgcctcagaggttcgatggcaaatatgcactcttgagccgtcccagcgacagtggccatacaccttttggcgacatctacatcagcttcagccccgacatgaagttctggggcgaacaccgccatgtgatggctcccacacctttccccgaaagtgcctggcaatgcaccaagataggggcgggttcggtaccgttcctcacggacgaaggttggctgatgttctatcacggcgtgataaccacttgcaacggtttccgttactccatgggggcggctattctggataaggacaatcctgccaagttgctctaccgcacccgtgagtatctgcttgcgcctgctgctccatacgaactggcaggcgatgtacccaatgtggtgtttccttgcgcagcattgcaggatggagaatgtgtagctgtatactacggtgcagccgatacggtagtggggcttgcctttggctatatccgcgagattctggagttcacgaagcgcacaagtattttgtaagcaccaagcagttggcaggcgcttggtattgctgaaaaacgtctgccgtaactgtcttatacttagtgaaatatcactgcaaagatactgcatgctttttgcagtgatactgcagagccgttgcagcgccactgcaaagctgatgcagcgttactgcaaagttgttgcagcgctactgcaaagtagtttgcagtgtcactgcagaccgtttgcagtaacgctgcagagtgcatgcaatgacaccggcatgggtagcgtgctcactaactaataaagaacaaatccctactatattatgaaacgactgattactttctgtatcatctcctttggaatgctcacggcatctatggctgcggagaagcaaccgacggactatgtgaatccttttattggtaccaccaacttcggcactacaaatccgggagccgtctgtcccaatggaatgatgtccgtagtgcccttcaacgtgatgggctcggaggacaacaaatacgataaagatgcccgctggtggtccactccctatgagtatcacaattgtttcttcaccggatattcgcatgtcaatttgagcggtgtgggctgtccggaattgggctctttgctgctgatgcccactacgggagagttgtccgtggattataaggagtatggaagccgctataaggacgagcaggcatcccccggatattacagcaacttcctgacccgctacaatgtgaagacggaagtgacggcaactccccgcacgggtgtggcgcgtttcacctttcctgctgggcaaagccatgtactgctgaatctgggcgaaggtctgaccaatgaatcgggagcttttctgcgtcggacgggtgagtgcgagtttgaaggtatgaagctgctgggtactttctgctataatccgcaggccgttttccccatctactttgtgatgcgtgtcaacaagcagcctgctgcttcgggctactggaagaagcaacgccccatgaccggtgtggaggccgaatgggatcccgataacggacgctacaaactttacaccggctacgggaaagagctggcaggagatgacatcggcgcttaccttacattccatactgaagagggcgagcaagtggaagtacagatgggagtctcttttgtgagtatagagaatgcccggctcaatttggatatcgagcagcagggaaagaacttcagccaagtgctggaggaagcccgtcgttgctggaacgatgacctctcgcgcatccttgtggaaggaggtacggaagagcagaaaaccgttttttatacggcactctatcatacgctgatacatcccaatatcctgcaagatgtgaacggggagtatcccgctatggagagtgacaaaattctgaccaccaaaggcgaccgttataccgtcttttccttgtgggacacttaccgcaatgtgcaccagcttcttacgctagtatatcccgaacggcaattgcagatggtgcgctccatgctcgacatgtaccgcgaacacggctggcttcccaaatgggaactctacggccgtgagacgctgaccatggaaggtgacccttccatccccgtcatcgtcgacacctggctgaaaggtctgcgcgactttgacatagaactggcctacgaggccatgcgcaagggagccaccctgccgggggcggagaacctgctccgtccggacaatgacgactatgtgtcattgggatatgtgcctctgcgggagcagtatgacaattccgtttcacatgccctggaatactatattgccgacaatgccttgtcgcgcatagctgctgcgcttggcaagaaggaggatgcccgtctgttccacgaacgttcgctgggctacaagcattattactgtaaggagtacggtactttccgtcccatcttgccggacggagaattctatgctcctttcaatcctatggaaggtgagaattttgagcccagccccggcttccacgaaggcaatgcttggaactatactttctatgttccccacgatgtgaaagggcttgcccggctcatgggtggaaagaagccgtttgtagacaagcttcagcgcgtgttcgacgaagggctgtacgaccctgccaacgaaccggacattgcatacgcccatcttttctcttatttcaagggtgaggagtggcgcacgcagaaagagctgcaccgccttttgcagaagtatttcaagaatgcccccgacggaattcccggcaatgatgataccggaacgatgtccgcttgggctatcttcaatatgatgggcttttatccggattgtcccggagaaccggcttatacgctatctactccggtatttgataaggtgtccataaagctcgaccctaagtattggggacgcgaccaactggtaatagagacggaacgtccgtcggcagaatctctatatatccgcgagatgaagctgggaggaaaaaaactgtcccgatatcgtatcactcatgaagaactggtgcagggaggtaaactgcagtttagtcttcgataggtattgtgagtcaggataacatcggtgatggtttaggttgcccgctgttgacagagttcatgtcagtggcgggcttttctatgcaggttggcttccggcaggttgatagggtatttcgaaccagaattcggaacctttccccggaatagagctgacacctacttttccgttcattttcccggcaatcatggtgcagatggagagtccgaggcccgtgccttgtttaaagctgtttagcttgacaaagcgttcgaatacatccttttgcttttcgggaggaatgccgcaaccggtatcacggacaaagaagcggatcctgtcttcttgcggcaggtgataaccaatatcgatgaaaccttcttccgtatgcttgagggcgtttgacagatagttgttcagtacttgtcttacccgcttgggaactgtgcgaatgatacagcaatccgcaccgggcaggagacgtataccgacttcggacggaagtttcagttttgctatcgtctgcatttcatcaagcgtcttgtttacatccatatctccttctgtgaattcgagaatgccggcttcgatgcgtgacaggtcgagaatatcattaatcagttgcagcagcagttgggtgttttcttcgatgatatgtatgtattcctttgtatcttcgtcttgtatataatcggaaagtatggaggagaatccgacaatggcgtttagtggagtacgtatctcgtggctcatattggcaagaaaagccgatttcaggcggctggcttcttctgctttctctttggctgccagtagttcggtgatatccagtgcagaactgacaatccatctctcttttcctttgttgtaggacaccagcgttttgtgaaacgacagaacatactctctgcctttgggattgacaaagtgtttgatgtaggactggggagtttccgactcttcgacttctttgtctgtctcctgaatgaaattatcttgcattaggggtttgaactcctcttcatagtgtcccacaatatcctcagcggggacttccatcatctctgccgcttttttgttccatatcaggtagcgtccttcgtcgtttttgtcttttactgtagtggcgatggggaggttctccagaatactttcaaggaagaaacggtatttttcgttttcccggcgttggacttcatcttccgtaatgtcgcgtatgaaggccatggcataatttctgttgaggtagaccatgcgcactgcgatatatagttcttcactactttccactcttatctttaggatcaggctgtccgaagtgcgggtattcagtacgcgtaacagcgacgtcatgtatttccggcattcatcggcgtctgtcactaaattattgatatttagaactcccgaattcagaaatggaagtctgttcgccttttcggtaggtgtattaagtagttttacgacaataccttgtctgttcagcagatatactggaatgtctattgcccggataatctgtctgttcagacttttgtatttatgatttatccagtatagaaagcttgcagatgtaacggcaattaacagaaataactgtacttctccaaataatgtaagatgcatacgcggtgtctttcatttcgtctgtcctcattgacgaaggttattatataaaaagcgcgaggactgttattgtctatctgcattcgaggctctggaaaatgcccacaccgttaatagacaacagcccctacgcctaagtatataataacatagacgtgaagaaactgttgctattatcctgcggtgtttaagagaattttccagattccgaatagcagggataataactttcgcttcttgcgttcttatcgaatcgagtcaaaagtgacgttatcactataacagccaagactttggtgcaaaagtagtatatttttcgggatgtacagtatgatgaggacaataaagtgtatatataaacaaagcgtgatggtatttgaccgtcacgctttgtatagtctgccattaaaagttgttgttagagagaattgttagaggatttatttcatggcttctatggtgtatccttgttgtttcagaaggttcagcactccattgtctccgggcaggtgtccggcaccgactacgaaaagggtgggggcttccgtcatgatggcaggcatcttttcaacccatgccttgttgcggttatccagcatggcttccatctcaccgggcagcgggtcgcatgaattgccgtcgcgctcttccatcagttgcaacatggcatccaggtcttgcttttcataagcggcaatcaggcgtttgctttggtcgatgcctttctcgatgtcactgatagcgcagtagaggaggtttgcctggcgttgcagcgtctggctgttgaacagaatgtctatttgtgactgggctgtttccagaccgccaactttcttgccttgctgtccggcctgctgctggaagtaagtgtcgagctgttcttgcgggttgaagcccggagtatgtttcatgtagagcaggacgacaagctgctggttgatggcagccggtttcagttgagcaagcatggcgatgtctaccatcatattctcttttacaactttacccacttcttcgtattgctcgggagtaaagaggctttgcagcgtggtgtctttgggcatcatcatctgctgttgcatgctttgcatgaaggcgggagtcgccatttcgcttatcacgacctcaccgtagacttgggtggtttcgttcatggcctgcggcatggcggcgatgctgtccttgatgctgagtggagagagatggtaagtaccgaaaatataggatggtttctctaatcctttaccggatactttccataaaagttgtgcattggcactcagcgcaatgctgatgaatacgaggatgcctaaaagtttcttcattgttttcttcttttaattgtttctggactatcagtcgggaaagagtaaagaaaatcacaagaagggaaaaaattagtatcattttattcttcctccgcagagccagtgttgggtgtaatatttttcccggaggttgctgactatgactccctggctggtactggcatgtataaatttgccgtccttgaggtagatacctacgtgtgccacttttttgcgggaagcacggctggtgaagaacaccaaatctccctcacgcaagttgcggcgggagattttgctgctctctttcagttgcccgtctgtgcttctcgacagacgggtgtggtaaactttcttatacagttgcgataccagtccggagcagtctgtcccccgcttgctgtcgccaccagcacgatagggggtgcctatccattcggaggcatggatgtacagcttgtggttgtcctgcagttcaatatccactcccaaacggacggatgcctgtgccagggctttgtagtccaggcgtggcgcggaggtatggcaggaacttagacctatcaatatgatggtaaaggctactatataagaaagatattttttcatgcttccgagtttttttcttctaccgttttatcttctttttccgttatttcttctacggctgcttctgcttcttctaccgtttcttctaccacggcttcttcctccacgccgacgttgaagtaagcttccaattcctgttcggcagagttgttctcatttcgtatatcgcggataataacaccgttttctaacaatgcaatacgcgggcaaacgtccactgtgtggttcaggttatggctggaaatgatgacagtggctccgtgttcttcattgtatcttttcagcaagtgtttgattacagactgtgaactggggtcaaggaagttgaacggttcatccagaatcaacagttgcggatggtggagcatggcggagatgatgccgattttctgtttgtttccggcagaatagttgcggatgaatttcttctggcccattacctcgccgttcatgaagcgttcgaagggaagcaggcgttcgtctacctcctctttcttcagaccgtacatcttaccgatgaagtagaagtattcttcgggggtgaggtagtctatcaggaaaccgtcgtctataaaggctcccgtgaagttcttccagtcctcgcttttgctgacgtcaatgtcattgatggttacatagccccggtctgcctgcagtaagtcaagaataagccggaagagggtggtcttgcctgcaccgttgttgcctaccagtcccagcatatcgccttgcccgatggtgtagttctctatatctacggctttttttgtgccgaaattcttttgtaaattgttgatgcgtatcatgttagtgattgatgtttaatgatttctatttctgtctactgtccctgaagccttccatattcttgtagcggcgtttcatgagtcggtgatatacattcatcagccagaatttggaagtggcgatgaatgccacgccgatgccgataagtatccagggggtgacctctttgccaaagatggcattcagtgcaaaaagcagcagtaaaggtatgccgaaagcacctcctgaaatcagattctgcagaccggtgcctatattctgccggctggtcatctttgaattcaggtcggtagtcttgttgttgtagactgccagttggaacagacagcagtatacggctcccggaatgaatatcagccatgcaatgcaaccgagtacggataccttcccggtaaccataccgggaatcatcagaatcgtaggaatgagcaatgcaatgctgtacagtatgtatttggcacgcagcagcgagtagatagattccttgcggctcatcagtccgtcaatgtaattgccttcgtaacccatcagtgtgctgaggaacatgatgccgaagataatgtaattataaaggacgaagaaatctctcagacctccgtcatacacatcggaaaagctaatgatactactgaacattatcactacaccggtgatggaatagagcgaacgcttacaaatcttgttgcgtagcaataacttgagttccagtctcatgtattcgcctatttcgccgtagcggtcgaggaatttgtattcggatacatgttttatccgtgtatcttccactttgttcagttcattgtagatgagtttctgcatcagggtgcggttgatgaaccacatgagggcgatggcagccagtacaccgatgaatgacagtatattgccggtaatgaacccttctcccagattgacaaaacagtcgaaaagcggactgttgtccggaatgaatagtgcggcggcaatgccgccatatactactaccggtaatgccagccaccagatgcgctcacccatcagtgtgcggcacaacaagaaccagtagttattgaataccatcagcagccagatgccaatgcaataggtcagcacaccactgattccatagaatttggtgacggtgatgatggaaaacggaacaaacagaaacagccagaacagattgaagccatccagtccggaacggatcagcaggaagtctataagacgattccgtttgatgggaagcagcaggtagggcttcacttcctgggtgggtgttttttggaaaggcaggcgtatcaggaaatccagcacaaggacaaatatcaatccggagttcattacgtgataggcttctgtggcaccaccgtcaaaggcgaatgcaaaggtcgtaccgaagaatatcaagtaaccggcccagaagacgaacatgaagtacatccagaattttccgaatttacttttttcgtacataggatttcgtttttctgccagttttccgtgcttgcgcagatctaagaaaagactcatagtatttgtatatatagagtttgtataaaaaaagctgcgctgcctttcatcgaacaacgcagccttctgtgtgtatggctctcttattctttgtcaggagtttcaggactgatcattgatacctcaatctcattcttctgcttgaacaagtcgtcggtgaacttttggatgtccttcacggtgatgctgttgacaatctgttcgtaatcctttatcggattcataccggtgaacaggtattcgtcaatgcttcccagccagtagctgttttccttcaggtcttcggcgtgttttttcagcatgaactctttcactttattcaggtctccttccgacggacctgctttggcgatgttgtcgagttctgtaaagataatctgcatcaacttttctctttttgccggagcggtttcgaatataatttgcagaagggccttttctttcggatatttgcttaactggccgcctacatatacaccgtaagtgccaccttcgtcttcacgtaccttggctgtataaaccaagtcaagaatctggctggtcatatccagcaggatgtcatttttcaggtcgtacttgcagtcaccgttcagcaggacaaaatttgacgctttagcagtttcctgcttccttacgaactcattcttataaactccctggcgcatgtcgactttattgtccttgaatgtttccttgcggttgatggcaggcagtgaacccaggtactcggcgatgagtggtttcatttcctccacattcacatttcctacaaagataaaggtaaaatcgctggcatctttgtagcggtcttgatacatggacagaatcttgtcataatccatcttgtcaatcatgtccgcctttattctggctcttctgggatggtgcatgtaaataccggccgagacagagtcactgaacgccacctggggattcatttccatattctgcaaagcagctttgttgcggttcttgtaggatgcgaaggcatcgtcgtcacggcgtggagcggtgaacgtcaagtaagtgagctgcatcattgtttcgaagtctttcggtgaacagctgccattgacggtttctgtcttgtcaccgataccatagctgacggaagctttcttgccggccagaactttttccaggtctacggcactgaaattacccagaccaccgacactcactgcatccagtccgttgatgttgatgatttccgagtcggggaacagggaactaccgcctaggctgactcccttcatgcggatttcgtctgccttgaaatctgtcttcttgataatgaccttgactccgttggagagtgtcagcgttgtagtgccgaatgtatcatctgtctgctcggatacaatctttccgcctttcggggcttcggccatcaaaggttcatccgacaccttgtctacgtaggcagtcagtttttcagctttaatatctttcagaatcttcttgattgcatcttctgtcggcattttcaatccttccttatccggaccgagaattgcgactacctggttactgtctgtcacgagggcttgcatcatctggttcagtgcggcaaccggaatggcgggagctatctgattgatgatggcgtattcgttttcgatgcccggaatcggttcgttatcgaggaaatgacggacatattcatccacgtactcttcattcttgcgtttgtcacgctcgttataagcagattccagttggcgcagatattcggcacgggcacggttgtattccgtttccgtaaagccgaattggcgggcgcgttctgtttcgcgcaggagagtggctattccattttctatggcatcttccttgcagacaacgacaccggtgaaggcatctttggttttggcaacaaagaaatcatcgtcataagtggcggcatatatataaggaggattggcggtctgtaccaattcgttcagacgcgcattcagcatattgttgatgagcgtggttgcataattctgtaccagatagcccatgtcgcctttctgctcgtcaggagtggcttcgtgcttgttgaagatgagggcttgtacattggactgttccttgtcctgataaaccaatacaataggctccttgttgtcgtttaccggatagtactcgcgtttggcagcattgggctgggcgggaatatcagaaaacattttcttgatttgggcttcgatggcgtccacatctatatcgccaactaccacaataccctgaaggtccggacggtaccacttttcatagtagtctctcaaagtttgcggtttgaagttcataacgacctccatcgttccgatagggaaacaagtggcatacttcgttccttcgaacatgactggaagcatcttctcctggaagcgttgtatggcgctcatacgggtgcgccattcttcgttgatgactccgcgttccttgtctatttccttcgggtccagggtcaaatcgttactccagtcgtgcagaatcagcaggcaggagtcgatggctcccggagtagtgaccggcacattggaaatgttgtatacggtttcgtctacggaagtataggcgttcaagttctcaccgaatttcaccccgatacgctccaggtattgcttcagtgcatcaccggggaagtgggtcgttccattgaaacacatgtgttccaggaagtgggcaaggccgcgctggtcggcttcttcctgaatggagcctaccttttgggcaatgtaaaagtcggcccggtttgcaggctggctgttcttgcggatataataggtcaatccgttgtccaactttccgatacggacatttttgtcgaccgggataggcggcatttgctgtgcaaatacctgctgaaaactgcagcaaagaattaacgctacaatccataaaccacgtaatagatgtttcatattattatgaatttaaattgttcttgaactatctgtcggacagcccttggataaatcacaacttctgttgtttttttcggattccattccggataaatggaatttatctgactgcttctcggatgcggaccaatttggtcagcaggtcttccagcaggtcgagtttcagcatgttggcgccgtcactcttggctacggcgggattttcgtgggtttcgatgaacagtccgtctacacctacggcaacaccggctttggctacggtctcgataagttgcggcatacctcccgtgacgccactggtctggttgggctgttgcaaggagtgggttacatccaggatgacggggaaaccgaaggtctgcatttcggggatgccgcgatagtcgatgactaaatcctgataaccgaaagtagttccgcgttccgtcagcatgacgttcctattgcctgcttccactactttatcagccgcaaagcgcatggcaagcggagagaggaactgccctttcttgatgttgatggtttttccggttttggcggcggctacaagcaggtctgtctgccggcagaggaaggcgggaatttgcagaatatccacatattcggcagccatggtggcttcttcggcggcatgaatgtcggtcacggtaggtactccgaaagtgtcgtgtaccttttgcagtatcttcagcgccttttcgtcaccgatacccataaaggaatccagacgcgaacggttggctttacggtacgaccctttgaatacgtatgggatttgcagtttttctgtgatggtcacgatacgttcggcaatgcgcattgccatttcttctccttcgatgacacatggacctgccagtaggaagaagtttccggcaggattattctttaattcaatcataggttgttactgattaagtattttcaattgggtataatcaatgttattgcttcatgcagtacgctgatgtccagtggaaaatgacggtcgagaatacgtccgtccaaatcgacagaggcattttgcgcacgcagcacttttactttttgcgtacggtagggcatcactaccttatggttcagaatccgcccttggataagcatccacaatcccgaccatagttgcagcaattcgggacggtaaatgacggaaacatccagccagccgttatagggcactgcactaggcgcttgtccgtatccccacgcactgcctatgcagacagtcatgatgcgtccgcgtatatgctcgccgtttatcttgagatgcatgcggtacagcttccgttcgaagataatggatagcagtgccatgaagtaagagaggaacttcactccccagaaacgcttgcactggtcggtgattttcacgatacgggctcccaggcctatgttgatggcattgagaaagtagcgtgtcagatgcttttcaccgtcgtaataatagcaggtacccacgtctattttccggcggcggttgttgatgatgcaatccaccgctttcttgtaatccgaactcatttcccaatagtcggcaaagtcatttcctataccattggggatgatgccgatggctatattctccttgtctggtgcattggaaagcatgatgccgttaatgacgtcattcagtgcgccgtcaccgcctactacaacaatggtgcggtagccgttgttggcgaggatgcctgccagacgctctaccgaaccgaacccttcggactgcacatagtcgtaaggcacacctttgctgtctatgtattctttgatttctttccaccgtttctgcactttccgtgttccggctttggggttgtatatcactcccaacttttcgggttctgcactcatgattctatttacaatttgactatttactatttacgatttaaatcacccggtcactttatcatttcatcatccttccaacttcttctttacaaaagctatcttttcttccatcggccaccgggcattcatccaatggatggtaaatccacgccgttccataccgcggaaccaggtcatctggcgtttggcaaactggtggatggctgtttccagttgcgtgaacatctcttcataggtcaacttgccgatgacataaagtgtcagatacttgtattccagtccgtaatagatgaggtcatccggttggatgccttgctctatcagacgtcgcacttcgtctatcattccttcttccaggcgctggtgcaggcggcgggtgattttctcccgacgcaattcccggtcgatgtccacacctatgatgagactgttcatctgggggaaggaacgttcgtctactggggtatgggcataatactcttcgatttcgatggctcgtatggcacgtttggctgtgtccacgtccgtggtattgtgcaggcttttgtaacctttcagtatgtcggtcagttcttccagcgatttgtctgccagacgggtgcgcaactcgggattctcgggtacgggcagcagacggtagcctttcagtactgattcgagatacattccggttcctccacatacaacgggcaggcaacctttttgtttaatagtctcgtaagcattcaagaaatcacgctgatactcgaaaacattgtacttatagcccggggcggctatgtcgatgaggtgatggggaatctgtttcccgtcgacggtatagtcagcaaggtctttgccggtgcctaggtccatcccccggtagatttgccgtgaatcggcactgatgatttccgtatggagttcggcggccaaggcggctgcaaatggagtctttcctgaagcggtaggccctaatatggcgattaaatcatagtctggcatatataagttcttgttaatctcactacaaagatagtgcaaaccgaatgcagaataaaatgaactcgttcattttttatgctgaggtgcagcttatcttcgtgttagtgcaaagataatgcaaactgggagtataatggaaagaacttgctcatttttttacgtgatgctataccttcttttctactttgaagcagaaaaagtgaaaaaggacgtgaaaacgagcattaatcttattaaaatgtgttatgaaacatgctttttttcttggaaagtttgtcaatgtcccaaaagtccgtacatttgcaatgtgtttttcatagtattagatttaaggttaacaaaggttggagtacagcggtactcctttttttatgccctaaactgaactttggcactttttttctatatttttgcactatatattgaatgaacaaacatattcacctcttatgaagctctgtatatagctacgctcaacgaatagccctgcttgataaagctattcagctatctggcaaacgatgacccgtttgccacagagattgtgtatccttttattcatgaatttgcaggatggcatgctgtacttgtacagtgtgttgttttgtgctattttattgttgagcaatgcattatacatataaacagatatggcttatcaactttccggtaatgatgagcattttgatggagcagctgataaatataaccgatgctgttttcttaggtcacgttggcgaggtggaattgggagcatctgccattgcggggatttattatttggcggtctacatgcttgggtttgggtttagtatcggattgcaggtgatgattgcccgaaggaatggagaatgtgactatggtaaggctgggaagatattctttcaaggtttcttctttttatcgggattggccattttgctttgtctgctgatgcaggcaagttctcctttcatattgggaaggttgatttcctcgccggagatttatcgggctgtaattcaatatctggactggcgcagtttcggtttgctgttttcgtttccgtttttggttatccgttcttttcttgtgggaataacatgcactcgggcattatcgtgggctgctgccgttgcagtagtgattaatattcctttgaattatattctgataattgttggaggactgggaatatcgggagctgccattgcttcttctctggcagagatgggttctttggtgatgcttcttttctatgtatggctgaaaatagataaagggaaatatggattgaaaccggtatatgacggaaagctgttggtggatgtgctgagcttgtcggtatggagcatgcttcatgcctttatcagcgtggctccgtggttcttgttttttgtggcggtggaacatttgggtaaaacggaattagccatttccaatattacgcgaagtgtatctgctgtcttttttgtaatagtcaattcttttgcggtcactacgggttcgctggtcagtaatgcgattggggctggagaaaggagggctgttttcattatctgccgtaagatactgaggttgggctattctgctggatttccactgataggggtagctgtatgttataatcgcttgataataggaatctatacagataacgaactgttaacagagcaggctttcatcccttttgttgtgacgttgctgaattatacctttgccttgccaggctatgtatatctcaacgcagttggagggaccggtaaaacccggattacttttcttttccaagtgactaccactgtcgtgtatctggggtatctttattggttaagcgcttgcactcatgcatccttggctatttacttaacggcagaatacctttttgtgattttgctggcactgcaatcggttttctatttaagaagtaaacaatattagaaacatatcgaattatgatgactaaaatatatccgcgtacgggagataagcaaaccgtatatcttaatgctgttgtaaaggatcctcgaatagaggttggtgactatactatttataatgattttgtagctgaccctttgttgttcgagaaaaacaatgtgctgtatcattaccccatccatcaggagaggctggttattggtaaattctgttccattgcttgcggtacgaaatttctgttcaactgtgccaatcatacgttgaaatctctgtctacttatacatttcctttattttacgaagagtggggattgaagaaatcggacataacggatgcatgggatgacaaaggagatattataataggtaatgatgtttggattggttatgaagcggtgataatggctggtgttcatataggagatggggcgattattggtgcacgtgctgttgtgactaaagatgttcccccttatacaattgtagggggaactcctgccaaagaaatcaggaaacgttttgatgaggatgtggtgaagaaattattgcggctgcaatggtgggattggtcgattgatgagatacgctgttacttgccgcatcttgtacaaggctgttgggatagatttccttaataatccatcatcagtgagttgccggtcttgcctcgtgaaatgtcaaggttaggcggtgcatagctctggttacagctacataaagcatactcttgtcaatctccgaacggtaatttctctcatccgtctgtggaataatgacttcgtcaaactcgagcccttttgccatgtgggcagaggtgatgacgatgccttgcacaaatgcggagctttgacttgataggaagctgatatcattggcatatgatttcagcatatctgccatcttcctggcttgctgctccgtcttgcatatgatgccaagagacttatatccggatttccggtaagtggagattagccccataatgccggacagttcttctacggcactgccgaactgcaggatttgtggcttttctccatgccgggcaaccggttccagctctgcgttaggatgaatcttttgcgcaaaatccgtaatctcgaaggtggaacgataactcttacacaatttcatgatttcacttgcagtaagtgacttttggatagtttctgctgtggatgaaccataaggattcacggactgtcctgcatcgcccaacacggttttccggcatggaaagagtttctgtattaccttgtactgtatgggcgaatagtcctgcatctcatctatcaacagatgtttgactctgaatggctggttcccgtttccctccaatgccaagtgtaggtatgccagcggtgccaagtctgagtattcgagtgtatgtccctttcgcattttgaacattccgggattatttgtccatttaaagaaatctttgtagacttgaatgtcgttattgcctgcaaacattagtctgatttcttttttcaaaaggtttctgccggtggtggttaccgtaaaggtgtattgtattttcaacatatccagcatataatcagccatagcatcaaatcgtcggcgtatgggataacggttgaaacgtaggtactgttcttcgataaacggggcaggtatggtgatgtatttggtcagcttcacgtctgctgccttgaagtaggtgttctctatgtggaggataaacttgtcaagctctgaaatgaagccgaaagaggctttataggctattctgttgatgaggcttgaggatggcttttctaacagttcattcactagcccgaagtatgtttggtacttatatttgtgttccaacactccggagagtatttgttccatactggtttcgggcacggtttcttccccaagttcggggaggacgttggagatataatcggaaaacactttgttgggggagataatcagaatatcttttgatgagatgctgtctctgaaggtatagagcaggtaggctatgcggtgcagggctatggatgtttttccagagccggccactccttgaataataagcgtgcggatatcttcgttgcggataatccggttctgttcccgttggatggtggcaacgatatttttcatcttgtcatctgcattggaacttaactctttttgcagaatgtcgtcatggacggtcagggcactttcaatcataaattccattttgccgccccgaattctgtattggcgttttagggaaattactcctttaatctctcccgatggagaccgatagcctgcttctcctaattcatggtcatagaacatgctcgaaacgggtgctcgccagtcatggataagggtagctcgactttccgggtcatagaaggtatggatgcctatataggtaggcatcactttgctgttttctttcttttccaaaaaatcaattcgtccgaagtaaggaatggcaagtatcttggtgagccgcttacgcttgttgattacactttcccccaaggcaaaatggtttaggatgctttcgcgcatggagcgtatctcatgcgggtcgatgtctttgttggaccagatatagtctttgtattctgccaaggtgtcgacgtggtctttcactgatgcgtcggtattaccgataacctttttcagaaaactgattatttgctttaaatattctttctcttgtttctctgtttgattgaatgccataattagttgttgctaaaagataagacagtgtgcaaaattagtgtattgtatcgggaagggaaatggctatttatagctatatactgggaagttttatatctttgcacattcaaaaaagtggaggtaaatggacattcatgagcttgcaaggcagaatcagcaatctgcatggaaagtattggaagatacccgtattattgaagcatgggagcgcattggagcaaccgttcgtttggtgggctcactccgtaccgggctgttggcgaaaagtagggatatagatatccatatttataccgataggttggatgtaggagagagcttttcggtcatccgggaacttgcggaacggttgcctttgcaggaaatacaatataggaaccttatccatacggaggaagagtgcatggagtggcatgctttatataaggatagagaacagaatacttggaagtttgatatgattcacatccggaaaggttccaggtatgatggtgttgtagaaaaggtgactgccgctattgcggagcgccttactcctgaaattaggaaaacgatattgcaaatcaaattcgatgtgccggatggtgtaacgattccaggtatagagatttatcatgctgtctttacgggaggtgtccgcacttataaggagcttgaagagtggcgcaaaacaaatcagttggcggacagtctcggttggcttccgtaatcttagaggtagataccaagattttctactatatggatggcttccattatattgttggcatctaacttgcttaggatgtttttccggtgattgttcacagtatagatgctcactcccagctggtgagcgatttccttgcttagaaaaccttgtcggatgagtcgtaatatttctttctcccggttggataattgtttgtcaggagaaacagtgcatgttggaagcatctctcccgtttttctgttcaccaccgtccgtttgattctttcgataggggtctggtcgggaagtatgtccattactcccatgattatccaggctttaccattccggtctgtttctatgacttgttgccggctacttacattgatatactgttgccgtgcattcaacatacggaattgaaatatttgccggtagtcatttctttcttccggtgggagtgagtagatgaactgtccatgctcgatttggcattccgtgagttgcattctgtcatcagggtgtattctctcttccagtaaatcgccttgttgcctgattgtctttatccaagtgggattgtatccgaaaagatgggcaaaactgtcggatgcaaaatcgtatctctctttaaatacgtcaactgtaaaaatacagctctgactcatttgtgagaacgcttgcacggatattcttttcttgttccataaatcatagtccacatcgggaccgctaatctgctgtcttgcccataattctttgggagttgtcttgttggtagtcatggaacaaagataactgataattttcttttgagctttatcttttacgggataatattatttctaagaatatgttgtagggttggattaagtggctacccttgtaggccgtgtcattggggacgccgtgaatgaaaagcaaacgagtaataaattcaatatgtgataagatgaaagatataccggcagacagcttaataaagaattattttcctgtagattatatagattctttttctaaagtgatggtcactgggcaggctttgacaccggaagattttcgcaatcttgccttcagccgatttcctaagtggattggttggctcatgaatttcaggaatgcgattgtaaagccattaggactggatacagcaaccagatttacagatatggtcttggataaaaatctgcatgaagaaattctcggaatgccggataagcatcttgatttccatgtgtccatgtggtgcggggaatatcacgaaggaaaacaagaacttcggattactactgttgtgaagtacaataattggctgggaagggcatatttctttattatcagaccttttcatgggataatagtaaagtctatcttaaagcatgttgctggggatagggggagtgggtgtaaataaatactcccattgaaatattatcatttcaatgggagtatttatttgagtggtgccaccaggaatcgaaccttttgcttcggtttattctaactccttgagtgactgcacattttttgctttatcttttatgaaaaccattgaattggccttacgctaaattcattgtttttctttactaatc

SEQ ID NO: 4448 - DNA, 5215 bp, Unknown
  gut microbiota DNA sequence
ggtgccaccaggaatcgaaccggggacacaaggattttcagtcctttgctctaccaactgagctatggcaccatgtttatctcttttgcggttgcaaaggtagtgaaacttttggactatgcaatagctttcataataaaaaacgctgataattggctatatggctaattatcagcgtttatgatttgagaaaaaatactgaaaaagttttatagttatgctttttccgcttcttcttccttcaaaggattccatccttgtgctttgagttcaaactcttgaccgtcacgggtaattagggcgcagcctaattccggtttggtgatatggccaatcagcttgacgccttccatttcggcaaccttttcatggtcggcaatggggacggtgaacaataactcataatcctcgcctccgttcagtgcacaagtgctcaggttcatattgaattcttctgccattacagccgtctgatagtcgataggaatatgttcttcgtaaactcggcaacccactttgctttgggtacagatatgcagtaattccgaagaaagtccgtccgatatatccatcatggaggtgggttgtataccttcttctgccagtttctgaatgatgtcacggcgtgcttcgggcttcagttgacgttccagaagatactccttccccgagaagtccggttgcaagtctttgtcacctcctttgagcaccgccttttcgcgttccaaaagctgtagtcccatgtaggcggcacccaagtcgccgctgacgcaaatcaggtcggtttcgcgggcaccattgcggtagaccacttttcctttctcaccctcgcctatgcaggtgatgctgatgctaagcccagtataggaagcggaggtgtctcctcccacgatgtcaacatcatattcttcgcaagccaaacggatgccggcatagagttcctccatgtcttctatactgaaacgcttggatatgcccaaggaaacggtaatctgcttcggtgtgccgttcatggcatagatatcagagaaattgactacggccgatttataccccaaatgcttgagcggtacatacacaaggtcgaaatggacgccttccatcagcaagtcggtagtaacgagcacttccttttcggccgggtaggagaggacggcggcatcatctccgacaccatatcggctcgactcgttctttagttcaatgccttcggtgaggtgtcggatgaggccgaattcaccgagggtagctatttctgttctcatgctttcttatgctctattaatcaattcacgcataatctctgtcattctcggttgcgcctcgtccgcagctttctgcacttcttcgtgagagacttctacgattttaccttctacccccaagtctgtaatgacagatacgccgaacactttgattccgcaatgatttgccacgatgacttccggcacggtggacatgcccactgcatcggcacccagaatatggaacatcttgtattccgcaggtgtttcgaatgtgggaccttgcgtaccgatatagacaccgtgctgaaccttgatgcccttttctgccgcaatggcgtcggccttacgaatcagctctttgtcataagcttcgctcatatccgggaagcgaggaccgtaaggtatgtttttgccacgcaatggatgttcggggaagtagtttatatggtcggtgataatcatcaggtcaccgatcgcaaagtccggatttgtgccgccactggcattggaaacgaataaggtcttgatacccagttcgcgcattacacgtaccgggaaggttacttccttcatggaatagccctcgtaaaaatggaaacgtccctgcatcgccatgatgtctttatggcccagtttgccgaagataagttttccgctgtgtccctctacggtagagatggggaaattggggatttcttcgtaccttatctcatacttttcagtgatttcaccggcaagactgccgagtccggtaccgaggatgattgctgtctcaggctgggtgtgcatctttcccttcagaaaggctgctgtttcttgaatgcgctctaacatagccaataatgttttggttaaatatatattgttgattttgtaagatttctatttctatcggcagcacgtagatgtacggctttagtgtttcgtccagtgcgggatggagtttcaaccttgccgcatctttctccgtggtgattatcagtcttttccactcttccaggtgctggaattgttcctttatttgcaataaatccttgggagtaaagtcatgatggtcatcaaatgccagcaatttgacgtgtggcgtgtaagattccacttctttctgtaagggggcgggggaggcgatgcctgtcaccagcagtacttgctcgtctccggtgagggaggagagcactttccggctgttcgttttctcgggaaatagcggtgtcaacattccatagcggaatctggagaaatacagttgttggtatggatagaggtggagccgtttagctatgatgttgaagtctatcggcttgatatcatccggacatttggtaacgatgaccatctgtgcccggtttttaccgcttgaaggttcgcggagtcttccggcagggagcaaggcatcatcgcacagtaaccggtgaaaatcagttagtagaatgttcagcccagcttttacatggcgatgttggaaggcatcgtccaggatgatggcttctacagtgggattttccagtttcagcagttgctcaatgccgtggcaacggttttcgtctaccgctacccgtgcattggggaatttatttttaatttgatacggctcgtcacctatttggcgtacattgctcttgtcatcggccaatacatagcctcggcttttacgcttgtaaccccgactgagggtggctacatttactccgtttttttgtaatagctttatcagatattcggtatgtggcgtcttgccagttccgcccacagcaagattgcccacgcatattactggaacgtcaaaactctttgaccggagccagccccagtcaaagagtttatttcgcaagcatacccctatcccataaagccatgataggggatatagccaatgatatatcttgataaagttttcctccatttattgaatattcagttcaaaggggacacgtgcttgtatacggtcacatttgtcaaaattctccaggacgctgaactgctggtatatctcgcccattgtgcctttcagcatacgtgctttgatgtagttacccggattggtgttcatcagactttcaaagaaactttcctttttcggatagctcatcacggtataggcatctactccggcctttgcaatggcaatgtccaaagctttgtccaaaccacccaattcgtcgactagtcctagttccttggccttgcttccggtccatacacggccttgggcaattttatccaggtcttccttgctgatgcctcggccatcggagcagcgggtgaggaagaggtcatatccgttgttcacatacatttgcatcagccctttttccccgtcattcatcgggcgtgtcagcatgccgaagtctgcgtatttattggttttcactacatcaaaatttaccccgattttatcagtcagcccctttgcgttggggaacatgccgaagatgccgatagaacccgtcagtgtggtaggctcggccacgatggtgtctgcattacaagaaatgtagtaacctcctgaagctgcatagtcacccatggaaacaatgactggtttctctttcttcaattcgctgacggcataccatatctgttctgaaccataggcgcttccgcccggtgagtttacgcgtaatactacagcttttacatcttcgtcatctttcagcttgcgcaggtctttaatcacctttttagagtcgatgccttcttcgctggaggcagaagatgaaccaccgtcaatttctccataggcatagtatacggcaatcacatttccacttttgtctttgggaacattcttctttacgttaatcatgtcctgcaaaccaagtacgggcatgcggtcgtctttgtcgatgcctaccatcgctttcaggtagttgcgcacatcattcttatatattaatgtatcgaccagtccgcattgcacactttcttctgcgggatagaacatcaacatgcggtcggcaatggcgttcagtgagtctacagatattttgcgtgattctgcaacatcattggtcacttgtccccagatggaggtcaggtaagcgtcgatttgttcacggttggcagggctcatttcggtagagatgaaaggctctacagccgatttgtaggtacctactttgaatatctgcatttctactccgattttggccagcaaatccttgaagaacatgggggtagcggccaagcccctccactcgaccataccttgcgggttcagcaacaccttgtcggctacacttgacagataataaagaccttgggaatagctgtcaccataagccacgatgaattttcccgattccttgaaatccttcaatgcattgcgtatttcttcgcgtgaagcaaatcctgcacccagcgaagtcgcttctatatagatacctttaatgtcgtcattctcttttgcttttttgatagaagagaggatatcatccaggccataagtcttataattgtctcccataagggcatcgaacggattgtcttggctgcgttcagccagtgcaccattcaaatccagcatcataatggagtttttgcgtacttgcgtttctgactccgaagatgataccatgctgaaaaccaccagaatactgctgaaaactaaaacaacgactgatacgatgatgccggtaatggtggcaaacgtaaatttcagaaaatctttcattgcactttattgtttttagtatgctaacttttaaaagctaacaaagataaataattaggttgatatttaccctatctgtcgctgagtttttcggtttgtcacagtattatgggagatttcattctcttttcttttatctttgaagtatttcatttcgttctttatggatagttagtttctaaaatgccagatataattgctatctctttactttctgagtctgtttctctaaaaactaatcttaccacagcagtgctcttttcttaccacagctgtggaaagaaagaaacgcggg

SEQ ID NO: 4449 - DNA, 15787 bp, Unknown
  gut microbiota DNA sequence
attccttgctgacacagtttaatttacatcctccattaatctgactatctcccaacaatagacgaggtaagcgtttctgttggttgggtgtaagagcttgatataatatcctttcactttaatattcaaatccactttcataaagaggtgggacaatgttataaagttggggcggtctatgggtaggatgcagtaaagacttctcattgtaaaatcaataagaggatggttgatggcttccctgtatctctttctaatataatcctgcctaatgttacttgtcctgttttgcaagtactttaattgtatcttcatattcattagttgctgattgaacattgttggtaaacactaaatattttttctcacgttccattttgtaatagtaggcagtgccaaaatatatcttggcttcctttctgttgtggaacttctttcctgttggtagatgaattatcatgtcagtttaaatattagtaaattaataagatagtttctgcaatgaaatataataggtagtaacctttccattcttttttctccttgtctttagatagttattaagattagcccacaatccaatgtgaaccttattatctttcactccctgtttaagagcctttgttcttatctgttcataagtaaattctttcattttagatattctgaatagtttgtagtctgcttatctgtgtggtgagattatctgtttgtggtacttattttggggtcaacaataggtcaacaacgaagcaaaacagcctgtttcttgtcagtatttcgaaaatccaaagagaagaagtcctaataaaaaagccccataaacacttgtttatgaggcaattctttgtggaccagcctgggcttgaaccagggacctccagattatgagtctgttgctctaaccaactgagctacaagtccgatgcatccttgcttggatagcggggacaaaagtagcattttctattgaaatatgcaagacttttggataaaattccttataacctttgtccttagaacttataagttcgttttggattcttgggaaaccagccttttttcactcgttcttcctgctcgaatatctccttgatggtccagaacgaggaaaatgcaaagacgcccaaaagggaggctatcatgatgttctccgtataaagggaggcaatgatgccgccgatgccgagtaaaaggaaaatccaccagcacttggtgccccaataatattcggctttcacaactatggggtgaaacaagccgatgatgaggaatgtgcagatacctatgacaaggcccgacagatgatattcgttcaagaaatccattgttgttcgttatttctcggggcaaataggaatctccttcttgatgctctgttccagggaaatcaaggtctcggtagcggttacgccaggaatctcctgcatcttgttgttcagcaaatccatcagatgctcgttgtcgcgggcatataccttggtcagcatggtgtacggaccagtggtgaagtggcattctacgatttcgggaatcttgcccagctcagcaactaccgtcttatacatggagcccttttccagcttgattcctacgtaagtgcaggttctgtatccaagggacttgggatttacatgatagcctgagccaacaataacgccaaggtcaatcaggcgctgtacacgttgatggatggcagcacgtgacacgccacattcagcagctacgtccttgaaagggatacgggcattttgggagatgatttccagaatctgccggtcaagattgtctattttttccataatagtaaataagtaaagttcttgttgttatcaaatagtaagcaaatataggactttattttaatttatctataaaaagggacggaaaaatgaataaaagtgaggggtaacgataaggcgcggattacgcggatttcacggatttagtttaccaaatccgcgttattcctcgtaatccgcgcctaaaagaagtatcaagagggttttgcccctcccttcggattgttacattacttctcgatacccagcagttccacttcgaatatcaaagtagagaacggcttgatttggctaccggtttctcttgaaccgtatgccaggtcgtaggggatatagagttcccacttagagccgacgggcatcatggtgagggcctctgtccagcctttgattacctggttggcacggaaagtagcaggttcgttgcgcttgtaagagctatcgaattctgttccgtcaatcagcgtacctttgtagtttactttcaccttgctgctgtcggcaggaacggcaccgttacccttggtgatgattttgtattgcagaccgctcggggtagttactacaccttctttagccttgttctcagccaggaacttttcaccggcagctttgttgtcagcatacttttctgcagttgctttttctttgatggcatccatctgagtacgcatgtactcttgagctttcatcatatccatagcaccacccttgccgatgacacctgctacgaaacctgccagcagattttcgcggctgatgctctgtgtggagtcgttgccgaagatttgttggttgaagccttccacccattgcttgctgaccatctggcctacttgcagaccggccatgtaagccacgtctttcttatcgattttggctgcgccttcgttgaaacctttcaggaattctgacatctgggttgagtcaatgccttgttgtgcaagatactggtccaaaccttctgtacgcgccataccgatggcgtaagataatgagtcgatgtccgtcttcaaatcagctttcggactttgagcagtacaagatgccatgccggcagctactgcaagagccatgagaaatgttacttttttcattttgcttttacttgtttgtttatttagataaaattttctgtaattcgacttcgaatacgagcgtgctgtggggaggaatcatctcgccggcaccctgcgctccgtatgccaggtcgctggggatgtagagtttccacttggcaccttcgggcataagctgaagggcttccacccaaccgggtatcacttggtttacaccgaatgtggcaggctggccgcgcttgatggagctgtcgaacagcgttccgtcaatcagtgtgccttcgtagtggcattgtacctggtcggttgctttggcatagtgaccgacgtttccttctgtgataacttcgtattgaagtccgctgggaagcgtaacaactccctcgcgttttttgttctcttccaggaactttttgccggcttctatgtttgctgcgttcatcttctcctccagttcggcgaagtacttgttgacgatgtcacgggcttctgtgtggctgattgccgtctggttgccctccaaaacgtctttgattgcttgtgcaaagtcatctactgcaatgcctttggcacccatgcttaaaagattctgacctattccaaggccgatagcataactgaatttgtccataagattcttttgttgacgaccggattggtttcttttccagtctattgcaaatttacgaatggcaaaagtacgtcttttatttgaatgataaggcttttaagtatttaatttttcttatttatatcacaacttgaacattcttcttatatttgtcttactttaataaaggaaaggagcggaaaatgaagaacttggtcatattgtcgggtgctggtatgagcgccgagagcggcatcagcacattccgtgatgcgggcggattatgggacaaatatccggtggagcaggtggcgactcccgaggggtatgcacgtaatccggaactggtcattaatttctataacgaacgtcgcaagcagttgctcgatgtggtgccgaatgccgggcatctgggcgttgccgacctggagagggatttcaatgtaacggtcgtcacccagaacgtagataatctgcacgagcgtgccggcagtacgcacgtgatacacttgcatggggaactgacgaaggtttgttccagccgcgacccttataatccgcatttcgtcaaggaactggcgccggaggaatatgaagtaaagttgggcgacaaggcgggcgacggtacgcagctccgcccgttcatcgtgtggtttggcgagtcggtgccggagattgagactgccatccggtatgtggagcaggcggacatcttcgtcatcatcggcaccagcctgaacgtttatcccgctgcgggactgctgaactacgtgccccgtgccgccgaagtgtatctgatagaccccaagccggtggacacgcacgtcatgcgtccgatacatgtcattcaaaagggagcttcggaaggggtaaaagagttgaaggcgctgcttacagttacccagcctcctttgccttaggacttaatctcctacgtcttaggacttagcccctcacggtataggacttaatatgcagaacatccggatgtctttctccaaaacacccggatgttttaccccaaaacatggggatgttttgccccattacatccggatgttttaggtgaaaacatggggatgttttgggtactcactcctatactgtagagagctgggtataggggagattcccgcaaggtataggtcttgcgggaacaaagtatatttgtcctcgaaatttgtgctatttctttatcacggcccgtaatacgaaccaggcatgatgggctacggtactcatcagtccgtaatgccgcgccatgatgcggaagcgttcgcgcagggatgcttgccggttctgggtggtcattccctcttccagatagtcgatgagggtgagatgggtattgtgcaaggtccgtgccttcttcatcacccggatgcaccagtcgaagtcggcggagaagcggtattgcaggtcgtagggttctacaagggaagctttggcaaagaaggcctgatggcagaccagcatgccctgcttgaagcttcgccaggtaagcacttccggggcggcgaggcggcgcatgcggatgaagtgaccttccttgtccaccagttccgtttcgccgtacagcacgtcgggtagttcgttgccggagatggaacgcaccatctgctgcaaggtgtcgtcctcgtggaagctgtcgccggcattgaggaagcagaggtaatcgccggtggcaaggcggatgcctttgttcatggcgtcgtacagtcccttgtccggttcgctcacgatgcgggtgatgcggtcgcggtaacggtcgatgatggagagcgtgccgtctttggacgcaccgtccacaaggatgtattctacgtggtggtaggtttgcgagataacgctttgaatcgtgtcctccagtaccgcttcggcattgtaggtcacggtgatgatgctgaatttcggggtggggtggttatgcatttcttccggttactttgttgtaaaggtcaatgtatttcttggcgacgacgttctccgaatagtgggagatggctttccggcaggcttgttccgagaggctggggtagtcgggttcggtcagcgtccagtagatgccgttggcaaagtcttccgaggatttgtattgtgccacgtagccgttgtgcagatggtctatcatctcagggatgccgcccacgttgaatccgacgcagggaatgccgcatgccatggcttccatgatggtgttcggcaggttctcttccagcgagggggtcacgaagatgtccacggcattgtagatgttcaccagttggtgttcgttgctgacgaagttcagcgggtagactttgaatggaagcaggttttccagttgttgcgattggttgccgaagacgacgacacccaactgttcccggagttcgggatgcttgtcggccagcagtcggcacgattctatcaagtagtcaatgcctttccgtttgtccgtaatcttcaccgagccgaacaacatgagctttttgtcttgcggcagtaggcaacggctgcgggcttcctgtcggttgcggggcttgaagaggttggtgttgatggggttggggatgcacgtcacggcatgtccacagaagagggcgcttgtccgggcacgttcttccagccagcggctgcaggtgacgaagttgatgtgacggttgcgatacaatgcctgctttttgtggaagatgcggtaggaaaggtcacgtttgcctctgcctccgtggatgaaggggcagttgtggcattcctgctggtagtgggtgcactcgcgggcatggtgacagatgccagtgcagggccacatgtcgtgcatggtccagacgacgggcttgcccgaggcgagaatcttctcgatgttcttcagcgagagcatcccttggtttatccagtgcagatggatgacgtctgcttgctggaattcgggcagtgaggtgatgtctgtccccgtgttggcaatgtctacggcaaagatgttcttcttgttgaagcggttggcgctccagatgacaatgcgctcccagacgaacttccacaccatgcgccagttatggtccagtgacacaacggagatttggtcggtctgcttgtcgcgtaccagcagcttggctttgatgccgtggttcttgagtgattccatcagacggctggcggcgatggctgcgccgccgatgcgttcggatgtattgataagtagtactctcatgactgttgttcgtttcttcttttttgaatgttttttcttgttacagatgccggtcttgtttcatccatttccggatacgcttttgcagcgtttgccatatgatggtgaagttgccgtaccgtaggttcaacgccagttcctcgaacgaccgtgcaatctttatccagggatgccgccatgccatgatgcggtaaacgctatccttgtaggcagtgttctcgatgacgtggcgagggtgcttcagcggaaactccacttcgtagcgtttcatggtgaagatgcggcggtaaccgcgcggcatggtgtgcacggagccggcaaagtgggtggagtcggcagtggctcccagattgtttatcatgttgcgggtgggcacgatgctcagacccgaattgaacaacatggaagcgtggaagatggtttcgtaataggctttcccgtgttcgcggtggcgttggcacatgtagatgaagtctttgcggtagcgccgtgtgtggatgaggttcttcagttgccgcatgttctccttgtcgtccaggaaggtgtagaattcatcccattggtccgtcacccgccgccagctcgcccatccccagatggagaaggtggtggcgaagaagtagtcggaagtgatgtccggtgtaatctcctcgttgttgaatccggcaatcatgctgatgcgtgtgtcgtgctcatacttgtcgagcagttccttgcagaagccgaagaaagagacggcaggcacgtcgtcatcctcaagcacgatacatttgttcgacaaggagaatgcccacttctgtgccatgtattccgatgggtcgcagccgtagttcttctcttggtagttgtggtgtacttcgcattcccagtcgatgtctgccactactttgcgacaagcttctatgcccggcatgtcacgctcgccgcgcgggccgtcctgatagagaaacagtcgtgcggggcgtgctttcttcacttgttcgaatacttgcgccagcagtttggggcggttgaagaaaagaatcagtacagatacatctacaagggctggtttcatggcaatggttttagttccgggtgaatatagcaggcatggactatctgcttctctttgggaggaatgtccatgtagtttttatataaatctttcagataggcgtccacattgcccggtgccgggaaatcttttccttcgaaagtgatggtggagagcggaaagacggaatctttacggtgcatgatgccgtatccgttattgatgagtatattcgaaagataggtccctttggggcgtaccaggcagagcattgcccatatccctttgaaaagcgcatacttcatgccgaagtagaagaattctgcaaaggagcgcagcgagtagtagtgttgcgcgtgtaggatggagtaactgacggagatgcctttgcacagcttctttgcccatgggcggggcacggtggggtagtcgatgaaagggaatatatctacgtatagtcctttctgatactctacgctgaaggtatctcctgcttcaatatagattgagtttaaatcccttatcttgacgatgggctctttgctggtagggtcactttccggggtttgcaggaacagtgtgtcgggtagttcggagggggctaccttcatgaatgcttgcatgtcttccagtgtcatgccgatgtctatgtcatcatcccaggggatgaatcctccatgacgcatggctcccaacagtgtgcctccgtcaagccagtagcttaacttgtgtttccggcagatgcggtccacctctttcagtatggaaagttgcttcagttggcaggcgcgtaggttgtcggcaacgtagtccgataggtattggttcttcatacttcttctctttttacgtcgatgacttgtccggtgaattcggaaagcagtgactgtatggtggtaatggctacttgctcggaggtcagcaaggtgttatccggttcgatgccgaagttatggacacgcatcggtgtcttggtacgttccggattgatgcagttcacgctgatgccgaacggttcccattcttgtgctatggcttgcacaaagttcacgatggcggctttggtcgatgaatagatgctgtaaaaggcacgcccccgagtgtaggaactggaagtgaagaatacgagtttacctttgctctccttcagataggggaaggcttcaagtgccacgttgacagtacccatatagttggtgttcacagcgttgcagatggtctgatagtcgcaactcatcagaggttctttattcagcagtccggcagtattgataatgtagtctatccgtccacattggcggtacacttcctgcaaggctttgctcacctgctctttgttgcctacatccgttccgttcatgctgcgcgaatagcagaatacgttggctcctttctctttgagtagctgagccacgtctgcgccgatgccgtaactaccgccgaatacgactgcaacccggttcttcaggttgttttcctggtcgatgggcaaggtgttcagttcacttttgcgcagctggaagaatttgtccagcagataggtgtcttccttataggtcagcttcatgttgctttcttcgccgttcactacataaaccggtacttccggaaggtatttcactactacgccgcagtcgtcggtcactttaaaggccgggtcttgcaaggcaatgtcataggcatgcttgatggtttccagatggaatgcttgcggagtctgtcctcgcatcagtttgctgcggtctgggatttcctgaatgaatctgtcattgacttgtataatggtatccgtggcgggcattgccacatcaatagctttgtaggtttccaatgcggcaataacgtcattcagaatccgctggctcactaacggacgtacggcatcgtggaatatcagattgacgtcagtgtcttcgtaggctttgatggcggataggctggaatgataccgttcttgtccgcctttcaatatcttcttgaccttcttccatccgttcttgatgatgatagattcgaaatcggagatatagaaaggattggatacgatagctatctcgtgaatatgtggattgctttcgaaagtatcgatggtgtgctccacgaccatttttcccgctaccttgaagaattgcttgggagtggacaatcccagacggctaccgactcctcctgccaatatgactgctacattctttttcattgtatcaatagaaatgtgatgctgcaaaaatacgaattaattgcttctttgcagcattccggttgggataaagtggcatatctgttgggataactctctttttattctcttcttgtctgctctatggcttccactaatctgtctgatgtgccgcttactatttttcggcagaacatctttccagactgccgcaataccggcaggtcctcgagtgtcatcacgcggatggatgcgccgtagtctatgtagtgcaagggggtgagacgggtaagtccggggtattctccctctaaaagaagcccttttgaggcaaaaggggagttgaatacgatggtctgtatgcacagttcgctgggtacaaagctggttctgaaatacttcaccagcttctcctccgtgcacaacttttcatatacatatcgtgcgcagggcaacgtgatggcccaatagtcggaaccgaaatagacatctgcctgcttgccttccaagggtgcaaaaggggctttccggatggggagtatctgtaccagcttgcgcgatgctacgatgagtttgttcttccaccatatactcttccaaggcaggtcacggaaagggtggtaatgggttatcttgtgcaactgctgtttcacggtgcagtgtgtcaggttgaaaccgccgatgaattcagtgtcttgatgctcctcgaaatagtggtggatggcgttgttgttccataacggatagtcttgcccgctcaggcatactacgcgggtataggggataccgctgtgcaatacggcggcaagcaattctttctgatattccacttgttcccatcctccccagcttatccggtggcggggcacgaaagtgaccttgtctcccaaggcttcttcaaaagggtgtatatcggcattgaggtcgatgtgcacgtagaagtctgcccggtcatccagtgcggcaaccaggcgtgccaagtgtggggcatccttgtaggcggatatgatgtaggctatgcggctcatgctctttttttctttaagaggaattcaatgctttcccggaagatggtagattgtagtttccacaaaaccagtgcataaagcccagctaccataatgattttggctgccatatttaagtataggttttctatgggctgagtagcatagtgagttgacactacgagtacaatggatagggagagataaggagagatgtctttcagcatatcgcgcagtcttaatcctatctccctcttgacaaaacggaaccatacaaacagccagccgatattgataatgacgaaaatacgcagcatccattccaacccgtatgggtatatggcacatacagctactatttgcagcaggctcaagctgatggtgctccacatatagatagaagaatgtccccggctgatgagcaggttggagaacagattgatgacgggaataaatgctccccaaatacataacagttgcaagatatcggcactgggcagccacttctccgtgatagtgattataatcagttctttcgataccaagctcaatcccagcatggcggggaaagagataaaggcggtgaagcgcagcagctttctgaatacggcaagttgtcgtgccttgtcgtcggcaacccgggtaaagacgggttgtgcaatgccgtttatcatgcccgtaatcgtggtatgtcccatgccgttccacttgtttgcctgcgtaaagttacccacttcccgttccgaatagaacttacccaacaagacggaaaacaaattgttattgattatggtgaagatattcgtaatgattatcttactgctgaaccctatcatctccttaatgggtgtgaagtcgaaccggaagcggggtctccaatgcgagaagtagaagttaagaatcgtcattacggtgatgaaagagatgctttgcaatgcaatcccccaataggcgaatccgtttgccgccaatgtgatgcccacaataccggagactatcagacttgaaatagaaatgacggtagtgtccttgattctgaggttcttgaatagatatgccctcggtgcaatgctcatgctggaaatgacgaatcccaagaaggagagacgggacagcggtatcagctcgggcgtatcgtagaagtcggcaatcagcggtgcggcaaagaagagtaatatatatatagtagtgctgcacatcaggctgaaccagaacacggcgttgtaatccttgtgcaaagtctccttccggttggtcagtgccgaaatgaacccaccctcctgcaaggcggcggcaatggcggagaagatggtaagcatccctaccataccataatccgaagcatccagcagacgggcaaggactattccgaatcccagatttaacaactgctgtatgccgttgctgaatcctccccagaagaggcctttggctgttttttctttgagtgatgtatcggacatagtttattggttgataaggcaacgagttaacaaggccacgaggcttttccttcctccttgtagccttgttaactcgttaccttgttactgttttatttcacctcgctgcccggcttcacctctttcagcagtgaagtcaccgccagcgagccgtcataattctcggcagagagaatcattccctcacttaccagcccgttcttgaattggcgtggagcgaggttggcgatgaacagcacttgcttgcctaccagttcttccgatttgtagtgctgggcaatgccgctgacgatggtgcggttttccagcccgtcggcaatcttgaacttcagcagcttcttcatcttgggcactgcctcgcattcaagcactgtacctacgcggatatccagcttttcaaagtcttcgaaggcgatggtcggcttgatggggtttgccttgtaggtggcggcttcgtttgccttcttggtggcaagcagcttgtctacttgtgcctggatgacgtcgtcttctatcttttcgaacagcagttcgggggtgcccagctgatgtccggcaggcaacaggtcggtgtgtcccagctctgcccagtcaaagctgtccatgttcagcatcttgcgaagcttctcgctgctgaagggcaggaacggttcgaaagcaatggcaaggttggcgaccaactgcaacgagatgtggagaatggtggctacgcgctccatgtctgtcttggcaagcttccacggctcggtgtctgccaggtatttgtttccgatgcgggcaaggttcatcgcttccttctgtgcgtcgcggaatttgaatacgtccagcaacttctccacttctgccttgacgtcggcaaattctttcagcgtctcgcggtcgtagtcgttcagttcgcctgcggcgggcactacgctgtcgaagtacttcttggtgagttgcagggcgcggttcacgaagttgccataaacggcaaccagctcgttgttattacgtgcctggaagtccttccaggtgaagtcgttgtcttttgtctccggtgcgttggcggtcagcacgtagcgtagcacatcctgcttgccggggaagtcaacgagatactcgtgcagccataccgcccagttgcgtgaagtggaaatcttgtcgccctccaggttcaggaactcgttgctcggcacgttgtccggcaggatgtagctaccctctgccttcagcatggcggggaacacgatgcagtggaacacgatattgtcttttccgatgaagtgtaccagacgcgtttcggggtctttccaccatttctcccatgtgtcgggcagcaactctttggtgttgctgatgtagccgataggggcgtcgaaccatacatagagcactttgccctcggcgccctctacgggaacgggaataccccaatccaggtcgcggctcacggcacgcggctgcaagcccatgtcgagccagctcttgcattggccataaacattgggacgccactccttatggtcttccagaatccattggcgaagccattcctcgtgtttgtccagcggcagataccagtgcttcgtctcacgcatcacgggctggctgccgctgatggcactcttcggattaatcaggtccgtggggctgaggctggtgccgcacttctcgcattggtcgccgtaagcgccttcggcatggcagtgggggcactcgccggtgatgtagcggtcggcaaggaaggtcttggcttcttcgtcgtaatactgcatgctggtcttttcgatgaattctcccttatcgtacagcttgcggaagaagtcggaagccgtgtcgtgatgcgtctttgaagttgtacggctgtacacgtcgaaggaaacgccgaactcttcgaaagacttctttataagcgtatgatagcggtccaccacgtcttgcggggtgatgccttccttcttggcgcggatggtgatgggcactccgtgttcgtcggagccgccgatgaagattacattttcctttttcagtcgcaggtagcggacataaatgtcggcaggaacataaacgcctgccaggtgtccgatatgaaccgggccgttggcatacggcaatgccgaggtcacggtggtacgtttgaatttcttttccattgtgttattatgtatctcttttgttatgaacgcttttagtggcacaaagatagctgttttctgcaaaatatgagtattcttccagattctttccagatttaggcttcatctttgccatacaaaatgaacaaacttggtattgataatgtaaaaaaacgaaatgactatgaaactggaaaagtacttcttattattggcgttaggcgtgtttgcctttgccttgcaaagctgtgatgatgacgacaacgacggaatctccgtgcccgcggaactgagtaatgcgttggccaaggagcatcccaatgcccagcgtatagaatgggaaacaaaaggtgcatattatgtggctgatttccatgaggacaatttcgaaaaggaggcctggttcaccaaagacggtgtatggcagatgaccgaaaccgacctccgttatgcagaccttcccgctccggtgagaagctcttacgagagtagtacctattataatgtatggaaggtggaagatgtagacaagctggaacgtaaggaaatggctgttgtctacatcatcgaagtggagaaaggtaatcaggaaatggacctctattattcggaggacggcattctggtgaaggaagtggccgatgcgcacaacggcggttctcccgaagattatctcccttctgatatttccgctgccatcaaagattttatagcagagaaatatcccaatgcccgcattgtggatattgaaaaagaaaagaacggtatgacggaagtcgaaatcgtgcacggaagtatcagcaaggatgtgatgttcaccgctgagggtgcatgggcctatactatctgggatatcagtaagagacatctggaggatgtagtgaagaacgccgttacggctgcccatcccggttatgtcattgatgatgccgactttattgagactcccgatggcagttactttttggtagagatggagcaaggggaaagggaaatctacgtaaaggtgacagcggaaggtgaaatactgccatagtcttatactgaatacttccctttaaatcagcgtattgtatttaccgcttgtttaccttctaatgtaaagccgtttaccatagggtgtaacggccgttactccatattgtaacggtcgttacaccatagtgtaaagccttttacctcgtagtgtaaatgaagttaccgtttggggtaaccggagttatcatgtgagtgtgtcttttcctgatttagctagacgctttttctttttataaccgatatcagtagacggttcttggaatgtt

SEQ ID NO: 4450 - DNA, 11031 bp, Unknown
  gut microbiota DNA sequence
aataatgcgtgacacagtttattttacactacctgattccgtatctgcgacacttctccccacacaggtttccatgtttcatcgaaagttgaagccccggcttccacaagtgtaaaaccattcatcaagcccgggtcacccaccaattccaagcccagtttcgatggattaaccacggctttctctttgtaaaacaactgatagaccggctctcccaaagcatttacggtaaacttaagacggagatttccatcaggcgaagtgataccttcggccatcgccacctttcctactaccacgaaaagcagaaagcaaatccacttcacagatgcataatgcatgttcttcatatttttttattaatggtttctaaatctatcattactgtttaggagtcaacttcagcaacacgacaccgtgtgcaggaatatcaaactgcatcttatccttggtacttccgatgtccttatgtttccataagtcgcgtactttgtattctttctcccagaagcggacatctgcaaaagagaggttttctttctgcaaaacggtttccacattccagggttgttcatcgcggttaaagaaacatactgcggcttcaccattggacaactgcttcacccaaatttcatgctcacccactttcatgtatcgtccaccttgtttgccaagcttgtcctgattcactgcaatcacttctttatttgtcaaaattccaagtgtctccttgtccattttacgaatatcattacccgcgagcaaaggggcagcaagcatacaccacatcgtgaaatgagagcgattctcttccatcgtcagcacaccattacccacctgaagcatgtccgggtcgttccaatgtcccggtccggcgtatttgtgcaagtcggcattcttgtcaatgatttctacgacaccgcatcctccccaataattaatacctttaaaagcattgataatgtcaccggtagtcctccaaagatgtccgatgccttttgcccatgtccaaggctggctgtttccccactcgcaaatagagaatacgataggacgcccggaagccttcagggcatcactcattgttttgtaggcagcttgaggattctggccttcatcaaaacaccagtcatacttcaaataatccactccccattccgcataagtgcgtgcatcctgaaactgatagccacggcttcccggtcgtccggcacaagtcagcgttcccgcacatgaataaataccgaatttaagtcctttggagtgtatgtaatctgccaaagccttgatgccggaaggaaaattcttttcatcaaccagaatgtttccttcattatcccggcctacctgccaacaatcatctatattgagatactcatatcctgcatccttcatgccggtagacaccatcaagtctgcaatctcacgaatctgtttttcattaatgttacaactgaagcaattccaactattccaccccataggaggagtcaaagccaaagaatcggtactgtttgcacgggcagaaatgacagtgcaaactacaaataataaacataaaaatctttttttcataatacaattgtttttcaaggaataattaaatatttcaagtttcgcaagttacctttgcgctttcaaaacaatctcaacgctcttcctccgagagagagcattaagatacaacagttcatcaacaatctgaaaaatttgagaaacttcagttattataaaacacaaaatcaatggttccttaaatatcagattatcggtcttataaaaccactatcgcaatgatgctatatcaatcaccaaccggctatcatccgtgatgtgtgtagtagtaaactttactttatcatccagccttaccttaatctctactgtagcattgccaaggatagtacctgccttgttgtccagtagaatttcaaagttcagtgtcgacttgttcgtcactttcaccagagcctgattgcctttcacctccttcacttcataagagaggcacgccttgaccagagatagcaggttcttctcagagcctatcagtatatccccgaacttcactaccgaacgcccggcaaggagagcttctttcactccttcctgagaacgttctttggcaaatacaatcgtcatcggtccactttgtttgtccgtacgatacgtttgcttataaacgccatgtatatcggtatttcccatatatgtcaggccgtattccttacagtaattaaaagctttcggatagtactcaaagccgttcaccacctctattccatgtatttttttttgcttaatcaaatctttatggacattatataaagtgcttgtgtcgttaggccaccccggatgattccacataatgaaggccccttgctccaaagcgttgtcaacagctctcagaggatcttccacgtccagtgcattggcatccgtcaagaagagagcattgatgtgccctatcggcttggaacgggttatctcggctccctgaattactatcagattggaagctttctctacagtctttgcccttttgtaagattcgttatggtcggccttgatatagtctttattggggcgatattctatatggtcggtaatggctatcacatccagcccgcgaatagcagcttcccacacccgattttcaggttttatatctccatcggagaagatggtgtgggtatgaaaatcacacttcagagttttatatccttccacatcggggatataaatatattcgcccgaataaggctgctgtgcttccggtaccttcactacttccaggccctgcaactgtgcagagccccgaagtgtgaaagccgataaaaaaaccaaagataaaattaactttttcattcgtctctctattttatagtttgctattttgcaggagtaatcttcacgaaggtgacaccgtgatagggaacttccgtccggaagatgccgttcacctctcccaagtctttctgtcgccacaagtcacgaaccattgcttttccttcaatgccaagctgtttcaaatcaaaatcaaaagcatactctctcatctgcatagcttcagcatcctcctgatcccaaagaatgaaataagggtctacatggaagaagcccaccgcataagaaccgtcgtacagttttttactccatacttggccgttctctaccatcatcttcttggcgggagccaccatggggtcttggctgactgctatcacttcgttgttggtcagcagattcagcgtaaaatcgtccatatttgccatgtcgcaacctatgagtaaaggagaagaaagaaggcaccacaaagaaatatgagagtactgttcgtctgccgtaagatatgaatcgtgcactctgcttccccagccttgaccaagcttgccaacaaccagcatgtcggggtcattgtttctgcccggagccgtagcatccgcacaaacatcctggaaagtacctatagctgtcacaacattccattcgtccgtgatgtcgcgagtagtgcgccattggtttcctcctgcttccggtgcccagttccacacattgggagcgccataacccacacagtaaacaatgtcacggttcaccttatccaatgccttgcgcatcacgatatagggttcctgaatagtcttctcttccgaatctttttctatctccaaatatccgcaatagtcatatttcaaataatccactccccagcgttcccatgtcttggcatcaatttcttcgtgctggtagctgcccacatgtccgccacaagtgatatgtcccggtgaggaataaataccgaacttcaagcccaatccatgaatatagtctgtcaatgccttgaaatcggggaatttatcgtttgaaagtatctcgccctgcttggtacgcgccgcagcttcccaaccatcatctatattcacgtattcccatccgtaggcatgcagtttttcgttcatcatgcgggctgcgtcacgcactttctcgtcgttcacagaaagcccccaacagttccaactgttccatcccatagaaggagtcaaggctatggcatcccctattttaacagttacctctttctgggccgtacctttgtcattggtggctttgagcgttaccttatactctccctctactgtggctttacccgtaatgcgaccggtaacagcatccaatttcacaccagccggaagcccttcggcctcaaacttcatggggcggttgccggtagccatcacggaccatagaaacggattacccggacgtgcgccatagaccagcggattgttgatgaccggactttcgggagcaggaggcgtaaggatatacttctcttttgccaccggttttgcccacgcaggaacaggtttcacatcgccacgggtcgttatcttcacattgagccagtcggcatggtcgtacataatgccgtcaccacattcttctaccaatagcagcactttgtccacccctttcaggtttacattaaactcttttacaggatctcctttctgcatcactccactcttccagagttccttcttgtcaccgagaatcttgaactgaagtttgcctgcaaacaagttcttgtcatcagctcctgccaaaccggagatagaaacggcctttccatccaaatcgtacagcaggcggctgatggaatgggcaccaagtccacgttcataaacaactccattcactgtaagcggggtatgtactacggaacggttgacttcaagcattccccagtcctgaacataacaggaatcttgaccgaattcatccagccacacttctttagtaggcccgttgtcgcaagactgcaagctccaagcccccatcaacattgcagccataagtgctgcacattttttaattttcatttctttgtgttttttgtaaaatcaagtgagattatactcacctgcaaaatccaatttattgtaaataatccctaccaacatacgatatttttaaaaagcccctctagggcacactctgagaggggctataatcagtatacgactgaatagggttcacttcggaacacaattcgcgaatccccaaaaacggccattatccgtaatgttcaattaccacatcaatcaatcgccttttctacaaatacgaatattatcgaatgcaaaattacgggctatctcaggatctatctccaaacgcatattgaagcttgtgtacgaacctggatggtagtccggataatcctctgacaaatatacattaaacggcaacgtaattgtctcccaacggttgaagttctgtatattaaagtctgtagcaacccaatcgcatgtgggagcagcccaataaagataattacagaaccttattctgtccttgatgaattgattggatgtgcggaattcacatttcaccacataattcttacatgattcaagtcctaacatatcatcagtataaggtatatcgcctctttctgcaatataccaccaagagctatattcagatttatcatctattctcaagaagttaccgctcaaccgttgtggatctttctcatcagtcaccacatttgtcatagaactgggcaaatattcgtcaaagtccataatcataaaatcacaatcgtagtaacgtccggggcataccgcctcaacattatacttcacccctttcactttaatttttatgttcttatctacatcaaccggtactttagcagtcagataattattagccgatttaatgaccggagatacctttccattgaaatcgacaacagcattgagcgaatctatttcatagaggttgaagaaatctccataaatcataatcgtatcacccggtgccgtatattcattgaacatgcgggaaagctttaaattgggcgctaccgttttaaaaggaatttcaaaacaaccggccgtattataaatacttattttatcggttttcttggttgccagctttaccggtatctttataaacagaatatcatcttctgtatatacctcttgcatatccagcttaatgtcatcaatcaaaatagaatcgatattatgaacatccaaaccggttccatgaacagctataaaatcccccaaagcagcttcttcaatggtggtattcatatcagcaatggtggtcacattggtcagttcaatagggagtgcaactccgtcatcgtcagagcaagatgtccaagaaattcccataagaagagcaccgacgagatacatcttcctaaaactcaatatctttttcattgtatttttcatcatatagttaataaataggattaccatccgggattatttttctcaatataagggttaccgttaatttcatcgggcggaaggggcatcagccagtgcttctcctcacgtctcttcaaattaccgttttcatccataccgatagcattcattaccgataaataaataccccaacgaatcaagtcggtacgacgattcccctcaactgcaaactctttagcacgctcttccaagataaacgaacggaaagtttctttcgtaaacggaatcttctcatgacgcttgcttaccagcgtactattgttacgcttattcaacaattcaatcttagagaatgcatcttgggtaggtccattcaattcattatcagcttccgcatacagtaacagcacttctgcgtaacgcataaaaggccagttaaagtctttacgattaccgtcaatttcacccgtcactgccgtaaacttagtaaaacgagaaccgtaataagcaccatacgtaggctggtcggtcttctgataagctccaataccctggtcggcatacggagcctcttcacggttcacgtatacactgtcacgcaacgggtagtaacgccaggtataaatgcccagttcttcgttataagaatcggggtaacggtgcagaatgccccatgtaatacgttcatctttccaatcatcgaacatctgcagccagtgatcgcgataagtataataaccagaacccagagttctatcctctttccaatagccgtaatacgattcgctgatatagtttccggcaagattatccccttcgggataagtctgtaatgtaaacaggaattccggcccgttcttattgtcgattttccataattctttctgactggaagccaacacacactctccttctgcaatcacttcggctgctttctctttggccagtttgtaatactcctgagaattgaactcttcatatcccggaagacgaatcttgttatgccagatttcctgaggcatcaatgccgattctgttccatccggattcgtaaccttgccgggaccaccctttaccatgactttgccactctccatcgaagcagaaccaatcgtagcatagactaaagccaacagcgacttggctgacgcacgaaatacatgccctttcttataatccgagtctgtacgaggcatcagcaacgtttcagcctcctttaaattggctataatgtcctcatacacttccttgacggaagctctgggctggtaactgctgttaccttcaccaatagaagttttaaacaaaggaataccaccaaaacgacgtactaattcaaactccgaccatgccttgagaaaacgaagttcacccaacgcattattcttggctttctcaggtacattggtcatcttgtcaatcagataatagtggtaattggcacgatgaatggcggttgaataatatgcaaacacattatttatactaccattgttataaaagttaccggtaccggtttctttaaaagcccaacccggccctgtctgatagtcattatcataattagtagcagaatcataactaccccattcaaacatccaggccaacggttggtaagcgccatttaccaacagttcatactcaccatcagcagacaagtcttcacctgaaataaatgtatatacttcttcatccaacgtacaagaagtcatcaacatggagcctaagcccaatgccattaatatattcttaaatttcatagtcatcattatttaaaatccaatttgaacaccaaaattaaatgtacgggcacttggataagaagccatatccacacctctgcgtttagggtcactaccaaatgaattcacatcagggtccatccaactataaccggaaattgtaaatagattggaaacgctggcaaccaaattaatactctccacaaacttcatcggatggcggaaacggtagctcaagctgacattcttgcaacgcaagtaagatccatcctcaatgtaacggtcagatgccttcatagaacgtgtactggttctattggcacgcggccatttggcatttgccctattttcggcagtccaacgattgttataaataaaataaggcatattatccacgctggccatatcaaatttcttaagattgacattcaacacgtcattaccttgtgtaccctgcaagaagaaactgaatgtccagttcttccattccaatgtattggttataccatattggtaatccgggttggtattacctataatctgacggtctcgattatcaattacaggatcgtcatcaagattcttgtatttcacttcacctaccatgcttttaaccttagagtccgtctcatttctatacaacggatctgcacggacttcggcctcattgtcataaaagccatcttccacatacccatatagagtaccgataggctcaccattacgtaccaagaacatgttctcaataccccaagccacatcagaatattggtcggcatccaaaccacccaccttattacggttgaatgaaatattggcatctatagaccacaagaaattacgtgcctttacaggaatgaaatgaccggaaatttccaaccctttatttgttacattaccatagtttgcctgaatacggctaaaaccggaactcataggaataagcttatccaacaataggtcttttgtcttcttataataggcatctactgtcaaattaacacggttattcaagaaagcaatgtccaaacctatgtcaaactgattggttgtctcccatttcagaagagctgctgcaggtcctccccagcgggattctgccataccactctgcaatgaaccacccataccgtagttagaaacaacaaaacgggaacgggtagcataggcactgaccccctgacctccggtctgtccggcactgacacgcaatttcaagtcatcgaagaaattcagctgctttacaaaagactcatcagacaaacgccaagcaacggctcccgaatagaagttattccaacgatttaactctgacaatttactggaaccgtcacgacgcatagaaaaagtgaataaataacggtccagcaaattataattggctctgaacagataggacatcagctgagactttccacgactactttccatacgacggtccttagttcctgcttcaatgacgttgtcttcagtcatatcgttcgggaaattagatgcagccatccacttactatgccacatgctgttttcataagtcataccaagcacagcattaatgccatgaactccaaacttcttgttgaaagtcaacaaagactctgtcgaaatgctttcataagcatcatctgacttcgttgcataaccatttgtaggagctatacccgcaccggtccaacggttattataggtattacgttcataatagctataaccgtaaccaaaattctgacggaatttcaaccagtcggtaaacttcaattcaccaaagcttgagataaatacattcaacgtctcttggatattcttctccgtatgtacagtcaaataaggattagccaaaccggtagagaaatcttccgaaaagccagagtctttattgggatcgaataccggacgagtaggattaaacgaaatagctgcaggaattacaccatacgtttcactattggtacgtgccaaacgattatcggaagttgcaaaactgatgttagtacctaactctaaaaaatcattgattttacggctgttgttagctctcgctgtataacgtctataataagaattaacaatcacaccctgctggtcagtataaccaccggaatacatatagttacctttcttatcaccacccgatactgtaacattataatcttggcttattgctgtctgaaaaatttcatcctgccaatttgttccataacgtaccggtcctccttctttttcgacaaaacccttccggtaatcccatggacttggcttatactcctgacctactacaaccatttctcctgtaataggatccggagctttcaccggagcccaatatcccaccaaaggatattccaattggctgtctgcctcagagtaaccgtcatacaagagaccattcgtgatacgttcattacggtacaaagcgtaatcacaagcatcgagcacatcaatacgttttaccggattagagatactaaggttagcagaaagctgaacttttgcctttccctcagcaccggatttagtagtaataagcacaacaccattggcagcacgagaaccataaatagcggtagcagatgcatcttttaaaacttcaatagataatatatcttgtggactaatggtactcaatggattattactctgtttcataccataatccgttgtacgtccttcacccatagaatacggcataccatcgactacatacaaaggctctgtactggtagtaaacgaattggcaccacgaatttggatatttataccggcacccggggctccgtcagactgggacacatttacacctgccattttgccttgcaaaccttgattcacactcacagggtttgttttcagcaaatcttcgctctttaaagaagatacagatcccgttaaatctcttttaggaacagcaccataaccaataacaactgtttcttccaacatttggctgtcctctttcaaagttacattaacagtagtcctacccttaacagctacctcttgtgttctatagccaaaatgagtatttacaactaattattcctcaatat

SEQ ID NO: 4451 - DNA, 2389 bp, Unknown
  gut microbiota DNA sequence
actcatcgaaagcggaaacagcgccgggtaccatattctttatctgggctatgacattggccaactctttctgttcctcagcggaacgggaggacttgccggtcagttcctcgtatcggttcaacagtcccggcaatgcgctctcaagctgtaccatcttgtcgaaatggttctcgtaagtttccgtataagtggtgaacatttccccaagtttagtgaagaatccattggcatacttcaacatggatttccagaacggctccagcttttttcccactttattgaaaaaggcatccattgtgtctccaaggttggactggattccttcaagttcctgcatctgcacggccatggaaccggcaatgccgtcgacacgaccgagagaaagaagataatccttgatggcatcctcagaattgcgcacttcggtagtcactcctcggaaagagaactttgtagtctccccggatttggaagccttgataccgaactccttcagacgttcgttctccccggtcatcgcatcaagtatagcctcaatgagctgatcgacggactttccctgggaagcggcaaggtctcccatgttgacaagctcctggctggtaggcttgaccccacgattaaccagcttgatatatgcttcagtccattcctgcaaggacgatggggtgtctgctgccaattgctgaagcatcttcatggcatcattggccttcttctgcgactggaaagtattccgaaggactgcctcgtatttggcgaattccttgcgtgtctcgtatgcctggctatggacatccttaagccatccggcaaccttaacggcaatgaaagccttggctgccatttttaacttggacatccaattcacgctgttgccgaactcattgttcatgttgttacctgcactgcgtaactcgctcatgcgggcacggacttctctgagacgggtattgagtttggcatattcttccggattcgcagattcagtcatatcatccaaagcagcggaaagctccttagcttctttcttgagctgtctcatggtgagatcgttgactttcaagttacgggtcagcagacttattttctcattgtttttggaaattttggcagtatagtctttgcactctttcgcaaggttctgatagtctttcgtgttctttttgccttgggcttcgagctccaccatagccttgcggcgttcggcctcttcctttttcaaagccttggtttccttggtcagtgtatgcagctcttcctgaagcttggaactgtcacctgagattatgagtttgatttcgtcttcggataaatgcttttttgccataatgttaccaatttgaactattttcgtattgaagggcctgctccagttccttgcgaatattggtacggacttcttccgtgaaaccgtactttatttccgggaatgtctcatgatacagcactccccagaccacccggttataaagagcaagattacggcggatatgacgggaaatacggtcaccggctccacgacggtaatggatgtcaaggaagcggagatatgggaatatacgcagataatagacttgtttcgtatctgattcctgggcaatgaacggacgtttctgaagatgtgccaccaggtcaccggatcgtgagttgagatatgtacgcacaactttttcttgtgtctcataaataaggttgatgccttgagacattatatcatggacaaaacgttctctgacaagctggtctgtaatcatattcactgttatttccagcgaagatagaataggggaggcggtacggaaaggacataaaaacgaaggggcaactattcatcacgaacaattaccccctatatgacagtagtatttagtttctcgcttggagcatccaccggaagtccagtcctgatgaaccaggacggttctggtatttataaccggcatcaagcatggcttgatgaacctgctccttactaatatgcgctccaggatcaatgcgacgaatggcgtcgtagacttcatccgtagtgaaccaatgggtggcatggcgtgcatccggggcaggtttgaacgatgcggacaaggatgctatatggatactgatatcggtaattttctgttcttgctctttatttttcattttgtcctcctttctcattaacatcaagcgcatgctgcaggcaggcaatgatttcacgggcatcctccgcagagatgtcgcacatcacatagttgccataataagcaaggcaatatttatactcacttgtttcagttcctgtgcaaagacgttcggcttgaacataaatgtctttttgtgttatagacttgatacggttcatttggcacctccttccttcgcccgtttccttttttcttcatag

SEQ ID NO: 4452 - DNA, 257 bp, Unknown
  gut microbiota DNA sequence
tttataaataaattggaaatgaatagaaatgaaattaccttacaagagatgttctcctcagtcatcggggaactccgggaaggcggcagatgggggacggcgcacatctaccagtcagcggtgaatgcattctcggcattcaccaaatggcaaccaatgcccatgcgcaagctgagcccgaccgtactgaagaggttcgaaaactacctcaggcagaggaactgcagttggaacaccgtgtccacctacatcaagac

SEQ ID NO: 4453 - DNA, 1310 bp, Unknown
  gut microbiota DNA sequence
atgatattattaactcaataaataattatggataagcaaatgatttctgcacatgagaagatgatggaaacgatgcccaaagagttcaaacgtataatgtctgaagtagaggcggcggtacgcagcggaaaaacaagatacctcataagtagcagacgtttaaaacctgaatatgaaagagctttgttaggtgttgggtatgaaattagaaaaggacgtgtagcaactcaaattatatggtagcatttatctccaatattgaattctacaacacccctgaaggtgatgtgatgatgaaagagttcgggcagccggctgttgttctcaaggaggctgaccgcccgactatcgaacacatgcttgctgtcatcagggacagatatccgaaagcacatgcccggctgatgcagctctattcagccagcacgatgaatcgttggcattatgaattccgagtggttcatcgtttcatccgatgcaatttcggagagtatgaccagtacaatcttgacattaacaaggatggacagtttgtattcgaggaggtcaaatgcccgttacggggtgaatgcgaacatgaaggggtgatatgcagaccggagcttgatacagcactgaccgatcgcgagatggatgtattccggctcattgcctccaactgccaaactgatgaaattgcggcagagctacatatctcgccttgtacggttaaccgccatcgagagaatatcaaggcaaaaatcaaggttcgtaatgtgggtgagatgatttcttactggcaccggaatcaaatgaaataagctcaccgtgaggtgtgccatctgtgtttaatgtgtattctatggctgtggcggtctgcgaagatagtccggcccctcatactacattcaaatggtagcggtatacttaagatttgccgcgactggggttcgattcccctatatgagacgatgatttactaacttaataaacagaatacatgaataacaacaaaggtttttcctccatttccactcctgacggacagttcaggatgtggattccacgtccgacggcttcgggcagagtaatatgcaactgtggatttgcactcaagagtcatcttcctttcgtcgatgccgttgatgcgctggactacctgcaggtcgacgaagttcggcagatagaccaggactttagtatccttgttatttcatttctcgatgcaccgcatgagtgcatgctgaagatgatagaagatatccccgaacttatggagcaatacttggtaaatacataaaatctgaatgctatgagatactttatagaca

SEQ ID NO: 4454 - DNA, 7059 bp, Unknown
  gut microbiota DNA sequence
gaagctacagaccagcgttgtctttagcaggcagcaggtggaagaaaccgtattgaagatgtgcgattctctcggtaccggactgctttattacaattattccaacagatggataaccgtttatacctccgagaaaatgaaaaaggcattggactcgatgaaaccgggttcagaggtctttcacgaacgttatggtaattatggcaaggtgatgagcgataagccatttgtcatttgtggagaattgtgtatcagggttgactttgggggaatgcctgacagtggagcatatagctgtgtatgttttgtaatgtaacgaataaatatgaatatagaacaatggattggggagggattagctgtgcgcttgtttgtgcaatacctatagtggccattatctgcgatactgtaaaaaaagtatttgagatgaaatataaaaaaggagatgagaactaagttgataaagaagcataatccgcagtcttttttggatgatttgaaaagggtacgggaggttatggtttacgcagagtgtaccaactcctactatcaaatcttaaaaaaagacttgctgagagatgctgaaaggaaagcaatcacatactatataacggatactatatttattataaaaaggaatgtgatggtagtcatttaacgagtaacaaattaaatatgagcgaattgactaaaatgataaaagtccctctttgggagctaaaagaaatagctgatacacttcggatggtagcaaatgcgcttgattcccctaaaagagaatcatgtttagatcggaacgtaatgcgttcatggaattatgtagttgatatgataaaaggaaagataccctctgcacctgaaagcattgactactatataaaagttggacaggttcctaatataaacgaataatcaatacaataaagaaagaaacattatgcgtaaagagataatgtacatgatagcttatccagatggtacacttgtgatgaatactcaaaaatactaccgaagagattgtgtcagatactggctggacggaactggtttaacatggaaacagatgtataagaaaggctttcgctgtaaaaaagtaaaagttacatttgaaataattgattaataaaaagaaggtatgaataaaataaagaaccgtaggcttgcgctacgagcctataaaatcagagtaaaacaatacccttacgataagccattgattgatagaaacaatctcgcttttgtccgtaaggaaaatgacgggaaccgatgtgattgtttcgggcattggcttaactattggaatacaagacctttttaattgactaataacaaatcaataatgaataaaaaagaaatatcaatgaagaaaggtcagaaggtacgcattctgcgtaccaatcaagtagcgacaatcgtcgaagtggagttaattcgtaaaggtggcaaggtacatcggtactgccatctgaagacagatgaaaagtcatatttgtggttggatgcctcagaactggggagtgtggtggaggaagtgaaggtctcggtagttgatgaccggaaccgggagctgcacttggctatatgccatgactactccaaggataatatgaaggtgcatcttaccggcaagaatccggataatctgaaggaagattccggactatatgcgagactgatgaacttgttcattgggagcctgaaggaaacgcgggaactgtaggagcggataacgtccttgatgatatggaaagcctattgaaatatagaatggaaaatcttgattggatagaccgtttcttggagaagcttggcgtcgacgcttttcttgagtttgaaacgagggtatatagtgccctcgacaagctcaaggtcatgcattactatgatatcgggggctcggtcataccggagcagcaggaactatttatcaaattctgttgctgctatatcaccgggcactctgaatacgaattcaatgaagactatacacagatatggaggaaagaaagctatgaacaatggaagatggcaacccgatgaggacagatacgtccgggaaaatgtcaataagaagacattggaacaaatggcggagcatttgggaagatccgcattggctgtacagttatatatgcaccggaagcatattgtagtgggacagacagtcaagcggaatctggtgcaggagattctccgactgaaattccggcatccggaaaatttcatgcccaaccgtgccttctaccaggaggtaggcatcaaccagatgcgctggtgggatattttctatggccgaaaaaatataaaccaagaagaatatatcgcgttgtcgaagtatttcggcataacactggaggaggcattcgcagcgcgtcaactttgcatatttgaagaacaatgattgatgacgaattaaaacagagaataaaggatgccaacgagattacggacgtgatcggccaatttgtatcccttcacaagagaggtatcaattatatagggatctgcccgtttcatccagaccgacatccgtcgatgaccgttagcccgtcaagacagacatacaagtgtttcgtctgcggcaaaggaggggatgtcatccagtttgtccaggaccatgagaacatgtcattcaacgaggctgtcacctggctggccaatcgtgcgggaatctctctccctgaacgggtgatgtccgacgaggaaacggccagggtaaaagaacgtgaagcgcagcgtatagcgatgaaaggcgccgcattctttttcgagaagcatcttccggaggcgcaactttatctgcatgacagagggttcagcctggatgacaaggtcctgaaggatttcagaattggatatgccccggcaggcaacttggctaaaaaggagatgcttgcagccggattttccgaacagaagctgcttgagacggacatcctgaagagaagcgagaagaacttcaccttcgacactttcaaggaccgcatcatgtttccctattttgatatcaagggcaacataaacggatataccggacgctggctgaccccgcaggaaaacaccggcaagtacgtcaataccggggacacgccgttgttcaagaaaggcactcaccttttcggtctgtaccaggcacgtactgccattgcaagatatgattgtgcgtatatagtcgaaggccagttcgatgccatgtccatgcacaagttcggtgtctgcaataccgttgccaccagcggaaccgcactgactccggaacagatacagctgcttggccggttcacccatcgcgtgatacttgtatatgatgcggatgcagccgggctgaaagcgtcactggccaactgtgaggctttcctgcgtgcgggtttccaggtcagtgcagttccgcttcctgaagggaaagatcctgataatattgcccaggagcagaaacttgaaaccgggaaatggcttgcaaaccgggaacagaatttccttcaatattttgccatctccttacgaggcaagaatcccggaaccgacccaaacagagaggaagaggcaatgcaacggctttcaaccctcatatctgtcatcccttcggaaacacttcttctcaagtgcatagagataatggccgggattttcggcagcaacacggaagtcatccagcggaaagtgaattccatcttgcgacagcggaagacagcttccatcaaggagaaagacaagatggctcccggtatatatggtatcgatatgattgcggaggcacgtagcggaaatgagccttgcatcctgacatcagattatcaggagttcctcaccttgtatggagatgctcccatagcatacgtccatggcattcctggaatgaacgacatacagcagttgcgtcaggcaagccagatgttcacctctgacagtgatggccttactattgcaaaagacggtacggaatccggttaccttgccggactatctgccattttccgtgccggtatttccaatatcaccataacggttgaacggaatgtggataataatgatgacgaggaagaaagcgatgacggggaaaatatggatgaagagacgaacgatatcatcgagactttcaatttcgcgaaattctatgtattcctgcacaaatctttttttaagacctataatggcgagcgtgctccctatatagaacgttgtgctgaaataatcagctacgcggaagattcggtacgcatcatcaactttacctactttcagaattgcctggggctgaccaagcaagccttgaatgaaatactcaagccctatctggccaaacgcaaatcacgcatggccatcaatgcacaacggacggacgatgactatactgaagagaattatgacccggacgaacttccccgttatgtccaggacaatccggaatatctgcagatgttccagcaatgcaattactatccgaagttaaacaagcagggggagccggtatgctaccttttcaagaatgagaagtccggccataccatggtcggtgacttctatatgattccactcttgcatatttactcggacaacgacgaggaaaacaagcgtgtccttagaataaaccgccgttattacaagacaccgctttacattgaggtgaattccaaagtcctggccaagaaaagcactattgaggaaaagctaattatgctggaagcagtcaacttcaccaatggtgaagagaaacattggactaaaatacgtgaatatatgagcagacattatgttacttgcacagaggtttccacatacgggaaccaacaagaagacggtttctcccgacgggaagaccaacagttttttgcctttgccaacggcatcttccatgttgttgacggaataccgagatttgatgcggtgaatgagcttggagtggtcacccacaatggcaagaactattatctaccggcattctccaccatatatgccggttccggcaagcagtccgacaagtatgaacttatttcacagcttgtctataaggaaatccctatagacaaacgttgtactttcgacgaatgggcctcactgatggaccgtgtatataaaatcaatgacaacgggaaatgggccattctctttgccatcatgtgcgctttccgaagcaatatacactgcatagaccgtttgtttacagcaccattctttatgggaccgatgtcatccggaaaaacacagattgcgatatccatccgttccctattcatatctccgaaaataccaattttcaacctgaacatcggtaccgatgcagccatgtccacattgatgagcactttccgggatgttccggttgtccttgatgaatacaacaataaagatatatcagatataaagttccaggcacttaaaggaatagtatatgatggtgatggaagacagaagcgtaaaggcacatccggcaaggagatagaaaacgacaaggtgtacgcgccggttgtcatttgcggccaggaaactccccaacgtgatgacaatgcactcatgtcacgtattatagtctgcgaagtccccaaaccgaaaaaccggaccagggaggaagtggagcttttcaacaaactcaaggatatagaggatccggccaaaatcgggttgtcgaatgtcctctttgaagtccttcagctgcgtccgctggtaatgcagcatttccgggcactgaagcagaaatcctatgatgaattgaagcaggcgctgataaatgccggtgagattgaccgcctcatgaagactgcatcattgtttctggcgacatgcagactgattgaggattatacagagttgaaattaccgttcacctatgaggagttttttaaaatagcctgcgataaaatcaaattccaggtggaactgatttccaagacggataaactggccacattcttcaaggctatggatgtgatgattgataccaaggcaatcagggaaggcagggacttcgccattgatacaccggaacgaatcaccatcaagctgcccggaggagagaaaaaggaggttcctattcctgcaggaacccgcgtgttattcctacgcgtcagtaccatctatacgcagtacgcacgttcttcttataatcaggaagactcaacgcagtcgaccatcgagcagaacctccgctcccatcccagttacctgggctttgtccatgcacgccggttcaactggtatgaagtcgtggaggtaccacgcggcggtttcgaggaagatactcccaatgaaaccggaattccggtaaagctcaacaatgacatggtgcgtaaagttgagaagaagtgtaccaattccagttgcatagctatcaactacgaaattttcagagaattatatagcattgatttgcaacgcggttctgaagaatcccgtgttgacgataatcccgacaatgaccctataggagcaatcggtgccccccaagagctgaagttctgatttttattataaacttaaaaaaacgagttatggaaacaaaaattattacgagagtgaacaatgtggacatcgtctctacgagtgacgaacaactggtgcccatccgaccgatatgcgaggcactgggcattgatgcaaacggccaaaaacaacgcatcgaacggaatgaaatactcggtccagttgcgtgtatgatacacgcaactggaaaggatggaaagacgtatgatatgtatgccattccctacatgtacatctttggctggctcttctccatcgacacgtccaaagtcagcgaaaatgccagagaggccgttctgcgttatcagacggagtgctacaaggcattgttcgagcacttcaccgagccgcaaaccttcctcaaacagaaacaggaggtcatggagaagaaagtgaccgagtaccaggagtgccagcgccgcttcaaggatgcacagaaactgatgaatgaggcaaagtctgaactgaatcaggtgatgaagctcaccatcgaggactggagggcgaacaaccgccagttgaatctaccgttcacagctgaagaaatggttgaagaataaaaaataatccgggcagaatgcc

SEQ ID NO: 4455 - DNA, 17290 bp, Unknown
  gut microbiota DNA sequence
aaaaagcgtctagctaaatcaggaaaagacagtgaaaactatcatttgacagtttacaccccctctctgatagtttacgggtgatattatatactgaaaaccatcatttttccgaagatttcgtaaatgttacgtgatttttttatagctttgcctacatataggaaaacacttttattacataaaaacactttattttatgaaatcatttcaatttaagtcacttcttctgctggctgccctcatcatttccctgccctccttcggacaaggactgaaggcgttcaagctgaagaacggtctttccgtatatatatgggaagatgaatccaaatcggacgtgttcggactggtaggcgtacgtgccggttccatcaacgaccccgaagagtacacgggacttgcacactacctggagcacgtcatgtttaaaggaacagacaagataggcgcgctgaactggacggaagaagaaccgatctacaaggaaatcatcgccaagtacgaccagatggccgaagaagccgacccggcaaaaaaagaagccatcagcaaggaaatcaatgagctgaccgtcaaagctggaaaattgggacttcccaacgaatactccaacctgatggaaagcatgggtgccaaaggggtgaatgcaggcacctactatgactggaccttctatcacagctccttccctgcctatcagataaacaaatggctggaaatctcctcacaacgtttcctgcatcccgtattccgttccttccagtcggagctggaaaacgtgtacgaagaatataaccgttcacaagatgaccagggacgtgcacagaaccagttcgtgatggagaaagcttttgagggacatccttactcccgttccatcatcggcctgcccgaacatctgaagaatccccgcctgagcaagctgattgaattttacgaacaatggtatgtccccgaaaacatggtactggtactcgtaggaaacatcaaagcccaacaaatcagcggacgcatcaatgccgcctttggacgtctggctgctaagcccgcacccgagcgcaaggtctaccagaacctcgaaataaagggccgcaaacagtattcggctaaagtaggattctacccgcaagtggcaatggtattcaatggagtacctgccggacatcccgacgaagacgctctggacatcgctctggcactgctgaacaacaacagtcagaccggaactatggacaagctggtactggacggtgaactgaccagcgccggagcctacacccgtactttccgcgaacaaggacgcgccatcgtagcggccattcccctctacgacgaaaaccagcgccgtttcgagtcgaccaagagcgccgaaaagaaagccttgaaagccatccagcaaatcgccaacggagaattcgaggactggaaaattgatgccatcaaagccgagaaatgccgccagttcgacctggaaatggagtcgaacgaggacaaggccatgatactgatgaacgccttctacaacgagcaggacttgggcgacatactcaattacaaggacaagattatggccatcaccactgacgacatcaagcgagtagccaagaaatatctgtcagacaattacctggccctatatatcgaaaaaggaaagcctgacaagaacgccaagattgagaagccgggttacaaacccgtagaacctccgataggaaaagaatcgctctatgcaacacaattcaaaaacctgcccatcggacagatggaggagaaattcgcagactacggcgaagtgcaaatcaagcaactgaacgaccgttcaaagatgtactacacacccaacaaggagaataacgtattccagttggttgtacaatacggagccggtgaacgcgaattcccaaaacttggctatgccgcccagttgatgaacaacgcaggcatcatgggggcctacgaaccgcaagagttgaaagaagaactcagcaagctgaacgcaacctgccacgtgacagccgatgatgacaacctctacatcatcatggagggctacgaagccaccctgccgcaagcctgccagctactttcacgccagattttgatgccaaaactggacgaaaagcaactggcacgtctgaaaggttcggcaatgggtatgcgccagcagcgcaaagacaacgtcagcatcctgaacgaagcactgcggcagtacatgctctacggagagaaatcagactacatcaaggaactgaccgacaaggagatttacgaattacagatttcagaactgacgggcgacatcaaccgcgcctccaactacgaggcaaaggtgttcttcaccggaacactccccttcgaccaagtatacgatatcctgagcaagaacctcccattggtggccaacgaacgcccgtccaactccccacaggcaaaggacatgatgccggtgaccgaaaacaccgtctacttcctgcctaacaacgatgcagaacaagcccaaatccacctctacatcccgatgcagaaggctgacaaaaaggacgacgtgctgcgtagcgcattcaaccaatacttcggtcttgacttcaccggcatcgttctgaacgaaatccgcgaaaaacgctccatggcctatacagcctacgcattcgtcggcacgcaaggcatagccggaaaagcaagctatctgcgcggctacatcggtacccagaacgacaaggcaaacgatgcattggacgtactgatgggtctcgtcaacgacatgccgaaaaatccggaacgtatcgacaacatcaagagctacctccgccaagccatgctgaccagtcaccccagcttccgcaacaaagccatggaactggtagacttgggctacagaggctacacagacgacccagcaaaggaaaacctaccgaaagtagatgcactgacctttgacgacatcgtgaaattctacgaagagaacatcaaagacaaaccttactgcatttccatcatgggcaacccaaagaacattgacctgaagcgactggaaaaattcggcaaggtagtgaaactgaacgaacgcaaacttttcaacacgaaggatgcattgttctaaccttgttttatccccttagcaatcccatcctctttcccccttatcaggggaacgaggaatatgaaagattccccgacatttcggttgcaaatgccggggaatcttatttttaacacctggagttcttttgcacattgcccggaatttcaccggaaaatccctgagattctcagacagcagacaatggactacatttcccgctcctcctcattgcccgaaaggataggcaggcaaatcctatacttcaccgccagtatgcgagtaacgaacaccgtcacaccgcccacaatctgacacacgaaagactccatccccagaagatggcacatccagtagaaggtccctcctaccacacaagccatcgcataaatctccttccggaatatcagcggaatttcgttgatgaatacgtcacgtatcacacctcccgcagccccggtgatgctgcccataatgatggccacccaaaagggatagcccagcgctatgctctttcccacgccgaccaccgtgaacagtgccaggccaatactgtcgaatatgaagaacgtattgtgcagatggatgagatgtttaccgaagaggatgacccacaacaaggccagtccggtacaaatcaagtaaatgggatccgtcatccagcccggggtgacgtccagcaacaggtcgcgtatcgtaccgccgccaatggccgtcacaaaacccaccacatacgctccaaaccagtcgaaccgcttggccgaggccaggcgtatgccactgatggcaaaggcaaatgtgccaatgaaatcgagtatctgaacaaatgttggcattatcactttgagaattaaaaattataaattaaacattgaataagtgtgtattttcaacagacactctgaaaataataggcaaagtaacaaataatttccctaagaaaacgtatttttgtcgtatcatttttcaccaactacgacaatgagaataacaatcgtatcgggcgcacgccccaacttcatgaaaatagcccccatctgccgcgccatcgacgccgccagagaggcaggaaagaacatctcctaccgcatcgtctacaccggtccgcaggatgacaccagcctggatgcctcgctcttctccgacctttccatgaggaaaccggatgcctacctcggtgtcaccggacacaaccactcgcaggtggcagcctccatcatgctcgccttcgagcgggagttggacgggcatccggcacaagtcgtactggtggtagatgacatgaccgccactatgagctgctccatcgtcgccaagaagcgcggactgaaggtggcgcacgtcatagccggcacacgctctttcgacatgaacatgccccgcgaggtgaaccgcaccatcgtggacgccatttccgactatctcttcaccgccggcatggtggccaaccgcaacctcaatcaggagggcatgatacccgaatatatccactacgtgggcaacatactaattgacaccatccgtttcaaccgccaccgcctggtgcagcccatgtggttctccagcctcggcctgcggaaagggaactacctgctgctcaccctcaaccgccgcgacctgctggagaagaaagccgtactgcactccctgctccagaccgtcatcgagaaggccggcggcatgcctatcgtcgccccgctacacccctacgtgcaaaaggcggtgaagtcgctggaagtgaatgctaccaacctgcacatcctgcctccgcagagttacctgcacttcggattcctcatcaaccaggcacggggcatcgtcaccgactcgggaaacatcgccgaagaagctaccttcctcgacgtcccctgcatcaccctcaatacctatgccgagcatcccgaaacctggcgcatcggtaccaacgagctggtaggcgaaaattccttcgccctctccgcctcgctcgacaagctgctgcacggagaatggaagcacaccaccctgcccgaccgctgggacggacgaacggcggaacgcatcgtacaaacactactgaacggcaacaattcataatcctccataaactctatcccaagcttgcaaacgtctatcccaaacctacggacgcttatcccaagcttgggtctttctatcccaaggcttgggatagaactttctccatacgtcgtgcaactttatcctttatatccggcaacttttctataaggattctgtacgttttttatctgtatccggcaaacaagacatacgactttcacgttcatttaaccatatctcccgtttctttagtctatatttgcttcttgattaaccttaatttgttaactttgcgcccgaattatctgtaacttatgaagcaaagatatacaatttacgcccttttcctgctgtcactgttcgtctccatcagcgcatccgcccagataaagggtgtcatcacagactccctcacgaacgaaccgctgatgtatatcaccgtacagtatgaagggaaaggtgtaggcggcatctccaacgcaaacggtgaataccaggttgaaacccacaaaggctgggatgagctgacattctccgctgtaggttatatcaccaagaaagtgaaactgaatcccggtacccgggtgctgaacgtcaagttgcaaccggacgacatcatgctctccgaggtcgtcgtgaagcccaagaaggagaaatattcccgcaagaacaaccccgccgtggagtttatgaagaaggtcatcgagaacaagaaggccctgaaactggaagagaacgactactatcagtatcagaaatatgaaaagatgaagatgtcgctcaacgatgtcacccccgacaaaatggagaaaggtatttacaagaaattctccttcttcaaagaccaggtggaggtatcgcccaagaccaacaagatgattctacccatctccatcaaggagacggcgagcaagaccattttccgtaaaagccccaagagcgaaaagaccatcatcgaaggcatgaactccactggtatcgaagagttcttcaacaccggagacatgctggggaccatccttacggacgtattctccgacatcaacatctacgacgacgacatccgcctgctgcaacgccgcttcgtcagccccatcggccgcggagccatcagcttctacaaatactacttgatggacacgctcatggtggataggcaggagtgcgtgcacctcaccttcgttccccagaacccgcaggacttcggtttcacggggcacctctacgtggtgaaggactccacctatgccgtgaagaaatgtaccatgaacctgcccaagaagacgggtgtcaacttcgtggaaaacctcgacatcgtgcagcagttcgaacaactgcccgacggaaactgggtgctgaccgatgacgacatgaccgtggaactgcactttgtgaaaggcatccaaggcctggaagtacagcggaccaccaagtacagcgactatcagttcacagagatagaaccccgcctcttccgcctgaaaggaaatgtcatcaaggaggcgaacatgcttgccaagagcgacgagtattgggcgaaagtgcgccaagtgcctctcaccaagaaggagagcacgatggacgtattcatgaaccgtatcgaacagattcccggcttcaagtacgtcatcttcggagcgaaagccttgattgagaacttcgtggaaacgggcagcaagaaacatcccagtaagttcgacttcggtcctatcaatacaatgataaccagcaactacgtcaacggcacccgtttccgtctgagcggtatgacaaccggtaacctcgacccgcattggagcctgagcggttacggcgcctacggaaccaaggacaagaaatggttctactccgggcaggtggcctactccttcaacaaacgcgaatacgtattgtgggagttcccgaagcactacatcgccttcaagtacacctacgacgtgatgtctcccatggacaagtacctcgccacggacaaggacaacttatttgtcggctggaaatggaccacggtagaccagatgtcctacatgcgcgatgccacgctgacctacgagctggaaaccaataccggcttctccgtacaggccatggcacgccaccgcaacgaccagcctgcggggcaactgcaatactggaagaacaacggagaaacacccggacagtgggatgaaaagaatacgctggtgcacgacatcaccactaccgagctgggtgtgaccctgcgttacgctcccggcgaaaccttcgtcaacaccaaacagcgccgcgtgcccgtatcgttggatgcgcccaccttcaccctctcccacaccgccggattcaagggcgtgctgggtggagagtacaacttcaacctgacggaagccagcatccggaagcgcttctggctcggctcgtggggcaagctggacgtaacggcacgtgccggtgcgcaatggaacaccgttcccttccccctgctgaacctaccgatggcaaacctctcgtacatcacgcagaacaacgagtccttcaacctcatcaacaacatggagttcctgaacgaccgttacgcctccctcaacctaagctatgacatgaacggaaaactcttcaaccgcatcccgctcatcaagaagctgaagtggcgtgagatgttccgcatccgtggtctgtggggcacgctgacggacaagaacaacccatacaagagcaacaatcccgacttgttcctcttccccatgcgcgacggtgtacccaccagccacgtcatgggcaagactccctatgtggaagccagtgtaggtatctacaatatcttcaagctgctccacatagaatatgtacgccgactgacctatacggatataccgggagtgaagaagggcggtatacgcttcatgatattaatgattttttaagagttacatactatgcaaccattagcagaacggcttagaccaagaacattagatgaatatatcggtcagaaacatttagtgggaccgggtgcagtgctgcgtaagatgattgatgcaggacgtatctcttcgtttatcttatggggccctccgggagtgggaaagacaaccctggcacagattatcgccaacaagctggaaacccctttctatacacttagtgccgtgaccagcggtgtgaaggatgtacgcgacgtgatagagcgtgccaagagcaaccgcttcttctcgcaagccagtcccatcctcttcatcgacgagatacaccgtttcagcaagtcgcagcaagactcgctgttgggagccgtggagcaaggcaccgtgacgctgataggcgccaccacggagaacccttcgttcgaggtcatccgcccgctactgtcccgctgccagctctataccctgaagtcactggagaaggacgacctgctggaactgctgcaacgcgccatcaccacggacaccgtgctgaaggaacggaaaatagaactgaaagaaaccactgccatgctccgcttcagcggaggagacgcccgcaagctgctcaacatcctcgaactggtgatagattccgaagccaccgaccctgtcctcatcacggatgacatggtgaccgaacgccttcaacagaaccctcttgcttacgacaaggacggcgagatgcactacgacatcatctccgctttcatcaaatccattcgcggcagcgacccggatggcgccatctactggctggcacgcatggtagaaggcggtgaagaccctgccttcatagcccgccgcctcgtcatctctgcctccgaagacatcggactggccaaccccaacgcgctgctgcttgccaacgcctgcttcgacacgctgatgaaagtgggatggcccgaaggacgtatccccctggcagaagccaccatatacctcgccaccagtcctaagagcaattcagcctatatggccatcaacaatgccctggaactggtacgcgaaacaggcaacctccccgtccccctgcacctacgcaatgcgcccaccaagctgatgaagcagttgggctacggcgagaagtataagtacgcccacgactaccccggcaacttcgtcaagcagcaattcctgcccgacgaactgaaagaccgccgcatctgggaaccacaactcaaccctgccgagcaaaagcataaggaacggatgcagcaactctggggagaggaaaagaaatggtaaactatcaattcaaattaaaaattgaaaattagagattaaaagtcggatacagaaaatccccacaacaaataactcataactcataactccatgaatatagtagtattagacggctatgccgccaaccccggcgacctctgctgggacgaattgcaagccttgggcgagtgcaccatctacgaccgcaccgcccctgcggaagtattggaacgcgctgctggtgcagaaatcctgctgaccaacaaaactgtactcaccgctgaacacatggcggcactgcccgaactgaagtatatcggtgtgctggccaccggatataacatcgtagacaccactgccgccaaagaacgcggaatcatcgtcaccaatattcccgcctacagcaccgactccgtagcccaaatggtctttgcccacatcctaaacatcacccagcaagtgcaacaccactccgaagaggtgcaccggggccgctggacagcaagcaaggacttctgtttctgggacacgccgctcatcgaactgcgcgaaaagaagctcggaatcgtaggcctgggccacaccggtttcaccaccgcccgcatcgccatcggcttcggtatgaaggtatgtgcctacacctccaagaccaacttccagcttcctcccgaaatccgcaagatggagctggacgagctgttccgcgaatgtgacatcatcagcctgcactgtcccctcaccgactccacccgcgagatggtaaatgcagaacggctccgactgatgaagcccaccgccatcctcatcaataccggacgcggcccgctcatcaacgaacaagaccttgccgacgcacttaacaacggtaccatctatgccgccggcgtagacgtactctcgcaagaacctccccgtgccgacaatccgttgctctccgcccgcaactgctacatcactccgcacattgcctgggcaagcaccgccgcgcgcgaacgcctcatgcagattatgctcgggaacatcaaggcctaccaagacggcaagccggtgaacgtagtgaataaataagcaaacaacatgggaaagtccgccgtaaaaggtctgttctacatctgtctgatagcagcgacattcgtcttggccaccatcaccataatggcagccttctcaggaaatgtagctccggtcgattccgtcatcatgccattactggggctggcagtgcccgtactcctgattgtcaatctgataacggcactctgctgggcattggcccgtaagcgctgggcactgattccgctggtggcattcttctgcaactggggatatctgacgtctgtcttccagctcaacctgccgaaagacaagaccccggcaggcaagtatctgaagatagccacctacaacatacacaactttggaggtgagattaccggttattcctgcaaggagatagcccggtacatgcagcaggagggcgtggatgtgctgtgcttccaggagttcggagacaacagtgacttccccacagacagcatacggcgcgtactctcgcattggtcacacgcgctcatcccttctgaagactccgtcaagggcgtactgcctatcgccgtattcagccgctatccattggcgaaccaccgtttcatcacttaccagcacagctccaactgtagcatgatgtgcgatgtagtgatgggtacggataccatacgtctgataaacaaccacctgcagaccaccagcgttagccagaagcgcaggaagtgggaacgcgagctggccaccgacgacacccgccgcgaagtccaggcagccaaagatgccgcaggcaccctgcacgaaaacttcatgaagcgggccacgcagacttacgtcatcagccactacgctaagaccagcccctatcccgtgctgctatgcggcgacttcaactcaataccttcctcctacacctaccatcatttgaggaaaaccctcaaagacggattccgcactgccggaaacggatacatgtacacctaccgctatgccaaacgcatgttgcgtattgactacatcttccactcccccagcctgaagggtattgcatactactctccagacctggatttgtgcagcgaccacaatccagtgattatggaggttgaaatacaataaagtaaagaaagccaaaaacaataagggctgtcccggaaatcccggaacagcccttgccttatcatattccgccattcaacggaggttatctgcacccgattagttgaacacgtaacggataccgacttgcagtttccagcattcgctgtagttctgataggtgtcgtaagtcttggtaggatattcaccgttcaccttatacatggagaataccggagtcaggtcagtggcgctcttcaccccttcatacttcaggattcggttgctgttggaaacggtgttggtcttggagataccccatttggagttgatgaggttacccacgttcatgatgtcgaaactcaactggaagcaatgcttagtcttgccaatcttgaattcgaagtcctccagcagacggaaatcgaaacggtgtacccacggagcgcgagcggcataagcctcagcatactgtcctttgtgattcttcaggtacgaatcctgctctacgaatttccagaaagcaacgcggtcttcctctgtcttgaagttgatttcactatcatccttcggaatatacatcaggtcgttgttgatgccgtcgccgttcatgtcgttggtgtagcaaaagctgtaaccaccggaagaataaccggaatagaacagattcaggtgtgtgccgcgaagcaggcctttgtgtctgaagggaatgtagtagcccacagaagcaatcaccttgtcgggaaccacatactgtgaacgttgtgcatccacataattggaaccgtcaatcgtgttcagtccctgccaagtagagatggggtcgctgcccggaagaccggaaacttctttggactccgtgtgcgtataggccagcatcagcatcaggtcgtccaccggctgggcattcaccgtgatgtttgccgtatagccgtagcctttggatgtattgtcgagtaccacggcattcttgccattgtaatgcacgaagtcgcctgcatatttcacattcttgtcggggttgtcataaagagaataagagtacaccatacggttatccgcaccattgaaacgttgcatacccgtatgcagcagttccgtagttgtcacgtcttttccatcagcgcccttgacggtggtcagcttattgtacttccattcgtcggggttcttgatattgatgttgttgatggtaacggcattcacattttttgtaaacatgaactctcccgtcacggtcaaggggaaagatacgggtacctgatagtccaccgcgatagacgacttccacacctgcggcatcttgaagtcctgagccacaccggaaatcttgcttcccgccacgtgtttctcaatcgtggtagggaggttgaacttgtcgattatctggttcatgtccgtaatcatgccacctgccaactggtccagacgggaatcatggcccaccacctttccattgtcatattgggtcttaaaggtaacggagttctgtaccatagaagcattggtcggcatattggtgaagaaaaccaacggcagacgtccggtaaacacacccgtacctccacgtactttcagcgacttgtccttgaacacgtcccaaacgaaacctatacggggagaaatctgccatctggaatccggccacttgccagtgtcgatgtgctgcccgtcgaagtcaagctcatagatggcatcgtttctctggaggtcgtcgttgtcgaacatcaagttgtcgaaacggataccgtaggtcagtttcagactgttgccgaggttccattcatcctgggcatagaaaccaagctggttgaaggtaacctgagcattggggttggccacaccgttgaagccataagtcaaagcgaatgattcgggagctgcgccactcaggaaatcttccagactgttatagcggtaatatcccgtaccgttacgcatataggcgttgttggcaaactggtgctcatagctaagacctgccgtcagcttgtggttaccggtgaagaaggtgaagttatcggtaatgttcgtaatcttgttcttcacaccgttgttgtaggtgaacaactcgtaaccggcgctcatgtacggttccagaatctggtttccattctcgtccttgcctgccatgatgtcgatgaaggggaaaggagaagaattggtgccgcgcatgtcctctatattggtgtaggtgaacagcaactgattggaaatcttatcggtgaagcggctgttcaaatctgtcgcccaagactgcaccttgttgtccatggaatacatgctgttggcaaacgccatagactgcgtacctacgcgataagtattgttcaagcgatatcccgtatcggaagagttaccgttcggggcattccaagccgtattcttcgtattgttgtagcggaggctcaagcgatggcggtccgtgatgttccagtcgatgcgggccagaatcttggtgttctcctcgtcagcaggaaaacttgtgtaagagcctgcgtcgtagccgtacttgtccttcagatggttgtacaccttctccatatccgacttcagcgtacgggacaccataccttttgcctcttcaccgtcctcacgcgcgcgatactttataacctctcccggagtcttctccttttcgtagtttacgaagaagaacagtttgttcttgatgataggaccgcccagcgtgaagccgtaggtagtcttggactcgtcggaacgtgctcccaggtcctcgccgttgatgcggttaccgcgcatgtcctggttgcggtaataggtataggcagtacctctgaacgtgttcgtaccactcttggtaatggcgttgatgccgccgcctatgaagttcgtctggcgcacgtcgaagggagccaccactacctgcacctcttcgatggcatccatggagatggggttgccgccgccggggaggttggaactaagtccgaagttattgttgaagttggcaccgtcgatagtgaagttcgtggaacgtccgtcaccgccggcaaaactcatgccgttggcatagggagaaaggcgggcaatgtcactgatgctgcggttcacggtgggaagctgcgttatctgtgcagaagagatgttggtagtggcacccgtcttttcagcagtgaacttggtcttggcagccgtcacaatcacttcgttcagcaactcggaagattcactcatctctacgttcaggttgtatacctcacccagctgaagggtgatgtccttataaataaccgtctgatagccgatataggaaatctccacccggtagggaccaccagtgcgcataccctggatagaatagcgtccatcgacgttggtcacggttccgtagcgcgaaccggaaggctgatgaacagcctgtacagtggcgccgataatgggctcattacttgcatccgtcaccttacctgccatagaggcggtggtgacctgcgcatttacacctacggcagccagtagcagtaacgctgtcagtgcaattcttactctctttaacataatgtcttttaaattagttcctaaaacgttatatttcttaaaacactggcaaagatacgcaaaattatatataagaacattacaatatgattacattttttaaggatttattcaatacaaggcagcaccaccgtgaaacggcttccacgaccttcctcggagcggagttcgatgcgtcctcccatcttttcgacgatgagcacacagatggacaagcctagcccgacgccttgggaaaactcgctacgcttgtagaaacgctcaaaaatcatcttctgctcgctgtgcggaatgcctatgccggtatcttccacataaagatgtacctcgctcatgccggacggacaacaataccccagctggatgctgccttctttcgtaaacttgttggcattgttcaggaagttggtgagtacctgtgtcagtcgcatgggatctacattcacctgcacatcttcgggagggaaatccttgaggaactgcaacggcggctggataagcaggctatgcgtctgatagacgtcatcgagcagctggcgcacactctcccgctgaaagatgaacgagaggttacccgactcgatgcgcgacagttccagcacatcgcccaccagtttcagcagcagtttggtattggtgttgataatgtccacaaactcctgccgctcttcgtcggagaactccggctcgttagccagcatgtccgagaagccgacaatggcattgagcggagtgcgtatttcgtgactcatgttattgaggaacgactgtttcagttcggcttgctccgcaagctcgcgggattctatcagctcctgctcgtggtctttcagttcctggatgttctgcagcagtccggctatgatgggtgcgtgtccgggggtgtggatggtattgtagctgaactcccaccactggaactcgccggtgaagttacagcggtactgtcccttgtggtgcgtacgttcgtgccttgacgctatgttcttgcggaaaacgggtaagtcgccgggatggatgtagggagtgatttcattgagcagaagacgaccggagcggtggtgaataagctcgcagaactgcgagtcgcaggacacggaatctccctccagtcgccaggcgtaggtagaatttccttcgatggccaggcagagggtctcatgctcgtagaggaggtttcgcagtgcctcacgcttgcgcctgcgttcgtgcagtaggctgaaagagagcaagactatcaccgtcagcacgaagacagcgcccagaatggagcctacgagtatatggtaacgatagcgctccgagaaagggatgtacatcacggtgtactccaccggaatgctctcgagcgggatgccatacttctgcagcacatgccagttcagcacgtactgcttagcgcattccgtcacctgctgccggggcatccgcccttcgaggcgttccttgataccggtcgccatgtatcttatctggctctccagcggggtgaaatatcctcccagcaagtagtcggcaaagccgaagccctcgttgatggtctgaaacgtgggattgtcaaagagcatgcccacgcgcttggtggtatagtcccgcttggtatagagcagcaacgtgttgtcgccgcgtcccagccacatcagatggcgtatcgctatggagtcgctcgtcatgcgcacaatcttcgtggtgtccagcagcatgtctatgttctgccgtttcagtatggggctgatagtctccccctcgcgcacgcagtgataggaggaaccagcaaagtaaaagccttgggcggaggtcacgatgtcgggcccctgcccttcgcactgttcgttcagcgcgtgccatatcttgcggtccagaaaagtctggccgttcatcagacagatgcgtgccttgcccatgatactctctatcatgcggatggtgcgcaggtaatcgggcgtgtcggcatagcccgtgatgttgggatattgcaggagcagggagatgttgggatagttcacaccgctaaacacgacgggtatttcgtgcgccagcggatgcccgcatgccatcagcgcataggcagcctggtcgtcgagcacggctattagctcggctccccaagcggagaggtcgtccacgaagccggccatgcggaagttctccacctcctccatgtagcggtcgcagtccaggtagtattcgcgtacatcgcagtccaagccgagacggcggaactctttctgcagcagttccagagctttcgtggcaggcggatagcccggctcgaaagagtgtatcagtgcgatgtgccgcgtctccgcatgggcggggc

SEQ ID NO: 4456 - DNA, 13812 bp, Unknown
  gut microbiota DNA sequence
tcatatccggaaggtcctttcgacttgtaccagcaaagatacgaatgttttttaagaataatggactatttcttctgtttctgtaacaaagaatacgttttcttaaatcattgacacatcccaacttatctttcagaggatttaccgaatatccctaaagaaccgattcttcgtccagtattccaaagtggagatctatttgttcttaaccttcggcaacaccgcattcagtaccatatatcccaacataccggcaacaatcgttcccagcaatacaccaaacttcgcctggttcagcagatccggatattctcctgcaaaagaaaggttggcaataaataaagataccgtaaagccaataccccccaacaaggatactccggcaacacttctccaattcattcccggaggcattgaggacaaaccactcttgaccgccagccaggtaaacagaaaaataccgataaacttgccaagaagcaatcctgcagccaccgctatactaacagctccaacaacgccaccgcctccactgaacaccacaccggcattggcaaaggcaaagagcggcagtatcacaaagtttaccgcaccatgcaaattgtcttccagggattgcaaaggactaattacatgatcagaagcgcgctccacttgttttagagtggcaatctgctcattggtcaatataatattatctgatttggtaaccggaaaatcaccgataatgtcgcggatgcgtttaatgtatttcccggcatccaaacggggacgggccggtattacaaaggccagtatcactccggaaatagtgctgtgaatgcccgactgaaggaacaaataccaaataattaccccgataagcaggaagaatatcttctgtgtcataccgaatttccccatatagtaaaggaagaaataaaggacagcagctacaataagatatccgtatgccacttcggaactatagaaaatggcaataaccagaataccgccaatatcatcaactactgcaaatgccgtcagaaaaattttcagactcagaggcacccgcttacccagcagactgagtacccccaatgaaaaagcaatatccgtagccatcggtatagccatgccgcgcgtttccggagtgccctgaacgaccagaagtgaatagacaatgaccggcaccagcataccgccacacgccgctacaaaaggtaaagaggctttacgaaaggaagaaagttcacccaccagcagttcccgctttatctccaaccccacagccagaaagaaaacagtcatcaggcagtcgtttataaactcaatcattttcaacggatgaccgccatgggagaacaagttgaagtctccgatacgcagatgcagttcctgcaaaagaaagccctgatacagcggagccatcggcgaattagcaataacggccgccaaaatagccatcaaaaacagcaagatgctcgccgctatattcagcgacgagaagtttttcacagtacgcaaaataatcataaagaagtatatttgatttaagatttcatcctttcgacatcaatccagcttcaagactgcaaggaacgctttctgaggtacttccacattaccaatctgtttcatacgcttcttacctctcttctgtttctcaagcaattttcgtttacggctcacgtcacctccataacatttggccgttacgtccttacgcacagccttaatcgtttcccgggaaataatcttggcaccgatagcagcctgaatggcgatatcgaactgctgtctcggaatcaggtctttcaacttctcgcacatccggcgtcccaattcgtaggcattgtcaaagtgtgtcaaggtagaaagagcatccaccggctcaccgttcagcaaaatatccagcttcaccagtttggaaggacgaaaaccgttgggatgatagtcaaaagaggcatatcccttagagatactcttcaatttatcatagaaatcgataactatttcgccaagaggcatgtcatagtatatttctacgcggttacctgaaatatattcctgcttcaccagctcgccacgcttgcccagacaaagagtcatgatagggccgatgtaatcagtggtggtaatcaccgaggcacggatatagggctcctcaatacggtctatcatagtagggtcgggcatgctgccggggttatgcacttcagtcatatttccctgcttgtcatagatattgtaggaaacgttgggcacggtggtgataacgttcatgtcaaattcacggtcaaggcgctcctgcacaatctccatatggagcagcccaaggaaaccgcaacggaaaccaaagcccaaagctaatgaagactcaggctggaaagtcagcgaagcatcattcaactgcaacttctccaaagaagaacgcaagtcctcgaaatcttctgcctcgatggggtacacaccggcaaaaaccatcggcttcacctcctcaaaaccggcgatggcctcttcgcaaggacgggcaatatgcgtaatcgtatcacctactttcacttccttagaggttttgatacccgagatgatatagcccacatcccccgtacgcaactccggacgtggcatcatttccattttgagcactccgatttcatccgcatcatattccttgcctgtattgaagaatttcactttatcccctttacgaatcacaccgttcactatcttgaaatatgcaatgataccacggaaagaattgaagacagaatcgaaaatcaacgcctgcaacggagcttcctcgtcaccctccggatgagggatacgctcaatgaccgcagccagaatctcttccactcccatgcctgttttgccggaagcacggataatttcatcacgcttgcagcccaacagttcgacgatttcgtcctccacttcctcgggcatggcgcttgccatgtcacatttgttgatgacggggataatctccaaatcatgctcaatcgccatatagaggtttgaaatggtctgcgcctgcactccttgcgaagcatctacaataagcaacgctccttcacaagcggcgatggaacgtgacacctcgtacgagaagtcaacgtgtcccggagtgtctatcaagttcagaatatacttttcgcctttatatgtatactccatttgtatggcatggctcttgatggtgatacctctttccttctcaaggtccatgtcatccagcatctgtccgttagttacttgtatagtattggtaaattccagcagacggtctgccaaagttgatttaccgtggtcgatatgggcaataatgcaaaaatttcgtatattcttcattgtcaataactatctattaattgggtgcgcaaagatagtgaaaacagagcaaataaaaaaaatgcgttgataacatattcatgtaccaacgcatctttttataacattccaatcaattcctcgcttagttcagctttacaaacaattcgccttccacttcagaagtagagaccttgtcttctcttaacaaccagcccaatcccaggaagaagtccttgtcgatcagtttagttgctttcttgatttgcttgtgagtcaagccatctgtgccattcagtgcagtccaaatctgtcctgcaacattaccagctttttcttttaacatttctatttgcttttagttaaacgttatcctcatctccaaagatagagatgtcggtgtttttatatcgctgcaaagataggtatatttatgttatacaacacgttattaggcactttttttcttactaaggggtaaaaaagttcttttttcttactttgaggacgttttttccaggtattcggtccaaatttgggcagctacctctaccatcttggcacacgggcgtttagcataatactgctcggtacgggcttccggaacggacgaaccttccggttttcttaaccccaacaattcagcacatatcaaagagccatttcgtttcttgaattcagcagccagctcctgcaccaacgcatagtttgccgccttaccttcacggtccttgccttccacagctcctttttccaatccggccaataggaacatgccgcatgcagcaccgcatgtctgcctcatacgacctatgccaccaccaaaagaggcggacatccggaaagcctgctcttctgtaaagccatacatatctgcaaaagctcccactaccgattgcgaacagttatagccactcttgaaaagctccacagctttttcgattctgtcttttgtttccatcatcattattctgtaatttccaacaacatcggacaatggtccgaatgaacaacgtcacccaatattctcgcctccttcaacatcgggcgcaccggttcactcaccatgcaataatcaatgcgccaccctttgttcttggcacgtgaattaaagcgatagctccaccacgtatattcctgcttgtcgggatgaagccaacggaaggaatctatgaatcccgcattgagaaagcgcgtcatccactcccgctcttcaggcaggaagccactgttggtggcattcctgatagggtcgtgaatgtctattgcctcatggcagatattataatcgccgcaaagaatgagtttaggacgcgtacgttccagctccaatacatattcctggaatttctccaaccagaccatcttgaaggcctggcgttcgtcaccgctggtaccggaaggatgataaacactcacaacggacacatcaccgaagtcggcacggataaagcgcccttcgttatcatattcttcaatgcccatgccgtactccacatggtccggttcttgcttgctcaaaatagcgactccgctataccccttcttctgtgcagaatataggtaatgcttataccccaaagcatccagcgcctctgccggatactgttccggttgcagctttgtttcctgcaaacaaagcacatccggctgctcttgtgccagccactcgggaaaaccttttgtcacggcagcccgtagcccatttacgttatatgtaataatcttcatacttatttgatttcttagaaatgaattattcaagatgtcaactcggataccagcagcatgatattcagcacagtgaccaccgcagcaatggcataaagtacaaatgtactccatttgctgtttacatactgccccatcactttgcgtgaagaagtcagtcccacttgcaggaaaaccgtaaacggcagctggatgctcagtatcatctgtgaaatcagcagtcctttgaacgggtctccgataaagaaaatcagcagcagtgcaatacccaatgacagaatcacacccacctgcgagtgactgtctttgatatgataggattctccgaaaataccggcaaagatagaacctgccgccataccgctggttatcgtggaagatatacccgccatcagtaatgccaatgcaaaaaccacggcagcactgttccccagcaacggctccagcaaggatttggcctgctgcaactcttccacctgaataccgcttttaaagaaagttgccgcagccagcagtatcatggcactgttgatagcccatcccacaatcatagagaacagcgtgtcgaacaattcatatttcaacaccttgcggatggacgcatcatctttcttattatattcatggctctgtatcacttccgagtgcagaaacagattatgcggcatcaccaccgcaccgagcacactcatgataatcagcatgctcccatgcgggaacgaaggtgtcacccacccttgtgcggccagcggccaatctatcttcaccagaaacagctcatagataaaggagagcccgatgaccgaaacaaaagcaatgatggaacgttctatcttcttgtaggaattagtgaaaagcatgacgactacaaatacggtagtcaagatagagccccatatgatgggaatgtcaaacagcatctgcaaagcgatggcacctcccaatatctctgccagcgaagtcgagatggaagccagcactgctgtacccaatatgggacgcgacacccaggaaggagtatatttggtagcggcttcggacaagcacaagccggttacaatgccaagatgcgccacattatgctgcaatacaatcagcatgatagtggataaagtcacgacccacagcaatgaatagccaaattcagaccctgccgcaaaattagatgcccagttccccgggtcaataaagcccacagtcaccagcagtccgggacctatatatttaaaaacgtccagaccgcccagatagcgtttgtggtctctccgtttcaagtctttaaaaatattcttcattgtgtctgttcaattaagagcgtaaaaatactcaaataataacaaatacctccatgttaggttcaaaaaaagcccctggcatctttcaatgtcaggggctctcatccattctttcaggcaggaggctcaataccccatctcgtgcaatgccttgcacaattggtcggggcaggaagtggaacgtcttccgcagcgaattccttccaaacgagcaatcaccgcatctaccggcatgcctttcaccaaacgtgaaagtccttgcaggtttccattacatccaccccaaaatgccacctctttcacaataccatcttccacattcagttcgatgttactgctacacgtaccttgcgtcttgtatgtatatgtcattattctccgccttcttccggtttcatgttagtataaaccgtctgtacatcatcaaactcttcgagacgctctatcatcttgtcgatggtttcgcgttgctcgggagtcacatccttcatatcgttcgggatataggtaaactcaccgccgacatcttcaaaaccgcactcttccaaatgtttctggatagctgcatagcttttcggatcaccataaatagtgatagtaccttcttcttcatcctcttcgtagtcttcctctacgtcatagtctatcaagtcaagaatgagttcctccatatcgataccgtctttcttcttgaaagtgaacacgcacttgtgatcaaacaagaaagccagtgaacccattgttcccaagttaccgccgaacttgttgaacacggaacgcacatcggctactgtacgggtagtattatcagtcagcgtatccacaaaaacagctacaccgtgaggaccgtatccttcataagtcatccccttatagtcgctctggtccttacccatcgcattcttgatagcacgttcaatattatccttcggcatgttttcacgcttacaagtagcgattaccgaacgcagtgtcgggttgttttccggctccggaccaccggccttcaccgcaatagcaatttgtttacccagtcttgtaaaggtctttgccatgtgaccccatcttttcaatttggcagcttttctatattcaaacgctcttcccattggaactgtattttaaattatgaattataaattctaaataatgaatcaacgcagcttggcattcaacttgtcctccaggttcttcactagtttggacataatcttgtcaatctgcttatcgttcaacgtggcattctcatcctgcagcaggaagctcaccgcgtaactcttcttaccggcttccagattcttaccctcgtaaacgtcgaagagagaaacctccttcagcagctttttctccgtctcgtaggcaatcttctcgatttccgcaaattgcactttcttgtcgagcagtaacgccaagtcgcgtttcacggcagggaacttggagatttccgtatagctcaccttcacattgcggatggccttcagcaattctttccagttgaaatcggcatagtaaacctcgttgtcaatatcgaatgccttcagcagcttctttgttacaataccgaaagtagccaaccgctttcccccccttgtctgtacggataaaccggcagcatagatgtcatcagtcagattgccgacaaccaaatcatgcatgtgcagccccaatctggcaaagacattctcaacgtatgccttcagctcatataccgagctgttctcatccggatgagcccatgagttggtcaccctcttgccagtcacccacaaaccaagatgatagtcttcggaataagcggcaagcactttctccggattcttcttttcctcgttgaagtgataacaattaccgaattcaaagaatttcaggtctgcattcttacggttggcgttgtgcgagatgctttccaatccaccgaaaagcagtgtctgacgcatggcattcaagtctgcactcaacggattcagcaacattaccagattctttgacggataagactccaggttgtcatagtaagcggcacgggtcaacgagttgttcagaatctcattgaaaccacagcccaccagctgctcggcaaccaggttctgcagtttgttggatttatcatattcacccttggtagtcagacaagacttcaaggtagtcggaatctccacattattatatccgtagatacgcaggatatcctctattacatcgcaatcgcgctgcacgtccacacggtaaggaggaacatccagtgtaagcccttcggctgtctcgtctacaatcttcatttccagacttgtcacgatgctcttgatggtatccaccggaataactttgccaatcagtgagttcactttctcataggcaagttccacacggaaatccttggcaggagcggcgcacacatcttttatttcagaagaaatggtacctccggcaagttcctttaccatcaaagctgccagcttcaggcagtaaatagtggcattcgggtcaatacctctttcaaaacggaaagaagcgtctgtgttcaacgcatggcgacgggctgtcttgcgcacccacgtgggatggaagtaagcactttcaaggaatacatctttggtggtttccgtagaaccggaatccagaccgccgaacacaccggcaatacacatcgcctcttccttattgcaaatcatcaggtcgcgttcgttcaatttacgctccacgccatcaagagttacaaacggagtaccttccggcatggtctttacaatcacctcaccgcctttaatcttatctgcatcgaagcagtgcagcggctggccgaaagcatggacgatatagttggtaatatccaccacattattgataggacgcaggccgataatacgcaacttgttctgcaaccattcggggctttctttcactgtaacccctttcaccgtaacgccggcataccggggacatgcctcgctgttctctacagttactttaatatccaagtcgtgattttctaccgcaaaagcgtctaccgaaggtttctttaaagtagccggcttaccgttctgtatcaagtaggcatacaagtcgcgtgccaccccataatgtgagcaagcatcggcacggttgggagtgatgtccacttccagcacgtaatcgctcttgatgttatagtagtccttggcaagcgtacccggaacagctgtctccggcagtacgatgatgcccgcgtggtctgtaccgataccgatttcatcctcagcacaaatcatgccgacagattccacgccacgaagttttgatttcttgatggtaaagcactcgtcaccgtcatacagttttgtacccaacgtggctactaccactttctgtccggcagctacattcggagcgccgcatacaatctgcacgggttcaccttgtcccaggttcaccgtagtgacgtgcatatggtctgagttaggatgagcttcgcatgtcagcacttcgccgatgaccagtccttccagtccgcctttaatagtttgcacctcttccacacttcccgtttccagtccgatggaggtcagtgccgcagcaacttcatccggtgtcaaatcgaaatcgacatactctttcaaccaattataagagatattcatatcattatatttttattgtttccaaaagtgacctgcaaaggtaataagattttttggttggcagggaattataaatgaagaaaataacaaaaaggcgatgaagtgctttcccttcaccgcctttctcctaatattctatataaatctacaatttatacattcattgcattggcgcctaaagctcccaatatggcggaagcaacagctatcactaccttcaaaattttgtcccaaacgttctttttcatagttttaatctttcaaaattagtaaatacatcttatcctaacgggttctctccctggtcaccgtcggaaccgccaccggaattaccaccatcaccggcatcatccttaccgtccgtaaccactcccgtccatttctcaaactccaccccttggagcagggcacgcgtagtgccgatggcagccgggcgcgtgtattccggagtaaactggcaacgtaaagcagtcacctgattgggattcacgtcttcagatttgaccactcccttacctcgcgtacgggccttcatggtgaatgtgcccaagccatccagacgcaccgtacggctgttcagcaactggctcctcattaccgtcatcaggttacggattacattatgtacgtcacccggagtcagggaagacttctcggcaatcacctcagccaattgttgtgcatccacggctcttcccactttcttcaaactcagatgccaaagtttggcaccctcttttgtcgccagagacgactgtcttgcataataaaataaaggcatactttctttctcctttttacatttttaattcaacatggtttttaatctcgttttgttgatcaacaatgcaaaggtgaggatatatttgcctgcaaacaaagaaaacagcctcgctgaagctgttttctgagataagtttataaagtattgatttacaagtcgacagattaggcaagccaacttaatcaagatatcctacgatgatgattgcctgtactgccatataggtcaaagatactatgacatggggaatcttcagctcattcgccataatctgataagatgtttgcgatgcggtagtccgatattctcatgaagcatcaggcggtgaatatttggcacgcttgcagaaattgaagaagcagaagactagaacggaacagacaacggtatagatgaaatccgcattgacaaacgtattggcaaccgacagcgttgtcaaggtcgtagttaaaaaagctgtattttcatctattattttactatggcctcttttatacactccacgatataatatacatcttcatcagtcacccacggcccggcaggaaggcacataccgattttaaaaatagcttcggataccccattgatataagccggagcatccttatagaccggctgcttgtgcatcggtttccaaaccgggcgtgcctctatttttttgccaagcataaaagcacgcaaagcctccacattctcgttgggctggcaatctgttgtagcacaatctacggcatgaatcacacctgcagcaccacctacggcagtcctgacaacatccttataagcattttcctgccctttgatgcgaagtgaagaatccagagtgattgtacaaagccagaaattagagtcataatcagccgaaggagcttcatgcagcaataccccctccacatccttaagcagttccttatagagagcctgcacatgtcggtgatgtgcaatatgcttatcggcaacggtcatttgaccacgaccaatacctgcacatatattactcatgcgatagttataccctatcgcctcatgctggtaataaggataagcctcacgagcctgcgtggcataccacatgatttgattcttgctttcggcatctttacaaatcaacgcaccaccgccactggtagtaatcatcttgttaccgttaaagctcagcaccccgaacttgccgaacgtccccagtacctgtcccttaaaacgggagccaaaaccttcagcagcatcttccaccactggaatagcatacctatcggctatctccatgatacgtgtacagtcatagggcatgccgtacaatgccacaggaacaatagcttttggctttttgccagtcttggcaatgcggtctttgatggcttcttccaacagttccggagacatgttccaagtttctttctcagaatccacaaataccggaacagcccccagataagtgaccggatgcgaagacgcacagaatgtgaagctttgtacaatcacttcgtcaccctgtcccactccgcaagccaacagagccaaatgtactgccgccgtaccggccgaaagtgccaccacttccttgccttcgcctacaaaacgtttcaaatcctcttcaaaagcattcacgttaggaccgagaggaaccacccagttcgtatcgaaggcttcttttacatatttctgttcaataccctcctcgctcatatgggcaaggcagagataaatagttttatccataaatatatatgtgattatttaatgatcagacttcggattcctcacatagtggggaataaaaagaaaggaaacggctttataaatcctttccagatatcggaataatttactcataaatgtttccatgaccgggatacagactgcaatcctttgttaattccatgatacgttctttcgagatccgtgcatcttccctatcgctattggggaatgaggcaatgactttaacacccgggatatatgaatcacccgagaaaacattgttctcgactttataagtaaggcagcttttatcatgtccgggagtttcaaacacttccacgaaaattcccggaaatatttccactttatcattctcatgtaaaaccgtcacattatctcccatccatattacaggatcattgtgataacgggaaaaattaagtttatccgaacctaaagcctccttaccgaaagaggaagtgtaaactgtgcaatcaggatacaatcgtaataaatcttttataccataaatatggtcgtaatgagtatgagtcagaaacaaggcttgtaccgttccgcacttttcctgaacacactgctttataggagcaatatccccaatatctatcaatacatacccatctttcccctcaacagacagtatataagtattggaggtgaaaacagaattgacaatctgatggatgttcatttcagttatgaccgttgaaagcctcagtggtagcattaccttccttattgatcccttctctaacgaacactttctttatggttagcagaataatcttcacgtccagccagaaagaaatatgatccacgtaccacacatccagttcaaacttacgtttccaactgatatcattccgtccgtttacctgtgcccaccccgtaattcccggacgtacttcatggcgacggaactgtttctctgaatataaaggaagatacttcggcaataaaggacgggggccaaccaatgccatatccccctttaatacattaattaattgtggcaattcatctatggaaagagaacggactattttaccaatctttgtcaggcgttcagcatccggcaacaagtttcctccagaatcccgctcatctgtcattgtcttaaactttatggctttgaatatccgagcattttttccagggcgatcctgggtgaaaaagacaccggcacccttattggtgaaatggaggaaaattatcagaagaagtaatatgggccagataaccaacagaactataaaaacaattacaaagtctaacccacgctttaatcctcttttatacataagcctataatttcattgatcaaaagagttctctttctttatac

SEQ ID NO: 4457 - DNA, 100455 bp, Unknown
  gut microbiota DNA sequence
caacccggaatcaggatacttcattggagtggacattaagaaatttgccataaacatcggactgatcaatttcaagggggatatggtggaaatcaagatgaacataccatacaagttcgaaaatacacaggaagctttggaagaactgtgtgcactcatccgaaacttcataaagggaacggaaatcaacgacaagaagataatgaacatctgcatcaacatctccggaagagtaaatccggaatcaggatatagtttcagcatgttcaacttttcagagcgtcctttggcggatgtattgaatgaaaaaatagggtacccggtctgcatagacaacgacacaagggccatgacctatggagagcatatgcaaggatgcgtcaaaggggaaaaagacatcatttttgtcaacataagctggggactcggaatcggcatcatcatagacgggaaggtatacacgggaaaatctggattttccggagaattcgggcatgtcaatgttttcgataatgaaatactgtgccactgcggcaaaaaaggatgcctggaaacggaagcctcaggatcggcactacaccgcatcctgttggaaagaatcggtagcggagaaagttccatactatcaaaacggactgcagaaaatccgcccaccttggatgaaatcatcaccgcagtcaataaagaggacttgctatgcattgagatagtggaagaaataggccaaaaactgggaaggcaaatagctggattaataagcatattcaatccggaactagtaataatcgggggtacactatcatcaacaggagactatatagtgcagccaatcaaaacggcaataaggaaatactcattgaatctggtcaacaaagacgccacggtgactgtttccaagctaaaagacaaggctggagtagttggggcctgcatgctggcacggagcagaatgttcgaaatttaaaacgaccattgccagcataatgggattgacaaagagtataccaagaacgcaactatcatatgcaaaaatattgaaaaagcgagtcagtagttggttactgataaaagcacagaataaaccagcatcatgataaccgatttccaatactgcctcatattgtggaattcgaaaatgcagattattaaactgtcaataaagagaagatggaatctataggatatactcggaaatattacgaacataacaaagatttgggaaagtataccctaagataaggacagaaaagcaagaagccatcattacgggtatctatattactataattccctatctgtagcctgcgtagtgggtttaggtgacggaaagaggttgtggcaatcacaatctctttctttttatgatacatggggcaagctgttgcatttcagataaaatcctttacctttgccggcaaacacatttatcaagatatcaggatgaagaaagtatttaaattggccggaggattcatggtcggggcatgcatcggctttgtaggaataataggtgtaagagtcctggttttgggagactcgttcgacggtttacacagcaagtttgccgaaaccggcatgctggagacagtaggagtttccttgttagccatactgattctgctgttctccatcttcctgcaagtgcttctgcacgaaggcgggcatcttgtctgcggactggcaaccgactaccgcttcgtctccttccgcatcttcaaccttaccttcatacggaaagacgggaaattatgcatcaagcgtttcagccttgccggaacgggaggccaatgcctgcttaccccacccgaaaggcctcttgaagatatcccaaccaccttgtacaacctgggtggagtgcttgccaacctgctgaccgccatccttgccttcctccccctgctgaccgtagacgggctgccttacctgctgaaattcttccttctgatgctctctctaattggcattctccttgcagggatgaacggcatccccatgaagatgggcggcatcggcaatgatgccgacaacatgcgcctgcttctcaaggacagcaagagcaagcaggcactggtcacccagctgcgcatcaacgcactggtgcaagagggcatgcgtcctaaggacatgcctgccgaatggttcagccaaacggaagacatcaactacaaagatgccctgcaggtcaccatagccttgatgagcgcctcgcgcctgctcgactgcgaagaatgggaagccgcctacaatgcatttgagaaaataatgagccaccggcacgaagtcatcgggcttttgataaaggaaaccgcttgcgagctgctcttcaccgcattggtgacaaagaggaccgcacgggcagaagaattatataccgatgagctggatacctacatccggcaatataaggatgtgacgtcttccaaacagcggctgctctgcgccctggcactctaccgggacaaggacacagcaaaagcaaaggagatttacgaagccacctgccaacggaaaaacaaatacttgatgcagggagaagtcagttcggacatagccttgatgaaatcaatccttaccgccaagaatgccttgtaagatggaacgatatttcttttacttgttatatctactgcttggctgctcactatgcggttgtagcagaaaacaagcgccaaagcagacacaagacccggatacggagaccaccatcccgtacgccgacaccatagcggcacccgtccctccggctccggctaaaagccggacagcccgctacctggactccctcggtttcgtcaacatcgccgaagcggacagcagcatcgccatcgacttgatgtacacccgtgccgacaacttcaccggaaccctattgtacgaagacctgaaagaagcctacctgcaccccgatgccatgaaaagtctgaagcgggcacaacgcctgctgaaagaacagtaccccggctacagcctcatcgtctacgacgcagcgcgccccttgtccgtacaacagaagatgtgggacgtagtgaaaggaacctccaaatacatctatgtctccaacccctcacgcggcggcgggctgcacaactacggattggcggtggacatcagcatactcgacgacaaaggcctccctctgcccatgggcaccccggtagaccatctgggcagagaagcccacatcacagaagaagccgtgctcgtggcacaaggcaagctgacagaacaagaacgtgaaaaccggctgctgctccggcaggtaatgaaagaagccggattccacccgctacccagtgaatggtggcacttcaaccgcgtcagcaggcagacggcaaaggagcgataccgggtcatcccttaactctcacccccagcttgtccggaaacttaaatttgctatcgctttgacgcggatgacgcagatgacgcggatttttaatattcttaatctgtattatcagcgtcatctgtgtctgaaaaataatcagacagaaagctgcgaatttatgccccactttgtcctttttgagataactttgcatcagaataaataagccaagccatgcctttatcccaagacaccctccgcttcatccgcgagcatcgctgcgacgacgtgcgcagccttgccttgcaggcacgccgctacccttcggtagacatgcccgccgccatcacacagatttccggctggcagattgccaaagagaagatacccgcatgggccgagaacgagcatatactctaccccgcccacctttctctggaacaatgctcctcccaagcaacggcacagtataaagcggagattataactaacctgctacatacagaacaagaacatcccgcgcaggacagtacccccgcatcagccggcacctttaccgacctcaccggaggtttcggcatcgactgcgcctatctctcctcccgcttcgggcatgccacttacgtcgagcgccaggaaaccctctgccagatagccgcgcacaacttccctgtcctcggcctgaaccacatctccgtctgccacgcagacagcgtctgccatctgcaagagatggagcccgtggactgtatattcatagaccctgcccgccgcgacggacacggtggaaagaccgtagccatcggcgactgcgaacccgatatagccgccctcgaagaactgctgctgcgcaaggcaagacacgtactggtaaaactctcccccatgctcgacctcacccttgccctgaacgatttgaagcatgtccaccaggcacacatcgtctccgtgggcaacgaatgcaaggaactgctgctcttgctgggacaaggcgaaggagtgccggcagacgacatccccatccattgcgtcaacttcaccggtgtaccggctccccaagccctcgtcttcacccgccggcaggagaaggagcgtgcatgcccctacacccctcaactgaaatcatacctctacgaaccgaatgcctccgtgctgaaagccagtgcattccgcagcctctcctcattgtataaggtggaaaaactgcatcccaacagccacctctacacctcggaccacttcctgccggacttccccggccgcaagttccggattacctcctcctgcggcttcggcaagaaagaagtgaaagagatgctggctgccgagaaaaaggcgaacctcaccgtgcgcaacttccccgccaccgtggccgaactgcgcaaacgactgaaattggccgaagggggaggcacttatctctttgccactactctggcagacgagaagaaggtacttatccgctgccaggctacgggataagacaccaacccctataccttcccctgcacgagatgtacatctcatgttgctcgatatgtacatctcatacagtccgagatgcacatctcgtgcatctttagcatcagtctgccagatgacggcaaagggagataccgccgaaagggtactaccttcaagaatttatgtaacctcattgtaactgaatcgttatctgttcttcaacgctccgcaacctccacgtaacggcaaccctctacttttgcggcagattattaacagataataacaagtatgaaacagattttgagagcattcttattcttactcctattcaccgccaccgtcaatacggccattgccgacgaaaaagcaaatgtcacgaaacaaggaactgtacgtggacgcatcatcgacgccactaaacaaactctcccgggcgcatccatctacatcgagaaactacacactggcgtgacgagcgacgtcaacggcttctacactttctctaaccttgacccgggaacctatacagtaaaggtgagctacgtgggctactctcccgtagaactgaaaatcaccatccccgcaggccgtacactggaaaaagacgtcgtactgaacgaaggcgtggagttgcaggaagtggtggtaggcggcgccttccagggacagcgccgtgccatcaactcacagaaaaacaacatggggattacgaatgtagtctctgccgaccaggtaggcaagttccccgactccaacatcggtgacgcccttaaacgcatctccggcatcaacgtgcagtacgaccaaggcgaggcacgcttcgggcaagtgcggggcacgagtgccgacctcagctccgtcaccatcaacggcaaccgcgttccctctgccgaaggcgatacgcgcaacgtacagctcgacctcattccggcagacatgattcagaccatcgaagtgaacaaggtagtaaccgccgatatggacggcgacgccatcggcggcagcatcaacctcgtcaccaagaactccccctacaagcgtaccattgccgccaccgccggaaccggctacaactgggtgagcgaaaaggcgcaactgaaccttggcttcacctacggcgaccgcttcttcaacgacaaactcggcttgattgtatcggcctcctatcagaactcaccttctggttcctacgacaccgaatttgtatgggagcaggatgacaacggcaagacgtacgtcaacgactaccaaatccgccaatactacgtcacccgcgaacgccaaagctactccgccgcactggactgggacatcaatgccaaccacaaactgaccttcaaaggcatcttcaacaaccgcaacgactgggagaaccgctaccgtaccacgctgaaagaccttgaccccgacggcaacgccaccgtacgcatacagaccaaagccggtacgccggacaaccgtaacgcccgcctggaacgccagcgcaccatggactttgccctcagcggcgaacacctcttcggcgccctctccatggactggcacgccagctatgccaaagccagcgaagaacgtcccaacgaacgctacatcgacttccaactgaagaaacagaagttcgacatggacctgagcgacgaacgccaaccctttgccagccccaaaacaggctctaccatgacattgaacgatgaattcagcctgaaagagctgacggaacagcaggaagacatcaaggagcaggacctgaagttctccgccaacttcaaacttcccttcaagaacggcaacaagctgaagttcggcgcaaaggtagtgcgcaagaccaaggataaagaagtggacttctacgaatactctcctctggacgaggatgccttcatgacgaacagcctggcaaatacagtggaccagaccaacaagaacttcatgcccaacaacaaatatcaggcaggtatctacgccagcaaggaatacaccggctctttagacttgaacaacgcttccctctttgagaaagagcaggtgcaggaagaacttgccggaaacttcaacgcccgcgaaaccgtgacttccggctacctccgcttcgaccaaaaactgacaaaagacgtggaactgatgaccggacttcgcatagagaacaccaaccttgcctatacgggacgcacctacgatgccgacgaagacctcaccagcaagaccgaccgtcagcgcaacagctacatcaacttcctgccgtcgctgctcgtaaagtggaatgtaaacgatgacttcaaagtgcgcggttcgtttacccaaaccttgtcacgccccaaatactcggccctcgtgcccagtgtgaacatcaagcgttccgacaacgaaatcaccatcggaaacccggagctgaaacctaccgtctcctacaacttcgacttgagtgccgactactacttccgcagcatcggtctgataagcgccggcatcttctacaagaagatagacgacttcatcgtagaccaggtgagcaccaactacgaataccagggtaacacctacacccgcttcacccaacccaagaatgcgggcaacgccaacctggtgggtgtagagctgtcctaccagcgcgacttcagcttcattgctcccgctctgaaatgtgtaggtttctacggaacgtacacctacacccactcccgtgtggaagacttcaacttcgaaggccgcgagaatgagaaagacttgagcatgccaggctctccggagcataccgcaaatgcttccctatactttgagaaaggcggtctgaatctgcgcctgagctataacttcgcttccgacttcatcgacgaaatgggagaaagcaccttctacgaccgctactacgacaaggtgaactatatggacgtaaacgccagctataccttcggaaagaagttcaagactaccttctacgccgaagccaacaacctgctgaaccagccgctacgctactaccagggcacaaaagaccgtaccatgcaggcagaatactacggcgtgaaagtgaatgcgggagtgaagattaatttttaaacaacgaattctatctcaacaagttatcaacattaactactcaacaatttaataatgacaatgaagaaaatattccttttactgtttattgccctactcggcaacgcagccattgcccaaatcaccgattactccatcttcgacaagaagttcaacttctacgtagccaacgacctcggccgtaacggctactacgaccaaaagcccatcgccgaactgatgggacaaatggcagaagaagtaggccccgaattcgttcttgccaccggcgatgtacaccactttgaaggcgtacgtagcgtgaacgacccgctttggatgaccaactacgaacttatttacagccacccggagctgatgatagactggttccccctgctgggcaaccacgaataccgcggcaatacgcaggctgtgctcgactacagtaatatcagccgccgctggaccatgcccgcccgttattataccaagacgttcgaggacaacggcgctaccatccgcatcctttgggtagacaccgccccgatgattgacaaataccgcaacgaaagcgagacctatcccgatgcctgcaagcaggattaccagcaacaactttcctggatagattccgtactgactgccgccaaagaggactgggttatcgttgccggacaccatcccatctatgccgaaaccccgaaggacgagagcgaacgcgcggatatgcaggcacgtctcgatcccatcctgcgcaagcacaaggtggatatgtacatctgcgggcacatccacaacttccagcacgtacgcgtggcaggcagcgacatcgactatatcaccaattctgccggttcgctcgcccgcaaggtgaagcccatcgaagggaccgtattctgcagccccgaaccgggtttctccattgtatcggccagcaaaaagacactggaactgcgcatgattgacaagaaagggaatgtattgcacacggtgacgcgcagcaaataatccaagccggcacgcaagcaggcgcattcccccgaagccctgccgaacaaccactttcctcccacgaagcaaaagaccatgtttcgtaggaggatttttccatctcatacgacaaaaacaaagcctatccgcaggaatacaagaaaaagccctatatttgcatttgtcaatacataactatgatgaagaagatacacttcctgctactaatcagcctgctacttgccgcttgcagtgatgacgacaaagagaaacaacccgcttttgtgaccaatatcaccatatccgatgccggaaagaccttcaatcccggtgatgccgtgaccgtcaaagccgacggcttgcagagcggcgaccaaatcatattggacatctactggccgatagccgacaatcctctctttcccgaagggtattcacgctacacacgcgccgttaccacggagcaaaccaccaacagcattactttccttgcccccggacactggcccgcctcacgggtagaaatgttcctggaacgggcaggacagcttcagcctctcggccagatttcggtagccgacggacaatcccccgaagaaccatatctctacggtatcaccaactcccacgccatttacacaccgaccgttccccgcggcatcacccgtatcgacctggtaacacaagaaatatcggaagtaatccagttccatgacggcgaagatttctgccttgccgccaacatccccggcaccaacatcctctgcgggatacgggagaaagacggcagtagtttcatcgacggatacgacctctgcatgcactattggtgtaacccggtagaacgtaacgcaattaccatctgctcggacttcaacaacactgtttccctggaaatggccggagataagctcctcacctactgtagcatctcttatccggtatatacccggttgaatatgccaccgatacatactcccgaaataccattaccggatggactgaagcccgaatccctctcacgctatccgggcgtgatagccgacgtccacatgctgctctcggccaacaacggcgacggcaccttctcgcccgtcgtgatagacatcgccaaagaaaagatgcactgctacgaccccatcaaagccgaagccttgatacctttccggattatggaaccatcccccgaaaacccaaacagcctgcaatgcaaaggaggctatatcgtttcccgtgccaatggtggagatacgcaattctgcttatgggatactactgccggaaacttgaaagagcctttcgccacctaccccaacgccgtacgctccgctgccatgtactactccaaggacgggcagacaaggaaactctacgtgcagtttgcaggctatcgtgaaggcgacttcatcgaaacttatgatttccagacaaaggaatggaggatgtttatgttctacgtaccgtttgcagagattttactggcacgataaccggctcccttactgctttttctcccgcaagtcatccttgggtatggtcgtctcactgccgtcacgcgtagctatatagtgaggagacatgatttcgatgcctgcctcgttaaagacatcctggatattctgatgcaaatcagaataaatctggctaaggctgttggcatccctgatataggcattcacttgataaaccggataataatcctgaagggaagtctccaatacaaacggacgggggtcatctatcactccaggagtattcaatgcagcctctatcaacagctgatgtgtcttccgccacggaacatcgtagccaatactgacctccgaatggataatcaatccatactcacgggcagactggctgtaattgaccgtatgggaagacatgatgaaagagttcggaatggtcaccacctcattcttcggagtacggatgcgggtgacgagcggtgttttctcaatgatgttgcccgtagtatcgttcagcttgatgcggtcacccagcttgaaaggccgcatgtaggttatgaccagtcctgcaatgatattgccgataaccgtactggaaccgagcgaaacaatcaagccgacaaacacggagattccctggaagactcccgacttggaacccggcagataagggtaaatcatggcaatcataaacgcataaagcaagaagcgcacaatatgataggtaggaatggcccaatccggatagaagccgtttatcttcagccgttcagcctgcacctcattggcaagataacgcaccagtctgaccagatacttcaccgcatagcatatcacaaagatagtgaacagattgggtatatagtcggctattccattcaagatgacctttataggattccagatgtaggagaataatgtataagccaagctcttggtctgagggaaaatggagaataataacggaaccgtcagcagcaactgcaacagcatgactacataacgcaccaggttggcaacaaacaccagcaggttgacctgcttctgcgtatccagcaattcataatcctgaatagagatcggtttcagcttggtatccttcagcttctgaatgcgtagtttgagttttctgaacagccagttggtaaacttgaacaagaagaactgtcccacaagcaccaggataaagtacaagatacgcttacccaactgccacaagctatgctccttctgcatggctttcagtttgtccaccacgacatgcctcttgttggcggccagctggtcgcgggtacagttttcccacaaagcatcctgatcggtaaaggaaatgatgaccttttcgccatacatcaagtctgtaacaatatccgtactctctaaataaacagagtccggacgcagattgaaacgcgtgcccaatgcttcgatgacgttgcttacatctttggctcgctgttggggcgtatgccctccacgcttggcatacagatagaacaaagtgtccttctccaccaccaccggaatacccggtgtcaccgtccgcaacgaatcaatgcgttgtttctgcaatgccagcttcaccgaatcggccgcatagcccgccaacttcatctgctccatttccatccgcaggttcgcctcattcagccgggctgtttccaactcctgccggacaagcgacaactgaatcgaatcggagtcagtccttgccactgtgacactccccacactatcctcacctaaaacactgagcactttatctaccaactgagctgacactccgtctgccagcatcaacagccaacaaagacagaaagcacggataaccttcatatataaacttcttgatttgattctttaattatgcaaatatacccaataaatgcttcaaacatacggaatgtttttaacttcctactctaatcgacataactttttcatgcaaacatgaaagttctgtatccggtttgcactatctttgtactcaaaattgacatacctatggatatattgtttcttgtcggaggactgctcctcattcttctgggtgccaatggcttgacagacggtgccgcatccgttgccaaacgtttccatataccgtccatcgtcatcgggcttaccattgttgccttcggcacttccgcaccggaactcaccgtcagcatatcctctgctctcaaaggcagtgcagacattgccattggcaatgtggtgggaagcaatacgttcaataccctgatgattgtgggttgtacggccctttttgccccgatagccattacccgtaacacactgaaacgcgaaatccccctttgcatcctttcatccttcgccctgctgatttgtgccaacgacgtcttactggacagcagtggggagaacatactcagcatcaccgacggcctattgctgctatgcttctttaccattttcctgagttatacttttgccattgcaaaaagggatggaagtatgaaggaaccggaaaaggagcacttacaggaagaagacgaaatcaggctgttacccgcgtggaagtccgccctatacattctcggcggacttgccggcctcatcatcggaggtaatttctttgtagacggtgccagcggcatagcccgcggattgggtgtcagcgaatccatcatcggtctcacgctcgtagcaggcggcacttcattacccgaactcgccacctccatcgtagccgccttgaagaaaagccccgaaatagccatcggaaacgtcatcggaagtaatctcttcaatatattcttcgtactgggttgttcggcctccatcactccactgcgtctgacgggcatcaccaatttcgatttgtgggtactcgtagggtccagcatcctgctttggctgttcggtatctttttcgggaaacgcatcatcacccgggtggaaggaagcattctgattctctgctacattgcctacacagcggtactgatatacaacctctaacagcaaatttacaaacaccctacgcggtattttaaagattatcacgtatttttaaataaggcaagctgtacctcggcataaaaaataagcaagcttattttgttctgctctcagtttgcattacctttgtggtctcaatattgaacaactatggcaattacaatcaagaaagtaaccacaagacgggaactggagcgctttatccgtttcaactacctgctatacaaaaacaacccttattccgtccccgaccttttcgatgacatgctcaacaccttcaacaagaagaaaaacgctgcattcgaattttgtgaagccgactatttcctggcttatcgggaaggtaaaatcgtaggacgtgtagctgccatcatcaaccacaaggcaaaccaaacctggaacaaaaaggaagtccgcttcggctggatagacttcatcgatgatgcggaagtctccgatgccctgattcgcaccgtggaagaatggggaaaagaacggggaatgacacatatacaaggcccgctgggattcacagatttcgatgccgaaggtatgctcatcgaaggattcgaccagctcagcaccatggccaccatttataactatccctactatccgcaacatctggaacgcatgggctttgagaaggatgccgattgggtggagtacaaaatctacattcccgacgccatacccgacaagcacaagcgcatctccgacctcatccagcgcaagtataacctcaaggtaaagaaatacacatctgccaagaagattgcccaagactacggtcaggccatcttcgaactgatgaacgaagcctatcagccactctatggctattctgcactgagccaacggcagattgaccaatacgtcaagatgtacctgcccatcctcgacctacgcatggtgacattgattaccgatgccgatgaccagctgcttgccgtaggcatttccatgccgtcactcgccgaagcgttgcaaaaagcccacgggcgcctgcttcctatgggttggtatcacctggccaagaccatcttcttgaagaaatatcccaagatgctcgatttgctgctggttgccgtgaaaccggagtatcagaacaagggggtaaatgcattgttgttctccgaccttatccccgtctatcagcaacttggtttcgagtatgccgagagtaatccggagctggagctgaacggcaaggtgcaagcgcagtgggagtacttcaagacggaacagcataaacggagaagatgctttgtgaaaggaataaaataagttctaaatccagaatataagcttgtcagaagtccataaaagacattatttttttgcgaacccccgaatttctcattacctttgtcgcaatgcgcaatatgaaggaataacgtacttatggaagataacaacaatatgaccctgccgctggaagaagcagacaacaatatcacagagagccccgtttccagcgtggaatataccgacgacaacatccgccacctggacgacatggagcatatccgtgtccgttccggtatgtacataggccgtctgggcgacggctcacagaacgatgacggcatctatgtgttgctgaaagaagtgatggacaacagcatcgacgagttcaagatgggtgccggaaagcgtatagaagtgactatagaagacagtctgcgtgtcagcgtacgcgactatggacgaggcattccgcaaggcaaactggtagaggcggtcagcaaactgaataccgggggtaaatatgactcgaaggctttcaagaaaagtgtcggactgaacggcgtgggcatcaaggcggtcaatgcgctgagtagccgtttcgaggtacgcagttaccgcgacggcaaagtacgtaccgccatcttcgagaaaggaacgctgttgagtgatgtgaccgaagactcgacagaagaaagcggaacctatatcttcttcgaaccggacgccacactcttcctgaactattccttccagaaccagttcgtagaaaccctgctgcgcaactacacctacctgaatacgggcctcaccttcatttacaacggccagcgcatcgtttcccgccacgggctggaggacttgctgaaagacaacatgaccagcgaaggcctttacgacatcatccacctgaaaggagaggacatcgagattgccttcacacacaccaaccaatacggcgaagagtactactcctttgtcaacgggcaacacaccacccaaggcggcacacaccagactgccttgaaggaacacattgcccgtaccatcaaggagttctacaacaagaaccaggaatatgccgacatccgcaacggactggtagccgccattgccatcgacgtggaggaacccatgttcgagagccagaccaaaacgaaactgggcagcaacaacatgtggcctgccgcgccgcaggaacacaagcccgccggccccacggtgaacaaatacgtaggagacttcatcaagacggaagtggacaactacctccacaagaacccgcttgtggccgaagtgatgctgcaaaagatacaagactccgagaaagagcgcaaagccattgccggcgtcaccaagctggcacgcgaacgcgccaagaaagccaacctgcacaaccgcaagctgcgcgactgccgctaccacttgagtgacggtaaaggcaaagaccaggaaaccgaatcctgcatcttcattaccgagggagactctgccagcggttccatcaccaagagccgcgacgtgaatacccaagcagtattcagcctgcgtggtaaaccgctaaattcctacggactcaccaagaaagtagtttatgaaaacgaagaattcaacttgcttcaagcagccttgaatatagaagacggcatagagacactgcgctacaacaaagtcatcgtagctaccgatgccgatgtggacggcatgcacatccgcctgctcatcatcaccttcttcctgcagttcttccccgacctgataaagaaagggcatgtatatatcctgcaaacccctctctttcgcgtgcgcaacaaaaagaagacaagttattgctatacagaggaggaacgtgtgaaagccattgaagaactgggtcccaaccccgaaatcacccgattcaaaggtctgggagaaatctcgcccgacgagttcaagcattttatcggcaaggatatgcgtctggaacaagtgtccctgcgcaagacagacctcgtaaaagagctgctggaattctacatgggtaagaataccatggaacgacaaaactttattatcaacaacttggttatagaagaagatttggcatcatgagaagagctatctttccgggaacattcgacccgtttactatcggacactcttcggtagtgagccgtgcactgacttttatagacgaaatcgtcataggcatcggcatcaatgaaaataagaatacgtatttccccttggaaaagcgcgaacaaatgatacgagactactaccggaacgagccgcgcatcattgtgcagtcctatgactgcctgactatcgactttgcccggcaggtagatgccagtctgataatacgcggcatacgcaccgtgaaggatttcgaatacgaggaaaccattgccgacatcaaccgcaaactgaccggcatagaaaccatcctgctcttcaccgagccggaacttacctgcgtcagttccaccaccgtgcgcgaactgctgcaatacggcaaggacataagcatgttcataccggagggaatggagattagggattaaggataaaggattagggattaaaatggaaatgatgaaaaaactatttactattataatatgtatatgcgcggtgacggcacaagcgcaaaagccgaacaatgaagccctgcgcaaactgcaaatggcagagtttgccatcaccaacctttatgtggacaaggtggatgaagacaagctggtggaagaagccatcatcaagatgctggcacaactcgacccgcactccacctacaacaacgccgaagaagtgaagaagatgaacgagccgttgcaaggcaatttcgagggcatcggcgtacagtttcagatgatagaagataccctgcttgtgatacaacccgtgagcaacggaccttccgagaaggtgggcatccttgccggcgaccgtatcgtagccgtcaatgacagcgccattgccggagtaaaaatgagcacggaagatattatgagccgcctgcgcggaccgaaagactcggaagtgaaactcaccatcgtgcgccgtggcgtggacgaccagctgtacttcaccgtgaagcgtgacaaaattcccatcctcagcctggacgcatcttacatgatacaacccaaaaccggctatatccgtatcaaccgcttcggggcaaccaccgccgaagagtttgcagaagccctgaaaagcctgcaaaagaaaggaatgaaagacctcatcctcgacctgcaaggaaatggaggagggtatctgaatgccgccatcgaccttgccaacgaatttctgaagcaaaaagaactcatcgtctacaccgaaggaagggccgcacgccgcagtgatttctttgccaaaggtacgggcaacttcaagaacggccgtctcatcatattggtggacgagtactccgcttctgccagtgaaatcgtgaccggagccatccaggactgggacagaggcgtggtagtaggacgccgcaccttcggcaagggattggtacagcgtcctatcgacctgccggacggttccatgattcgcctcactatcgcccgctactatactccttcgggccgttgtatccagaagccttacgacagcactgccaacctcgacggccgcctaaccggcgagaacagtcaggataagtataaccaggaactgatagaccgcttcaatcatggagaaatgattcatgcggacagtatccattttgccgactccctgaaagcacagaccaagcgtatgggacgtaccgtttacggaggtggaggtatcatgcccgacttcttcgtccccatcgacactacccagtacacagactatcaccgcaacctcgtagccaaaggcgtggttatcaaagccactaccggctacatcgagaagcaccggaaggagttgcagaacaaatacaagaaattcgaagccttcaacgagaagttcgagatagacgataacttccttgccgaaatacgtacgcttgccgacaaagagaaaatcaagtttgacgagaaacagtacaaccaatccctaccgctcatcaagacacaacttaaagccttgatagcccgtgacctatgggacatgaacgaatacttccaggtgatgaacagcacgaaccagagcgtgcagcaagctctaaaagtgctgaacgaaggcatctacagcactattatccaatagccgacttgaaacaaacttaggcgcggattatgcggatttagtttatctaattccgcgtaattcgcgcctaaaatcattctccgaacagccacttattcagccacttgttgacgtagatgttgaccacagcacatccagcaccgattgcagcccccgccaacacatccgacggataatgcactccctcgttcatacgggaaactcccacggaacaagcccacagggcagacggagctatcacataccatttaggatactttacactgagcgaggtggcaagggcaaaagccgtcgccgtatgtccggaaggaaaagacgggctgccttcatggctatatgcatgcactctgtcgggatatttatcataaggacgctcacggtccaccagatatttcattccataagtcacaacaaaagcccccgctacacttgtacctacgtagaccgcatctttcagcaaacccttatcatgttttatccaagcggcaaccgccatcgccaccggaacaccgacagcaacatagggctccgaacgtgaaattatcttattatagttacggacaaacttgccatcccaactgttaacccggtgcaaagtgttaatatcccaattctgtgccgaaagaccggatacaacaaggcagataaaatatacaaaaaaaatagcctttttcataagtcctttatattagtttgacgcaaagataggacaaatagatagagttttcacaaaaaaattctatctttgttgccacatttataataattcgctaatcatttcatgagactggaaacttgctgcaaccgacagattgattgtatggtatgtccccaaaaatcagaaggagtattggtttaccgccactaccccaagggacaacatttctctgctgaaaagtgcacacagaactgcatgatatttatgctgaaaggtgaattacttgtaaacagtgacgaatatccgggcaccactctccaaagccgccagctcatcttgcaagccatcggctccaaagtagaactcctggctttgaccgaagtggaatatattgtctattggttcaccgagcttcctctgatttgcgaagagcgctacaaggagatactgaaacgctcggaagcccccttgacttataccccgcttaccgcgatttccatgctcgaagggctcctgaaaagccttgcctgctacctcaacgagcaaccctatgcgtgcagcaaatacattgaaatgaaatgccaggaattggtatacatattgacatgctactatccgctacaccaaatcagtacattcttctaccccatcagcacttatacggaaagcttccaatatttcgtcatgcagaactacgacaaggtgaagaatgtggaagagtttgcccacctcggcggatataccactaccacattccgccgtctgtttaaaaatatgtatggggtcccggtctatgaatggattctggacaagaaacgtgaaggaattctgaacgacctgcaatacaccaaacaacgcatttcaatcatcagcgcccgctatggctttgattccctatcccactttgcccacttctgcaaagactctttcggagacacgcctcgcgccctgagaaaacgcttggcaaacggagaaaagatttccatcatatgcaaagagcaaggcaaagaccaggaggacgagtaaaccttttacttgtccgcaaacttcgcattctgccggattacggaattatttctttaatcgcttgctttatcgctggatttctcctatttttgcgaaacatttacagaagtatcctgatagaacaaattttcaaactattaaataacttaaattcaatcatttatgtggttaagtaattcatctgtaggaaggaaagtggtgatgagcgttaccggtatcgcccttgtcctgtttctgacatttcacatggcgatgaacctggttgcattagtctcggctaatggctacaacatggtttgtgagttcctgggagcaaactggtacgcattggtggctacggtaggtctggctgccttattcatcatccacatcatctacgctttctggctgactatgcagaaccgtaaggcacgtggtagcgaacgctatgccgttacggaaaagcccaagactgtggaatgggcttctcagaacatgctcgtactgggtatcatcgtaatcgtgggtttgggcctgcacctggtaaacttctgggctaaaatgcagcttcccgagttgatgcacaacatgggcatgcatgccgacaccctcacgctggcatatgcagccaacggtgtctatcacattcaaaacaccttcagcaatccggtattcgtagtgctttacctcgtttggctgggcgcattgtggttccacctcactcacggtttctggagctccatgcagtctttgggctggaacaacaaagtatggattaaccgttggaaatgtatctccaacatctattctactatcgttgtcctctgcttcgctctggtagttgtcgtattctttgcaaaatcattgtgcggcgcttgctaaattcaaattgtaaatgactaaattgtaaattgcattatgactaagatagattctaaaataccggaaggaccggtggctgagaaatggaccaattataaggctcaccaaaaattagtaaaccctgccaacaaacgtcgtctggacatcatcgtagtaggaaccggacttgccggtgccagtgctgccgcctctctgggcgaaatgggtttcagagtattcaacttctgcatccaggactctccgcgccgtgcacactccatcgctgcacaaggtggtatcaatgctgctaagaattaccaaaacgacggtgactctgtataccgtctgttctacgatacagtaaagggtggcgactaccgtgcccgcgaagccaacgtttaccgtctggctgaagtatccaacaatattatcgaccaatgcgttgcacaaggtgttcctttcgcccgcgaatacggcggtacactggacaaccgttctttcggtggtgctcaggtatcccgtactttctatgccaagggtcagaccggacagcagctgttgctgggtgcatactctgcattgagccgccaggtgaacgtaggcactgtgaaactgtatacccgctacgaaatggaagacgttgtcctcattgacggacgtgcccgcggtatcattgcaaagaacctcgttaccggtaaattggaacgttttgccgcccacgctgtggtaatcgctaccggtggttacggcaatgcctacttcctttctaccaatgcaatggcatgtaactgctctgcagcaatggcttgctaccgtaaaggtgcctggtttgccaaccctgcttacgtacagattcaccccacttgtatcccggttcacggtgacaagcagtctaagctgactttgatgtccgaatctctgcgtaacgatggtcgtatctgggttccgaagaagctggaagatgccaagaaactgcaggaaggtacactgcaaggaaaagatattcccgaggaagaccgcgactactacctggaacgccgttatccggcattcggtaacctcgttccgcgtgacgttgccagccgcgctgccaaagaacgctgcgacaagggcttcggcgtgaacaacaccggtcttgccgtattccttgacttctccgaagctatcaaccgtctgggtaaagatgtcgttgcacaacgttacggcaacctcttcgatatgtatgaagaaatcactgatgtcagcccatacgaaaacccgatgatgatttatccggctatccactataccatgggtggtatctgggttgactacgaactgatgacctccatcaagggactgttcgccatcggtgaatgtaacttctccgaccacggtgcaaaccgcctcggtgcttccgccctgatgcaaggtctggccgatggttacttcgtattgccttacactatccagaactatctggccgaccagattacagttccccgtttctctaccgacctgcccgaatttgcagctgcagaaaaggccgttcaggagaagattgactggatgatgaacatcaagggtaagaagtctgtagactctatccacaaggaactgggccacattatgtgggaatatgtaggtatgggacgtacggccgaaggcttgaaggaaggtctgaagaagctgaaagaagtccgcaaggagttcgagaaagaactgttcatcccgggcgacaaggaaggtatgaatgtagaactcgacaaggctatccgtctgtacgacttcatcactatgggcgagctggttgcttacgatgcactgaaccgtaacgaaagctgcggcggtcacttccgtgaagaatatcagactgaagaaggcgaagccaagcgtgacgatgaaaactacttctacgtggcttgctgggaatatcagggttctgacgaaaaggaaccggtattgctgaaagagccgctggtttacgaagcaatcaaggtacagactcgtaactacaagagctaatcgggaagttgaacatttaaagaattaaagaaaatggataaaaatatatcatttacgctcaaggtatggcgccagaagggtccgaaagcaaaaggcgcttttgaaacataccaaatgaaagatatcccgggcgatacttcattcctcgaaatgctggatatcttgaacgaacagctgatttctgaaggtaaagaaccggttgtattcgaccacgactgccgcgaaggtatctgcggtatgtgttcgctctacatcaacggacacccccacggtcctgcaaccggcgctactacttgccaaatttatatgcgtcgtttcaacgacggcgataccatcactgttgaaccgtggcgctctgccggtttcccggttatcaaggacttgatggtcgaccgtacggcctacgacaagattatgcaggcaggcggctacgtcagcgtacgtaccggtgctccccaggatgccaacgctatcctgattccgaagcccatcgctgacgaggctatggatgctgccagctgtatcggttgtggtgcttgtgtggctgcttgtaagaacggttctgctatgctgttcgtttctgccaaggtgagccagctgaacctgttgccccaaggcaaaccggaagcattgcgccgtgccaaggctatgttgagcaagatggacgaactcggtttcggtaactgtacaaacactcgtgcgtgcgaagctgaatgcccgaagaatgtttccatcagcaacattgctcgcctgaaccgcgactttatcattgcgaaactgaaagactaatccggtctttctgcaaataatataggatgcgcttcggataaaccttttgagcaagctcagatttatcactcagctttcactatatttgattaatatcacaagagactcctctgccgggaaaccgccggaggagtttttttatgacatgccgtttacttcagataaattgccggcacgcaagctacggggagaagccccgaaattctttttgcagaaattggaaaaatgaggcagcgattcaaagccatatttatagcaaatctctgatatagaagcatccgtataacgaagttcataaaccacgctttccttcctccgttccatcatccactcgtacaccggttgatgaaaaacagaattgaatatacgccggaaagtagctactgtatatcctcccaactgggcaagttcctctaccgtcttgactttggcatgattctgcaagacaaagtagtggaaggaattagtatactgggcaagaggatgtatcagcatggaaagctcatagtcggagtagtaatttccaagaatgaaagcaagttctttccgtttgaaacaaagcatttcccggcaaatcttctcctcggacaaataggccttggaactttccagaaagagctgcaactcgggagtaatggtcaaaggatagaatatcaatggaggggtaacctctttcataatatggttataccggtcctcacagaagaattcaggcttactgaaccggtaacaaacgcattccacatccgtcatggcaagtatttcgtacttggaaccaatagcttgaaggatgaactcacctgcatgcaacacagttcccgcatactccttactgttgacaagcacttctcctttcagcaggaaaattataatattttcctcacactttcgcgccggcagatggaatcctctgaggtgggaagcatatattattgcattgtccacagccttgggacattgagcgcattgttttttacctctgcaagcagaagagttgggcatcggcaagtagatttgtttgtttgttgcagtgacaaaaatagataaataatactcataaaagaaacattccccgaaaactttcataaagaagtttcggggaatgaataaaatagaagtaattcagttttttattgcggacagtgccgttttatttttccacgttcgtatcatcagccgtactccatggaccaacttcaggtacaaaggttacttttgccgccttattggccagcgtcagcgtataacgtatctttttgccttcaccccaggcttgtgtatcattcaagtcaatggcggaagttacagtatcaagaagaacgtctttctcatagatgtcatagacaacattgattttggcattcgtatccaacgtctggggcatcaacatccaggctgtattcacttccacacccgttgtattcacttccaatgcaccatcgtcaatcgtatgtgcataagtggctgttccttcctgtgacttccatattgaatcatcaaaaccataagttcctttattgtgcacaccggatattgtaagtgttttcagtttataagtcaaagcgtcggctgccttgacagtgaaatttatttgggtcagtatatggccgaatttcaaagataccccactggcatttgatgccttggttgcatccgtcgctttcgcggctaccaagtccgtttgggcagctacatccgctaccgtataagtaatggaaggatatatagcaccagcagccggttgattgtacgtcaaggccccggtacccggattcccgtaagcaaagaactgcaagttatccgtcattggccaataatatgttcccccagtcaaactccagtcgggagcactataagttaccttaacagctgccatgaattccttcatcgcatcaaaagtcgcaacggaggccattgttgttgctcccgtattataagcatacacagtgaaccctaccttctgcaattccggcaaatcagtcactgtggctctcgtagtgttacccactactgttcccaatttaatctccgccttttgtccggcattctctatctcctcactttccgagcaactcattactgctgctgcagccaaagccaaaaataaaaccttcttcataattgtctgttattaaagttaatatatttatttgtctgtttgctatcaattcaccggtagctccacatccgtctcatcatcccaatcatccacatcgccaccaatccctccatctccttcatcggttcccggttccaaatcatccaccacaaccttgtcctccggtacgggaacctcgatatggatttccgacccaggaacgcccacatcaggttcttcttcgcctcctcccgagggaggagctgtttcaatcacttccgtgatatccaccttcacctcttgaaccgttttatctcgtttcacaatcttcagtgtcagcaacataggactatccgcacgggtcttggtatctttcagtaatacaaaactggagaaatacccccataaaagcccgttttcacgctttgtatccacacatataggtacctcgctcaaatggcaagcacggttgcctataaagtaacttccgttcaagccgtccacatggcagatgatgctcgatattctatcccatccttccacctttatatcaaaggaataatggtccactaccgcttccggcttccagttcaacggaagcgccacatcactctgccttatttccacctcgtccaaagccaccacatacaaagggtcgggcgaccaaaccatatcttcgtgtacatccagccccgtacagtgtcccgtaaaagcctcaatcgtctcataactctcgtcgccccgtatctgtatactctccgtattgaagttataggccaccaccgcatacttccccggcggtaccttcacctcaccccctccggcaggcagataactttcaacctttctcccctgagtatctttcggatagaagataatccgcatggtctgcggcagcttatccgtcacccctttccaatccagtttaatctgtactccgctaacgggataatcatccagcatatcgcggaagtcacagcttcccagcattggcaacagtccgaagaacagccagagaatcatatgccgtgcatctttcataccactcatctccccgacgttagaagccataccaaagaaatttttgcttttgtcggcccgataaagtgatactttccactgctgacccaaaccaagtcatttccataagaagtatatttcctgtactccgtatccaagtatccaatgcccacactgaattcaatcgccagatgccgagccagtggacgcacgtatccataagttattcctgcagctgcgtaatacttcccccggtatcccttctcctctttcaactgaaaatcataggtacctccttcggcatatgctcccaggaagtgtccggacaatcttccgcgcgtatggcggtttcccaaccagtaacgcgcctctgtccctcccgaaaggagctgatagcagaaattacatccgctgtcagaccaccaagggcatttgtactcaacattcaaagaccacctctttcccaatggcagctccacttctatgttcggagccaaggccaggtcgtaaagcaaattattttttaacgccagcaccgttttacaagtatggctatgggattctaccgacttattctgccctattacctgccccgacatcatgcaaaaaaggagtagccaaaagacatatataaaaatgcgttttcccataatttcgcgttgtatacaaacaaaagtagaagataattaccgaataaaaatcactttccatcactcttttcaaaggctgaaaggttctgtgaaacgattgaaacagatttgcaacttctgccttatccgggacgctgtgaatagattcttctctctcaaaaagtcaatccgtgtgcgaaaacagtaaaattcagtgaaagaaatacaaaagaagtagcaggaacattctgaaatttggaagataacaacgggaaccttacatttgtaatgtgatttttttcatagtattagatttaaggttaacaaaggttggagtacagcggtactcctttttttatgcccatacgtttctccgaatgacaaaaaatagctatcttcgatggcttttataactgttaaagaagaaaacatcaccacttgagcccattatgaaaaaaccggtactcgcattgctttccataatcctacttaccgcaggatgttcccaacggcctgctgccaccaccaagatacccctaaccagcgcacaccgtggtgccgccaccatcgctcccgaaaacacaatggcatccgtagattcgtgcatcaaatacggtgtaggcaatatagaatgcgatgtctgcatcagtaaggacagtgtcttctacgtactgcacgattccaccctcgaccgtaccaccaacggtaccggcgccatctcccaatggctgtccgccgacatcgacacactggatgccggctcttggtttgcgccccgatttgccggacaacgggtactacgtcttaccgacctgctacgcaaggccaaagagcacggtttaagaatcaccatcgactaccgcaacggcagtctgcaccaattactgaacttgataaaggacgaaggcatgctggaaaactgcaacttcaccttcagcaaggagtatcatgccaaatgcttcagaaagatggcacccgaggtaagaaccctgcaagcctacatcaaaagtgaaaaagacatagagcatgtcgtaaaggaactgcaccccgacatcgctgtcgtttggattgactcccttaccccgcaattcgtaaagaaatgccgtgagcacaacctgcaggtactggcactcgtcctggggctggacgacaagacggaagagaaccagaaggcagtcgacctgggggtagacatcatagcgacggaccacccggaaaagttcatcatgaaatacgggaaaccgtccatataaggcaagagacctgccgcgctcaagtcagcaagtgatagacaccacccaccattgccttgaccactcccttcatctccaattcaaaaagcaaggcactcatccggttgacgggtatgtccgcttccaccaccatcgcattgatatggaggtctccctgccgcataaggatgcgcacaacgagctcctcctcttccgtcagttccgggaagagattacgctggataccttctgtccgggcaggctgctccgctacggcccagcccataatctgcacaaactcttccgcactctggataagggcggccttgttgtcgcgtatcaaccggttgcaaccgatggaagattcgtccgtaacacgtcccggaacggcaaaacagtcacgatggtatccctccgccaactctgcagtgataagggaacctccctttgcggcagactccaccacaatggtagcatcactcatacccgccacaatacggttacggctaacaaagttatgcttgtccggattcgtcccggtaaggaattcggtcagcagtccaccttgtgccagcatgtcgatggctgttttccggtggacatacggatagatgcggtccagtccgtgagcaaggacagcaacggtagggagatgatttgccaaagcggcccgatgggcatggatatctatcccgtaagccagtccgcttactaccagcacatcgggacaaagaacggccaaatcgcgcaggaagtcggcacagaattgcttgccgtaatcggtggcacggcgtgtacctaccatatcgatgacatgcaggcggttgaaatcggtgtttcctttaaagaaaagtacaatcggcgcatcctcacattcgcgcaagcgggaagggtaagcctcatccttcaacgtcaggcaggaaagacgattcttctctacaaactccatctcctgctcggcacgcagaaaggcagcgggacaatcaagagccgtcactacccccggattcacaccgggcatgatttcggggagctccttccgccgactgaatacttcggcagcactgcccataccctctattaaacgctttgccccgatatgtcctataccggggcaaagtgtgagagctatgctgcaaatccgttcgtcactgttcattccaccacagattacacagattcacacggattgagataaggggcaaagagacggtcgaacagttcgctatcgcttaaccgcccgttcaccacacatacggtttcaactatgcctttgagacagactttgccgtcggaagcacggaagatatcttggtaaaagacgtacttgataccctccttcttcatgtagagtttggagacaaactcgtcaccactcctcaggggagtcttgaaagccatattgatacgtgccactaccgggtctaccccctgctcgtgcagtccggcaaagctgacgccggcactcaacagaaactcatggcgcgtatgctccagataatgctgataattggcattattgacgatgccttgcaggtcgcattcatagtcgcgcaccttcatgggaagttcatagatataattcatatttactattggactatttgatacttagccacgttgtttctccacatccaagcctttgaacttcttcagttcctctacgctgaccagcttgtagagtttgtcactgggacgtattttcaccgatttcatcgagaaatgctggcctttctttacagtctgcacgggtttcaaatcgacgcgtgcctcgtccaaagtgacgaattcggcacccgttgtgggacccgtaatcagcaacttgtcgcctacgctcacttcggctgcttctaccaggaactctgccacaccgatgtttgagaagtagcggatgcccttacccacatagattttacgttccgtagcggcagagccgtagttcttggtccattcgcccaagcgttgtcccaggtagtagccgtcccagaaaccacgattgaagaccgtcttcaaacgttcgtcccaccgggcaatcttctcatcggtgaatgtatcgtccagataggaacggatggcttctttgtaacactccactaccgtgcgcacgtactcgggtccgcgggcacgtccttctattttgaaaacacgaacacctgcatccagcatcttgttcatgaagtggatagtttttaagtctttgggggacatgatgtattggttgtccacctccaattccacatccgtctccttgtcgcgcaccgtataactacggcggcatacctgcatgcaagcaccacggttggcagagtggttcatctcatgcaatgagagataacactttccgctgactgccatgcaaagggcaccgtggcagaacatctctatacgtatctgctctccgctgggtccacagatattctcctcacggatatggcggtagatttctgccacttgctccagattcaactcacgcgccagcaccaccacatcggcaaactgcgcatagaagcgcagggcttccacgttgctgatgttgagctgtgtgctgaggtgtacctcctgccctatctgccgggcataactcatcactgccacatcagcggcaatgactgccgagatgcctgccgcctttgccgcatctacaatggtacgcatcagcggaatgtcatggtcgtatataatggtattgacggtgaggtagctcttcatgccatgttcgtcgcacgtccgggctatttcccgcaaatcgtcgatagtgaaggtatttgccgaacgggcacgcatgttcaggttctcgataccgaaatagatggagtcggcacctgcttgtatggctgctgcgagagattcgcgcgagcctaccggtgccatgatttcgaagtcactgattgagtgtttcatcatttctttttgaattagagtatgcaaaggtaggcttttttctgtacttttgcggacaaatccgcttagattatgaagattaaagatatagacctgggcccacgccccgtattcctcgccccgatggaggacgtcaccgaccctgctttccgcctgatgtgcaagcacttcggagcagacatggtatataccgagttcgtttctgccgatgccttgatacgctccgtaggcaagacccagcagaaactgaacatcagcgatgaagagcggcccgtagccatacagatatacggacgggacaccgccaccatggtagaagccgcccgcattgtggagcaggcacatccggacacgctggacatcaacttcggctgccccgtgaagcgcgttgccggcaagggtgccggtgccggtatgctacagaacattccgctgatgctggaaatcactcgtgccgtggtagatgccgtgaagattcccgtcaccgtgaagacccgcctgggctgggatgccaacagtaaaatcatcgtagaccttgccgagcagttgcaggactgcggcattgccgccctcaccatccacggccgtacccgcgcccagatgtataccggcgaggcggactggacacttatcggcgaggtgaaaaagaacccacgcatgcacattcccatcatcggcaacggtgatatcaccactccccaacgggccaaagaatgcttcgacctctacggtgtggacgccatcatgataggccgtgccagcttcggccgcccgtggttctttaaggaagtgaagcattatttggagacgggcgaagaactccctccgctgagttccgaatggcggctgaacgtactccgccaggaagtggaagacagcgtcaacctgctggatgaacgacggggcatactgcacgtgcgccgccacctggcagcaagcccgctcttcaaagggattcccaatttccgcgacacccggatagccatgctgcgggcagagacgaaggaggaactgtaccgcatcttcgaagagatagaaccgttgctgccataggagaaaaccgcatacgatttttaccatcgagtccgatacttgagcaatcatcctcacgccccttcttgaatagcttctgagagggggggagtattcagacgcagatgacacgctttgttgccatccgcataactcactgtctgtcagcaagaaattttgccaaccacttgccttgcccttggcaaacttttgccatgcctatggcaaagttttgccaacgcggtggcaaagccttgccaatgggaaggcaaaaccttgccaacaaggaggcaagaaaaaaacattgtttctttggcagaaagaaacaagtccctatattcgtcttcccaagaaagaaagaatcccataaatatgtctttatgaaaaagaaaaaactgctcaaacagctcatcgtaaacttccagcattcacttccggcagaagtttatccgcgtacattggtattgcccacagacagtggaaagataatcaccgtgcccgactagcggaacatcggctgcgcaaaccatcgcttgaacatccacgtggccaggatataaatgccgaaagccgatacgaaacccacgatagagtctatcaggtaatgtgcctggatatagaccgtagccccgcacaacagcagatagaaaggaaacaagcaggcaaacagacgcttgctgccacgccatgccataatcatcagtaccgtagacattccgacgtgcgaactgggaaaagcagccgtggggcgctcacccacctgctgggaactctccaccaggttgtagaagaagccgtgctcatagcccggaccgggaagaagttcctgatggtgatggaaatagtcaccgatggacgggaagataccttgcgccacatggtcgcttccaatggcggggaagtagaactgcggcccggcaacggggacgaaaatataaataaggtaatagatgaagaaagcggtgacgatgacgaacgaaaccttctcgaaaaggtcgaaacgataaaggaaataccacaccaccaccagcagaatcatcggataatagaagaagtatcccatattgaacggctcgctcacccacatctgcggaaacctttcacagaaccacacagcaggctgtccaccaaacatccactgctccaccgacgcgaacacgtggtcgagattggggaatatccggttgaactcaaaggtgtcgggataccaataggaaagcagtgacatctggatggctatgcgcacaaaggcagagaacttgcagggtgccagccggtaaagatacatcaacaggaacgtcatacccgcaatgacaacacggtctgcaagcatctgcaccggatgatccatttcctgaaaaagaaacagaatgagaatggaagtcagcaaattgtatatcagcgtaatcttctctaccgcaaaaagccccttacgggtttctacccttttaaataaatctaaagccatcccttatccttataccaggcaatggtttcctttacaccccgttccaggtcgtactcaggactgaagcccagttcctcgacggccggcgtgatgtcacactgccagttgcgttgtttcattattctatacttgtccgaattgagcgtactggtcttgttctgccgcttcgcccaaaattcagcgagcaaagatacgactttcaatacaattaacggacatctcaggcgaataacaaacggattgcccaattctttccttatcaaatcggaaaaagcacggctgctatacaccttcccgtcagccaggaaataggcgcggcgggacacctgcttctctatcccgaggaagacggcctgcacgatatcctttacatatacaaacgtcaagtcctggcggcagaagcctacagaaaagtccgtatgctgccggatggactttgccataagataataatccttctcacgcggcccgtatacacccgtcggccggtagatgacgtaggggaaacccggaatactctgcaaataaagttctgttttcagtttactgagtccgtaagcggtattgggtgaaggggggtcactctccataatcgggtcgtaggtcctctcgcgtaccgggccgaacacactcagcgtactgatgaagataaactgcttgggaatcatgttcagctccctcagcgtatcgatgaagtatttggtctgcagataattcaccaaatcgaattcgttcttgtccacacacttcgtcacaccggcacaatggacaatataatcaaacttattgtaggtccctttatgtcccgagagttgtgccctcagttcattggggtgcgcaaagtccagttcgaggaaatgtatcttgcggtcacgcagatactcgcggctgctggacgaacgtacacccgcccacacaccgaacttgcgcttcaacgcctcctccacgatgaaacttccgataaatccgcttgctcctgtaattaaaatcgattccacttcttctgttacaaattactaattacttttcatccggtccgtcaccttgacgctccttgtgttactctgtcgcctcgttactcttcttcaccggctccacatggatgctgaccagtgttcctttgccgaactgccttttcaacttgttctccaccgccgttgccgtctcgtgagcttcctccagcgagatgctaccatccatacgcacatgcacctcgatggcacaataactgccgatgcggcgcgtacgaaggtgatgcggcgagctgataccgggaaaagaaagaatcgtcttcagtatctcatcctccacctcggcaggcaatgatttctccaatagttcgtccacacacggtatcaacaactgcacagccaccttcataatgaagaagctgacaataaccgctgccaccgggtccagcacccgccaatggtcacccaaaagaatagcgccacctatacccgctgccgtgcctatggacgaaaacgcgtcactccggtgatgccaggcattggcaacaaccgcctgcgaattcaacttcctgcccttgaatacggtatattgataaagcacttccttgaaaacgatggataccaatgcagccaccagtgccagtataccgggttcctgcagagagccgccttgcaggaagcggtaaatggaggaagccccgttccagaaaatgccgaatcccacaaacaacagaaaaataccgataatggcagttgccagcgtctcgtacttgccatgaccgtaatcgtgtccttcatcttcgggctttgccgaaatgcgcacaaaaacaatgacaataatatctgtaatgaaatccgacaaagaatgtaccgcatccgccagcatggcggcactgtgacctacaatacctgcaaagaatttgaagacaagcaagagaaagtttaccacacttcccacaaccgtcacccggtaaatgtctttttcccgtgtggcatctgcttttttgttcagagtttgcatttccatctgcttttcgtctaaggtacagcctatcttcactttgtgtgcaaatatagtacataaatccattacaatctgtcgttccttcattattttcaatagaatgataatattttgaagtctgagtgaacgaaggaacatatttatttgtttactttgcaagaggtaatcaccacagattacacagattgacacagaatctctatttatacataaaatacatcataacattatggccaaaaagaaagaaaagaaagccggcaaacgcatgaagaagaaagagctcgtcaaagtactgctggaattcttccacacaaagcaagacgaagtattatccctgaaatacatctttgaacaactccacctcaccacacatccgctgaagatgctgtgcatggacatcttgtccgaactgtcgatggatgactacatcacagaagtggacaagcacaaatacaagctgaacaaccacggcgtggaaatgaccggaaccttccagcgcaagagcaacggcaagaattcctttataccggaaggtggaggcgaaccgatattcgtggccgaacgcaactcggcacacgccatgaacaatgataaagtgcgtatcgccttctatgccaagcgtcgcggacgcgaagccgaaggagaagtcatcgagatactggaacgtgccaacgacaccttcgtgggtaccctggaagttgccaagtcatacgctttccttgtaacggaaaaccgtacgcttgccaacgacattttcatccccaaagaaaagttgaaaggcggcaagacgggcgacaaagccatcgtaaaggtggtggaatggcccgacaaagctaagaaccccatcggccaggtaatcgacatcctggggcgcgcaggagacaataccaccgagatgcacgccatcctggcggaattcggcctgccctatgtctaccccgctgccgtagagaaagctgccgacaagatacccgccgaaatctccgccgaggaaatagcccgacgtgaggacttccggggtgtgaccaccttcaccatcgaccccaaggatgccaaggacttcgacgacgccctctccatccgcaaactgaaaggggaactttgggaagtaggcgtacacattgccgacgtgacccactacgtgaaagagggcggcatcatagacaaggaagccgagaagcgtgccacatccgtctacctcgtagaccgcaccatcccaatgctccccgaacggttgtgtaatttcatctgttcactccgccccgacgaagagaagcttgcctactccgtcatctttgaaatgacggaaaaaggcgaagtgaagaactcacgcgtggtacataccgtcatcaagagcgaccgccgcttcacctacgaagaagcccaggaaattatcgaaaccggcaaaggagacttcaaggaagaggtgctccaactggataagcttgccaaaatactgcgtgagaaccgtttcaaggcaggagccatcaacttcgaccgctacgaagtgaagttcgaaattgacgagaagggcaaacccgtcagcgtctacttcaaggagtcgaaagatgccaacaagctgatagaggagttcatgctgcttgccaaccgtaccgtagccgaaaagataggccgtgtgcccaaaggcaagaaagccaaagtgctgccttaccgtatccatgacctccccgacccggaaaagctggacaatctggcacaattcattgcccgcttcggctacaagttgcgcaccagcggaacaaagaccgacatttccaaatccatcaaccacctgctggatgacatccagggcaagaaggaggagaacttgattgaaaccgtctccatccgcgccatgcagaaggcacgctactccgtgcacaacgtggggcactatggcctggctttcgattactacacccatttcacctcgcccatccgccgctatccggatatgatggtgcaccgtctgctcaccaagtacttggaccagggaggccgcactgtgtccgaacaaaaatacgaagccctttgcgaacacagcagcagcatggagcagatagccgccaatgcagaacgtgcctccatcaagtataagcaagtagagttcatgaccgaacgcctaggacaaaccttcgacggtgtcatctccggcgtaacggaatggggactctacgtggaactgaatgagaacaagtgcgaaggcatgattcccatccgtgacctcgacgatgactattacgaattcgacgaaaagaactactgcctgcgcgggcgccgcaaaaaccggatatacagcttgggagacgccatcaccgtcaaagtggcacgcgccaatctggagaagaagcaactggattttgcactggtatagaataaccctataatttaaaatcatccccagtccctttctttcagagagagaccggggatgagacctgcacgatgaagacaattactattacagaccctacacagattgaggaaattatccgcaaatgcccatactgcatagtgggcatcacagaccttgaaggaaacccatatgcgattcccatgaactttgcctatcaagacggggtaatatacttgcattccggcccggaaggcagtaaagtggagatggtaacaaagcacccgcaagtttgcatcaccttctgcgaaggacacgagctggtttatatgcaccggcaagtggcatgcagctacagcatgaagtcgcgcagtgttatctgtcgtgggaaagtacacttcgtggaagacatggaagagaagcgacgcgtactcgacatgctgatgaagcaatatacggaaaatgaatgcaaatatgctgaacccgccgtacgcaatgtcaagatatgggaagtaaaagtagagaaaataagctgccggtcattcgggttaagaccaagcgaactataaataccatctgccggtcacctgctccacattgatggagcggataaccggcagaaatatttacttttacaacggatattcctcaaacgcatacaacagcgtcgaaagataccgttctcccgtatcgggcagtagcgctacaatcgtctttccttcattctcgggcaaccgtgccaaacgggtagctgcagcaacggcagctcccgaagagatgccgaccagcagtccctcatacttcgccagttcgcgacccgtacggatggcatcatcattggataccagcagcacttcgtctatcacggcactgttatagttcttcggcacaaatccggcaccgataccttgtattttatggggaccgggcttcccaccggaaagtacgggagaatcttcgggctccacagccacaatccttacctttgggttattggctttcaaggctgtacccacaccactcaccgtgcctcccgtacctacaccggccacgaaaatatccacccggccgtctgtatcacgccagatttcttgtccggtagtacgctcgtgcattgccggattggcagggttgtcaaattgctgtagaatcagcgagccggggttggcggctttcagttcttcggcacgggctatggcgcctttcataccgtcggcacccggagtcagtaccaattccgcaccgagggctttcaaaaggttgcggcgttccaagctcattgtgtcgggcatcgtcagtatcagcttgtaacctttggcagcggccacaaaagccagccctacgcccgtattcccactggtaggttcgatgatggtagcaccgggcttcaacagtccttttgcctcggcatcttctatcatggcaagcgccacgcggtccttcacactgccggcggggttaaaatattccaatttggcgataacacgggctttcagacgcttattcttgttataattattcaactccagcaagggagtgttgcctaccaggtcggtaaggcgttctgctatcttcttcataatccaactgtttttaaattcctcattcccctaagggaaaagactaacaatccggagtggaacgaggtatgttatttcttacaagacaaaagtagcgcaaaattggttcgtagaaaataccacaaatatggtaaatacgtactataaatgagggatatgtaggatatttgacgagtatttcctatctttgttgccacttttaaacttaaggatatcataatgagtccactcaactttacccacattttgacacaagcagtcgatgagctatcggaaagcgaatcatacaaaggactgtttcaccagcatacggacggcaacccgctgccttcggcaaaagtgctgcgcgacatcatcgaactggcgcgagccatcatcttccccggatatttcggaaattctacggtcaacagccgtacggtgacttaccatatcggtgtcaacgtggagcgcttgttcgacctgctgaccgagcaaatccttgccggcctctgctttgcaggcgacggcgaatgcaactgttgtaccgagctccaacgggaagaagccgccttattggctgccaagttcatcagcaacctgccggcaatgagacgtacactcgccacagatgtggaagccgcctacaacggtgaccccgccgcacagtcgttcggcgaagtcatcagctgctatccggccatccgcgccatcagcaactaccgcatcgcacacgagttgctcaagttgggtgttcccctcattccccgcatcatcaccgagatggcgcacagtgaaacgggaatcgatatccatccaggagcggaaataggtggttattttaccatcgaccacggtacgggtgtggtaatcggcgagacctgcatcatcggcaacaacgtgaagctgtaccagggtgtgaccctcggtgccaagagcttcccgctagacgaagacggcaagcccatcaagggtattccccgccatcccattctggaagacaatgtgatagtctattccaacgccaccatattgggacgcatcaccatcggacaaggagccaccgtaggcggcaatatctgggtgacagaagatgttcccgcaggagcaaggattgtacagacaaaggccaagaagtaagtcacaaacaaccaataaacaattaaaatcgtaaataactcaaatcagcagttcaagtagttaaatggttatcagccactaatgagagaaacgagtgacaactacccagattgccgattcacataaagtaaatgcatagatgagcgaacaatcttttgaaatgattgccaaaaccttccaaggactggaagaggtactggcacaagagctgactgcactgggcgccaacgaaatagaaataggccgccgcatggtatctttcagtggtgataaggaaatgatgtacaaggcaaacttctgcctgcgtacagccatccggatactgaaacccatcaaacacttcacagccaaagatgccgacgaggtttacgaacagattaaagccatccgatgggaagactatctggatacggacaagacctttgccgtggacgcggttgtattcagtgaagagttccgtcattccaagttcgtttcctacaaggtgaaggatgccatcgtggactatttccgcgagaagaccggcgaacgtcccggcgtgcgtgtcaacaaaccggacgtgctgctgaacatacacattgccgaaaccaaatgtacgctgtctctcgactccagcggcgaatcgctgcaccgccgcggttatcgccaggaagcagtagaggccccgctgaatgaggtgctggccgccggcatgatattgatgaccggctggcgtggcgaatgcgacctgatagacccgatgtgtggttcgggaaccattcccatcgaagcggcgctgattgcacgcaacatcgctccgggcgtattccgcaaggagttcgctttcgagaagtgggtggattttgaccaggagctgttcgacacgatatacaatgacgacagccaggaacgtgaatttacgcataagatatacggttacgacaacagcccgaaggcaaacgaaattgccacacacaatataaaggctgccggcgtaagcaaggacgtggtattgaagctgcaacctttccagcaattcgagcaacctgcggagaaatccatcatcatcaccaatcctccctacggtgagcgtatctctaccaacgacctgctgggcctttactccatgattggcgagcgtctgaaacatgcctttacgggcaacaccgcatggattctttcttaccgggaagagtgcttcgaccaaatcgggctaaaagccacctccaagatacctttattcaatggtgcgctggaatgcgaattccgccagtacgaaatcttcgatggaaagtacaaggaatttcgtgccgaaggcgaggagttgagcaaggagcgcaaagaatttcgtccggcttctggggaacggaaagagttcaaacccggagaaagacgcgaattccgtccccgattcagtggagagagacgtgaattcggtagcgaaagacgcgagttcaacggcgaacgcagaccaagagaattcaaggacggcgaaaagcgcgaattccgtccgcgtgaaagaagagagttcaaggatggggaaagacgggagttcagaccgagggaaagacgtgaattcggtggagaacgcagaacaaggtcgggtgagtcttacccggaaagcaaaagaagagaggcgggaaagaaggaagaagaataacacgaacaatgacaaggagaatgaatgcaaagaaaataagtaagagcattcttgcactgctgataacagtacctgctctgcttgcaacaaacgctatggcacaagaactaaaaaagccgaccctggaagatctgattcccggaggtgagacctaccacaaaccggaaaacaaatcgtaccagtggtggggcgatgccgcttgtctggaacttggcatcgacaatatagaaggtacatgggctgtcaaaggattaggtgccaagcccggagagaaattcactgccatcacattggaagaagccaacgcgctgctggaagaaaaaggacttggaaaactgcgtcactttcatgctgcaaaggctgtcaacgtaccccgaggcgtcaatctgggtattcaagtccaaatagacccactcctgctgctgaacaccggcaagtaccgtgccctcgtcgactggaagaagaaaaaagtcatctggagccagccttgccccgcccaagccgcaaatgaggattggaacgaggtaagccgccatttggcttatactatcggcaataatctctatgtgatgaccggtgacgggcaaaccctgaaagtcaccaacgaaccggaaggtatcgtctgcggacaaagtgtgcaccgcaatgaattcggcatttcaaaaggcactttctggaatcctgccggggacctgctggccttttatcgaatgaacgaaagcatggtcaccccctatccattggttgacatcacgacaagaatagcactggtggataaaatacgctaccccatggccggcatgctcagccatcaggtaaaggtaggtatctacaatccggctactcaaaagaccatctatctggacatgggcgacccaaaagaccgctacttcaccaacatcacctgggcaccggatggtaaaagcctctatctgatagagctaaaccgagaccaaaaccactctaaactgtgccggtacgatgcggaaagcggaaagctgcaacaagtgctcatcgaagagagacatcccaaatatgtggagccgcaatctcccattctattcctgccatgggacagccacaagttcatctatcaaagccagcgtgacggcttcaaccatctgtacctatacaatacggaaggggaactgctgaagcaactcacctccggcccctggcttgtacaagacatcgtaggttttaaccggaacacgaaagagctcatcatcaagagtacggaaatctctcctttgcagagcaacctttacgctgtcaacctgaagaatggcaaacgcagcttgataggagacccaaccggcatgcactcggcacaaatctccggtttcatgggaacttacctcatcgacaatgcctcttcgcccacttgcccccgtatcataaaactgatgtccaccaacccgaaaaaacaacgggaacacacactgctgacagccaagaacccctacgaaggctttgaaatgcccagcatagaagtaggcaccatcaaagccgccgacggcaagacagacttgtactaccgcctgataaagcctgccgacttcgacccggcaaagaagtatcccgccatcgtctacgtatacggcggcccgcacgcccagatgataacgaacggctggatgaacgatgcccgcggctgggacatctacatggcaaacaaaggctacatcatgttcagcctcgacaaccgtggcagcagcaaccgtggactggagtttgaaaacgccaccttccgccagctgggcatcgaagagggcaaagaccaggtgaagggcgtagaattcctgaaaagccagccttatgtggacggagagcgtatcggagtgcacggctggagcttcggaggacacatgactacggcgctgatgctgcgctatcccgaaattttcaaggtaggcgttgccggcggaccggttatcgactggggatactacgagataatgtacggtgagcgctatatggacactccgcaagcgaacccggaaggctataagcagacaaatctgaaaaaccttgccggtaacttgaaaggacatctgctcatcatacacgacgaccacgacgacacctgcgtgccgcagcacaccctttcattcatgaaggcgtgcgtggatgcccgtacctatcccgatttgtttatctatcccacgcacaagcacaacgtcctgggacgcgaccgtgtgcatctgcacgagaagataacaagatattttgaagaatatctttaatgtacaatgtacaatttgctatgcagtgcgggcgtgcaaatagggagtagatggtagaagaaagaagagaataaaagagagaataaatcattaagtataacaatctgtacaacttacctgatgccccacagcacagacaaattgtacattgtaaattgtaaatgaacccatgaaagtattattattaggctccggtggccgcgaacacgctctggcatggaagattgcccaaagcccgaaagtagagaaactatatattgctcccggcaatgcaggtacaagcgaagcaggcgagaatgtgaacctgaaggcgacagactttcccgcactcaaggcctttgcccttgagaaagaaatcgacatgattgttgtgggtcccgaagacccgttggtacaaggcatcttcgacagcttcaaggaagaccctgccacctgccatatcgacatcatcggccccaccgccaaaggtgctacactggaaggtagcaaggaatttgccaaaggcttcatgatgcgccacaacatccccactgcccgctacaagagcatcaccgccgacaacttgcaggagggactcgacttcctcgcttccctcgaagcgccttacgtactgaaggccgacggactgtgtgcaggcaagggcgtgctgattctccccacactggaagaagctcagaaagagctgaaggaaatgctggacggcatgttcggcgatgccagcgccacggtagtcattgaagagttcctcagcggcatcgaatgttccgtattcgtgatgacagacggccgccactataaggtattgcccgtagccaaagattacaagcgtatcggcgaaggcgacaaaggcctcaacaccggcggtatgggcagcgttactcccgtaccttttgccgacgaaacatttatggaaaaagtacgcacccgcatcatcgaacctaccgtaaacggtctgctggaagaagaaatcggctaccaaggcttcatcttcctgggacttatcaacgtgaagggcgaaccgatggtgattgaatacaacgtccgcatgggcgaccccgaaaccgaaagtgtaatgctgcgtatcaagagcgacctggtagacctactcgaaggcgttgcccagggcgacctcgaccagcgtacactggaattcgacccacgcacagccgcttgcgtcatgctggtgagcggaggatatccggaagcctacgaaaagggcaaggtgatgaccggattcgagaaggctgccgaaacagacagcatcctcttccatgccggaacagccaccaaagacggacagaccgtaacctccggtggccgtgtcatcgccgtctgctcctatggtgaaacgaaggaagaagccttgcagaagagctaccgcgtggccgacatgataaacttcgagaagaaatatttccgtcgcgacatcggatttgacttataaatgagaacgaagagattccagaaccggataacggcagggcggttcacactacccaccgctatcctgatttcagtatcctgctggatactgaccgctgttctgttgcccgagacggagacacagcaaagcggatattccctttgggaaacattctgcgacttctgcatccccacctgggcaaaccgtctcttcagctttattctgtatgccgtcatcgggtacttcctaatacagctcaacaatacgttcgccatcatccggatgcgggcatcggtacagacttctgtctacttcctgctgatatccgtctgccccagcctgcacatgctgtatgcgggagacttggcagccgcctccttcctggtggcactgtttttcctcttcaagagctaccagcaggcacggcccacaggcagtctcttccacgcctttgtcttcatcggactgggcagcctgctttttccgcagctcatgctgtttgcccccatcttctggataggtgcctacaacttccagtctctccaacccaaaagtttcttcgcttccttggtaggatggagcgtaccctactggctgttgctgggacacgccctctactacgggcaaatggaactcttctgccagcccttccgcgagctggtgaccttcgctcccacccggttcgactatcagccgtgggaactcgccaccctcgggtatctccttgttctgttcatcgtcagcgcggcacactgtctcattgccggctatgaagacaagatacgcacccgaagctatctacacttcctcatcctgctgaatttctgcatctttgtctatatcggactgcaaccggtattgagtgtccacctgatgtccttcctgctcatcggtgtcagcatcctggcgggacacttgtttgtactgacaaatagccgcagttccaatatattcttcatttgtgcatttatcggattattcattctattaggattcaacatatggacgcttttgtagatacactcgtacagctactgattgactggggatatgtcggtctgttcatctctgccctattggcaggaagcatcattccgttcagttccgagatagtgatggtagcactggtcaaggtcggtctaagcccggcactgtgcgtactctccgccaccttgggaaatacgctgggaggcatgacgtgctactacatgggacgtctgggacgtatagactggattgagaaatatttcaaggtaaaaagggaaaagatagaacggatgcagcatttcctccaagggaaaggggcactgatggctttcttcgcctttctgccttttgtgggagaggccatagccattgcactgggcttcatgcgcagtaatctgatgctgaccaccacttccatgtttgcagggaagctggtgcgctacatagctatgctgtgggcactgcaaggagccatttcgatgatgaattattgacatgtagtgagtttgagcaatagatgtatagatacaacgcgttggatgtatagatgcaacgtgctggatgtatagatgcagcacgctggatatataggcgcaacaacacgctgaatcacagagaattaaactaaataaaaacattcaacaaaagcagaagtgatgcaacgaatcatagagaagacggaagacggaagtgcgacactgtttgtaccggaactgaatgaacattatcattcggtaaagggggcacgtacagaatcacagcacatcttcatcgacatgggactgaaagcatccgctactgcccgcccgcatatccttgaaatcggtttcggcaccggactgaatgccctgcttacactggaaactgccgaaaaggaaaagagacctgtgcactataccggtatcgaactctatccgcttgcatggccggaggtggatgcgctaaaatatagcgacaatcctctgttcgaggaactgcatcgggctgcgtgggaagaagaagttgccataactccttatttcacactgagaaaagtgcgggcagatgtcgaaacaataagcattgacagtttgttaatgattaataaatctccgttcgatgttgtctacttcgatgcctttgcacccgaaaagcaaccgggaatgtgggaggaaaaagtcttccggaatatccatgccgccatgagcactgatggcgtgctgaccacctactgcgccaaaggagtagtacgccgcatgctgcaagccgtaggattcaaggtagagcgtctcccaggtccccccggagggaaacgggagatactgaggggaaggaaagaggaagtgataaatggataaggaatagttgataatgaatagttgatgccccctgccacagcgcagccaaattgtaaattgtaaatagtaaattgtaaatgaaaaagttttgttttttactcctcatagccaccttgctcttctcgtgcaagcaaggaggccaacagaacaagaagaatgacgataaacccgtgattaccgtcaccatcgagccgctgcggtatttcaccgaagccattgccggcgatgaattcaccgtcgtcagcatggtgcccaaaggttcaagtccggaaacctacgaccccacgccccagcagcttgtcgaccttgcccaaagcaaggcctatttccgcatcggctacatcggtttcgagcagacatggacggaaaaactgacggacaatgctccccacctgcaattcttcgatatgtccgagaatgtggaactcattctggacgatacccatgcacatcatcataaagacgggcatgtacacgaaggccatacgcacgccggtggtgtggaaccccacatctggaattccaccatcaacgcccaaatcattgccggaaacattctgaatgcactctgcgccatagacaaagccaatgaaagcgtctacatggaacgttacaacgtactcatccggcagatagagcatacagacagcctcatctgccagatgctttccagcccgaatgccgaccgtgccttcatgatttatcatccggcactttcctactttgcccgcgactacaacctgaaccagattcctatcgaggcaggtggaaaggagccctcccccgcccatctgaagagcctgataaactcctgcaagaaggagaaggtacgcatcatctttgtacagccggaattcgaccgccgcaatgccgaccttatcgcccagcagaccggaacccgggtagtggctatcaatcccctctcatacgactgggaggaggagatgatgaatacggccagagcgcttgtaaaagagtaaacgatgattctgtccatttaacgaagaagaagctatgcctgcatcccccattatagagataaagaacctcagcgccggatacgataaccggaccgtactgcatgatataaacctgactatctacgaacgtgattttctgggtatcatcggtcccaacggtggtggaaagactacccttatcaaatgtatactgggactgctgaaacccactaccggggagattctatatcactcctgccctccatccccctccgaaattgccaattgtcaattatcaactgtcaattgtcaattatccatgggttacttgccccagtacagcagcatcgaccggaaatttcccatcaccgtagaggaggtcatcctttcaggactcagcagcaagaagccgctggcttcacgcttcaccgcccgacaccgcgagaaagcctctgccgtgatagcccgcatggggctggaaggcatggagcagcgtgccatcggcgctttgagcggcggacagttgcaacgtgccctcctgggccgtgccatcatctccgacccgcaggtggtgattctcgacgaacccagcacatacatcgacaagcgtttcgaagcccgcctctacgaactgctggcagagataaacaaggattgcgccattattctcgtcagccacgacatcggcacggtgttgcagcaagtcaagtccattgcctgcgtcaacgaaaccctggactaccatcccgataccggcgttacggaagaatggctggaacgcaacttcaactgcccgatagagttgctggggcacgggacactgccgcacaggatattgaaagaacacaagcattctcacggatgactggaagcaaaggaggccgacccattgtagaaccgacctcccgttacccttccgaataactatccgacaatcttcttacccgtcatttatattggaaagccttatacgaatggggtagtaatgacaaacggaaagagttctttggtgtcaccggacgcctgctctgtacgggttcggcaggaaggagagccagaatatctccattctccagattttccaacctcgtcacctcatcatcggtaacaatacgcacttccaccggttcatcattgaagttctccaccaccagtgttttattgtcatacacaaacaatccgactttggagggagcctccagatagatatccatatccctactcataatgcggcgaatctcattcaaggcttttgccggaaaatcatataaatttcccatatcatcgggaatggtcaatacatatagattgccggcggcatagggagctctcaacaaaataggataccccgatactcctcccgtcaacggacggcccgcactgactacttcccaagcatcattcgtataatactgaacctgcggtatcaataaatcgcgtccggcttgtccatatcggccaaaatcattgacaagagctttcaaatcggtacaacgcaactctactatttcggcaattttttcaggaatggctttcagcaagccgcttgtaatcaccacatcccgtccgctttgcaattgcttcctaatgtcggtcatgagctccggagcttgagccgcctgggcagtcagcagcaccacttgttggtctttcggaaaaacgggacgtatatccatcggcaaacctatcatgcccagataattctgcaagaaatcatcacccgccacatgaaaaggcttgtaggacttgatgccaatggggttacccaacttacctaccagtttatcagtctgtttcaatacaacatccgcaatgcgtgccatggtggtaggctctatggaagttccgttcttctgccggataggggcagtcatctcatcataattaaagctggtgcccatgccctgccaaggggtacggaacctgggagacaacttcacgcccagaagctggttataggcaaagagaatgatttcgggagccttggcaagcatggtcagatgcagctgctcagcatagcggtccatacccagattcagtccaccggagtccacccatcctccaccattgtagcccggacgcagattatcaaaataacggataatattatagcttagataattctgcagatgctggttgccggcagggtcccttgtttcggtacccgtccagacaccgtcaaagagttggggaccttcctccagattaaagcccaaaccttggaaatggtcgtaccagttgggatacttgatgattacctttacacgaggattcaccttcttggcaggtttcagcacaaggtcgcgcccggcttcagtcatcagcttcaaacggtattccgtccagctctgcgtacctttggcttttatctctatgtccgacttgcaactggtgaagaaaaagtcatccagaataaactcgtcaaagtgctttgccgtatgttctgcaatctttcgcaccatctcacgatgctcgggattggaatagcagaacgtctcgaaactgttcgcctcgttgatggtgtaggtaattcctccggcagtctctattccccggtcatggaaaaatttcttagcttgctccagggtggcgtcatccacaatcagtaaatcacgatgtgtttccaaataaatcttgtccacttccaactgttgtgaaatcacattccaagtcgaatccagccaatggatgtccttcatcttgtctacctcgtaggcacgtacatagaccgataccttaaaattgtcataagcttttgcctgcatggccatagtgcagaccatgcagagcagaaaagctacaattacaaacttatctacctttattttactgttcattaccattcaatattttctgagatgccaataccatatacataaaccacgtagcatgtccgcccaaacagtactcaccttcctgccataagaacgggaaatgaagtaattcgggcaagtcgggacgaatcagatttgtacccggagacactccacccggaatataagaccagtcggcacggttgacaccataggcggctttcaccgtttcggcaccgactcccgttacaaacgctgcctgattacgtcccggatgcataccgagcaggtattggacagcattgaaaatatagtccggtgcaaacaagtcaggataggcagcatgcaggtaacagtaattgtagcccagatgctggggttcccatgaaccggaagaacggttacctctgtcatgcggcactccatacggagttttactgctatactcctgatacatagcctgcaactccggcagtgctttgcgaacagccttgctgaaacgtgcatttcccacagccttgtcgaaacgtccgatgaaccaacccgtctgacggatattcttgcagatgaaatcctgctgctgcaaaacgaaatcacggtactccacttcctttgtcgccagataaagttctacggcagcatgtaccttggctgtcagcacccggttgttgtcgcagcgggtaatcctgaacaattcacgggctatctccagacaatccgctcccaatgcatcgttatgtcccttcaagacacgtgaaatacctgccagccaggcagccacctgaagttccctaccagggttgtcctccgtaaacacccagcggtcgtcggcagtcccactgacatggtctgtatgggccgacgcatcacccaagtgtgcatactggcgtacggtaggacacagaatccctctgtagagacgccccagagccttccaacccgccactatcgtcaaagcaccgttttccacctgctgcaacaagtcattctttccatccggctggtgaatctcgactatcttcttttcaaaatctatggaagtctcgtcccaataggcaccaaagttctcacaagccatggcaagtatataggcctcgcctgcctgggattccacacgcaggtcatagtcccccgcatcgtgccatccacccacattcagccctggaaccaaatcacccggctggtacttacaaagagtagaggttccctgagtatatccgtctatatggttgatatcggttttggccatacgtgcatcgtcatgatgacagaagtcatgccatacacggtatttttcgttcacacgcatgtggcacatctgtaccggcaagaagtattccacctctgcctgccagatacccttgtcccacacatctttggcaatgcggaacaccggagaagcagcatcgccgtacattacctgatagagcccttcttccgtcacttccgtgaaatcgaactgcagatagtggtagcgttggaaatctccccaatccttggcagcctgctgctttaccagtttcctgccatcggcagcaatgcgataaagggcaggttgcttgaagtctgtatcccgtttatccaactctatgacagccactttcttctgtccaggatggtaacctacttgagaggcttgcaccaccggtgcataacgccagtctttagtgactgtcggacggattatccatttcaccgcaccttcctttgtccctgccgggaactccgaacggagcacaaaccaaccgttgttatgatttatccttccatcatacagcaacaagtctcctttctcactttcaatcgtaatctttgccaaatcatcctgaggattgagtacaaactttttccctgcggccaaaggagcagagacgatatcatcggcaatcatcgggttataagtctttctatccaacagcaactggtccaaatcagctttcccgtcaggattgaaatctccgatatgctccatattggaagactgtttcatggtgggccccatcgcctggtggggaaagactcccgtccggttgtccataatccacggcttgcccagcaaagtggaaggtaccaattccagattaaagcccaacttgccggcaaaccgctcgggcactggttggtccaaatcaacggtcaataccagataatccttctcgcctttgaccttaatggtatagccaaaaacaaaatccggataaagcatcggattaaagcctgccatgtgtttggccgaatccggataactcaatgtgacacggatttcattgtcagcctcatccaccacccggcttctcatcttgggcaatccctgccactgcccttgcgagatttcaaagcgcacatctccattggcagccctgcggtctccattcaaaacaagggtcagtcctccctggtgtccttcagggtagacgtcactgaacaccatcacattggccccgccattctcaaaatatcccgatggattgattctgaaatcctgggcgtgcagccccatacaaagcatcagtgatgctgcacctgctataaattttttcataaatactattttaaacgattatgtatttctactcccaagcgtaccgtatgatatgggcaacgccacatactcactttgggagtatccttcttgggttctccatcaaaacaatcactgtaccattcaccgtattcccggtctatcatacagtcctttacgaaagtccaaaccgtatcggccgattgcagataaacgtcattcccgctgatttgccaggcattgacacaagctatcatcgtttcaatctggccccaccatgaggcatgcccggttgttcttccgcccttcttttcatacatcatataccctttgtcactcagtccttccgccaagcaagcatccgtcacatccagcgcaagccgattcgccctatccatcagttgccggtcttctaacacacgggcagcctcacaaagcagccatcccgcctctacatcatgtccataagagtccatctcaaccagactgttccatgcattatcaaagaacaaattaaaatgtctctttgaagagtcataaatgcggtccataaacaactcggtgcagaattcgagtcttttcctcagtccgtcgtctttccagcactgatataaaagggtataagcctccagcacgtgcaaatgcgcattcatagtcttgggtgcattgttatcataattatccagttgtttccaatcttcagtaaaagattccacataaccgtcatattgcggttcgcggcctttctcctccaaggtatgatataaaccgacagccatatccagactctcgctgttacctgttgccagatagtgttcagccagcccatagatggcgtaggtcatggcatacgtatatttggaagcattcagcacctcaccgtcaggattgaccagccaatataccccaccatgttccttgtctataaatgtatcaatgaagtagcgttgcgatttatccgcaagcttcagataagcctcatccttaaacgtacggtatgcggcagaaaaactccacagaatccgggcattcagaacccctcctctcggagcatccactaccggagtaccattccgcaatacagttccataaaaaccgccgtcgggagccactgcataatccatccaaaacggcaacacgctgtctctgacattcgtgacaatctctgtacgcatgcgtgtctgcatatctgtctcccctgaatgcgaccggcagcctgccagacaagacgcaaccagcagtgctatccaataaaacatcttcctttccataattattctctaaaaccatcaaacttttccttgtataattccccgtttatcagaaactggtgttcgtcgtctcaagtactggtgtttgtcatgtcagacaccggctttcatcacgacagaccctgacgtctatcacaacaactactggtgcctgacatttcactcacaaatattttattattaagtgtttatttataatttatcaatatcccggattctggtcagcctgattgatgagcgggttggtcagaatctcattcgtcggaatcgggaagatttcctgataagcctcgtgctcaaagaaacggaatgagtcaccagtctgcagacaagcctcttgtgaagagttggctactgttttcggatattcggcggcaaaccattctttgcacatacccatacggcacaaatcatggtaaagcgagaactcggcattgaattcatggcgacgctctataatcagcgccaccttccataccggagaagtatagcctttggctgctttatagcttgtataataggtctctgcatccggcacttccaccgtctgggtattcaacatgtcggcgggtaggtcaatcatcgtcgctcccatctccaaattaccccaagcacggttacgtatctgacgtatcatgttccatccggtagcgttgtcacctgtctcgaaacaacattctgcatagtcgagcatgatgcctgcataacgcttcaaagtcaacgaaataggattgaatactttgttgttctcacctggcttgcatctccagtatttcaaggaataaacagtaggcatattttcggaaccttggaaaagaccgtcaaaaccacttgtcacccctacagtctgcccggtaatgggatgcgtatcccctttggcaacagcagagtattggcggcgtttgtcacccggttcaaaggaacgtacaaactcccaagaaagacagagagacccccagcctccccattcgggtgccgcacacatatatccgtaccacatcatggcatctgaagacgaatcggctccccagcccatatatccttgttcatgatacatcacctcaaatacagattctttggtccaatgtgtatcccaggcatgcaggttaccgaagcagggctccaatgaataggttccactgtccactatatcctttagttccgtcttggctttcgtaaagtctttcttcaacatatacagctcggccaaataagctttgcagaaccccttggttatacgtccgtattcaccattcatgggtaaccagtccagatggtcgcgtccaaaagacaaatcttcctcgatagccgcataagtctcatccacggattccggacgtgcctttcctaccgaagtagtataggtttcaccggtaaacaacatcggtacccttccgaaaagtttcgtcaggtaaaggtagttataaccgcggatggcacgtgcttgcgcttcataaacggtcttggaattgctgtccgcaaatatagaggcatccgccgtctccaggccagccaggaaacggtttgcacggtccactgcacgataactcatccgccatgcagtctccagggaacccttatcgggtttccaggcatgacgctgccattccgcatcccaaccggaagcctgacagtccatcgtagaatggttggcagcaaatacctgaggcttgaatccccatgtttcgtcatcaccggaaccgtgctggtccgtataaaaggtatcataaagtccgttcaatccggaaaggacattctcctccgttttaaacatgaaatccgccggaagaatatcgtaatgatccacttccaaataatcgtcacaagacgttacggtgcttaaggccagcacaccgatcaacagtttatataagtttttcataatcatattttttatccgttagtattagaactgtacactcagaccgaaagtaaccgacatcgggaacggataacgtcctccgtcaaatcccgaatacaatacattggagtcaccaacttccggatcgccgaacttattgtacgaagagatggtacatacattgtcgacactggcaaatacgcgtgcattttccattttcaccggtttcagcacattcttcgggaatgtatatcctatctgaatatttgaaatcttcagataatcccccttctggatgtaggcgtcggacacacgcatgttcttattatagtctgtcttggtgatacgcggatatttggcgccggtattcgaagatgaccatgcattattgatatattccttcagtacattctgataaccaccgtcgggtgcatagactgaggtcaagcgggccgaagaataagaaaggatatccataccggctacaccgtacaagttcatcgagaaatcaaagtttttccaggaagcggtaaggttcattccgtaagtgaacttgggatatccattgcctataacagtacggtcggcatcggtaatctgcccgtcaccattcaaatcaacaaacttatagtcgccgggctgggtagtcttgtcctgatatacaccactttcaactcccttttcaaccgccagcctattcatttcatcaatttcggcctgggttctgaaaatgccttctaccttccagccatagtaggaacctacaggatagccgttctgtgtaatggagtggttgtcccagttgtcgccatcttgtgctgaccctgacttgctgaatatcggatcgccgacttcaatagcctcgttcttcagggtagacccattcagccttatgccgatattccaatcgctgaagctcttgttccacgcagcagtaaactcgaaacctgagttacggatatgtcccgcgttagtatagacattggagaaaccggtagaaggacgaatctggcgatacagaagcagatcctttgcgtcacggataaagtaatcggcagagaaagaaagctcattgttcataaaggcaaaatcaataccgatatttgtctgctcattggtttcccatttcaggttggtatcaatttctttctgctgggcaataccggcaccgttaatcacactcgaaccattaaagaaccagtacattgcatttgccgaagacaactgtgctatggacaagttggtaccattgcccgcattaccggtctgtccccatccggcacgcaacttcaagttactgaacagttctaaatccttaatgaacttttcctcggaaagacgccaagctacagaagcggaagggaatgtaccataacgattgccggcaccaaagttcgaagaaccgtcgcggcgtaccgttgcagtcacaatatagcggtcgttcaaagtataagtcagacggccgaagtaagaaaggaatcttgtcttcaaatccagcccaccatccgtttgcttagacgatgggtcattggtcaatgaaattttgcggatgttgtctgccgggaaatcgttggcactggaattcagccaggcaccgttcgtatcgctggtagagaaaccggccattgcacttacgcggtgatgctcattggaccagtcatagttcaagaacgcttccagaccgagtgaagtggactggctctggttcagcgagaacgagtccttacggtcttgagttccaaaggttctatcattataggctgtatagccattataaccttttgtataataattataactggcaatagttttgaaggtcaaccctttgtacaaatcgagttgtaggaaagcactggcgagcagacggtcccatttattgatgctgtcggcagtcttggcagcagcaaccagattgtcagctcccttgttcacatccccattaccttctttcttgtaatgtccccaagtaccgtcgggcaacacaataggcatggaatagaaaacaccgtcctctacataatccatggttggaatggcttgtgcatagtttctcaggttgcctcctcccatcttttccgaatgtgcatagttcaagttcaagcctacatgcagaaagtctttcactttgtgagtgatattagcgcgtgccgtcaagcgtttaaaattcgactcaatcacgataccctggttgttcaaataacccagagataagttggcttgggtattttcgctgcctcccgaagcagaaaggttatagttctgctgtaatgccgtgcgtgacatttcatcctgccagtcaatgctgttcagtctgcctatgtaatcctcgccatatgccagattggtcatggcaataccgtcattcttgacggcggaacgtacagcacttgcaaacaagcccgcatcagccacatcaatcttattcgaattgaactggagggcatagttggccgaaaagttcacctttgccttccccttaccaccgttcttggtagtaatcataatgacgccattggcaccgcgagtaccatagattgccgtagccgaagcatccttcagaatttcgatggactctacatcattaggattcaagaaatcgatggaagttcctacctgcacaccgtccactacatagagtgggtcggcagaaccattcacggttgccacaccgcggatacggatggagaaacctccttccgggtcaccggaagaacggatgacagatacacctgccgcagctccctgcaaaccttgtcccaagttcaccggattccgcttcatcatttcctccgcattcacggaagccacagaaccggtgaggtcggatttcttcatcgtaccgtagcccacaacaactacctcatccaaggtttcggtatcctcctttaaagtaattttcagagcattcatattcccggttactttgaccgttcgcgccagataaccgatgtaactggtcttcagcgtagaacctacgggacactgcaaggagaagttaccgtccaaatcggtaatcataccgtttgtcgtaccttccacaatgacattggcaccaatgatgggctcgcctttctcatccaccacttggcccttcacagtaactacactctgctgtacgacagtgacacctgcaaacggctgtacgcttgttgcaaagagaggtccggcacatgccagcgatactgacatgatacccaaatacttcatcacatttctcataaatactaaatacttaggtttaacaaataccccggtcataagcacatcgggaaaaagatatgcgacacaattttgtgccactatagaggcactgccgtgccattgggaaggcacatctgtgccaccatagtggcacagatttcggtaactatatccctttctcttccataccgacaggggtgaattcaatatagattttcaaagattaagttcagaaactcagggaagtgccttcaacctggttcaacagttgcggtttggcctttccacaatccactttcacaacctgaatacggttgtcggcaggtagacaaaccaatccttctgcctgcttcttgtcagcactgtataccttcaggctcattttactccaatccatctcagcagtggactgcgccaacttcagatgaggaagtaccgaaccgtcacgtaccagcatgattatcggcagactgcctgcttcaatccggtgccatccgccttcgtagactttctctgtctggtagtctatccattttccttcgggaaggtaaactgtgcggcccgtcataccggattcaagcaagggggcaaccagaatctgcgaaccgaagagatactcgtcatccactttccatgctcccggatcatcggggaattctacaaacaaggctcttagcatcggtaagcccttttctgtacattccttagcctgagcatacacataaggcatcagacggtacttcatctccgcactcttgcggaagacatcctgcacacgcttgctgtcgtacaaccacggctctgtcggaggtgccccatgcgcgcgggtatgggaagtaagaaaaccgaacggtatccagcggcaatacaagtcctccggagtggattttacaaagccgcccatatcatggctccagaaggagaaaccggacaagccgaaggacaagcctgcacgaagcgtacccagcagacccgtgttcgtagttgcagcatcaccgccccaatgcaatggataacgctgggaaccagcccatgcggcacgtgcccacattatattctcgttgtgcaacttcttggttatctcggacactgccatatcataacgcaccggatagaggttatgctcataccatccgctcttgccggaagcgtaaataccattcagtggagcagcctcgccaaagtctactttaatggcactgacaccgatattcagcaatcccgccagtttgtcctgataccactttactgtttccggattggaaaaatcaagcaccacatcttcgtagggaagttcaccatttccatttttcacatacatgtctttctctatcagttcagagaaataacggtttttaggagtgaaataaggcaactgccacaaacatacatggaaaccttgtgacctcaaatccttcaacatctgctgtggattctggaaacggttctcggagaatttatagtcacactgccagtccacatcaaaccagccggtatcgaaatggataacatcgcacggatacttgttcttacggatattggccgctacatcataaccttccttttcactgagataggtaatacggctcatccacgtaccgaaagaccacaaggggggcatgcccggctttcctaccaaatcggtgtactcgtccagaatatctttcggctcgccgaagaaaacgaacaaatccaggttctcgtcacccatgaacattttgttcagcccaatataggtagcaccaaaatcacaagtcacgggagcggatgtatgcataaacataccatatccccggttactcataaagaaaggaatcggtttgtacatctggtccgtctcaggcccttgtgggtctgtaacgaacaagttcaccttctgtccggccttgttcagcccagtggcagactctccgcaaccaaaaatcatttcatctgcagtcaaggtaaataccggattgatgcggcgagcattgtcgcttccccgcttcacaaaacagaacggcgtatattttacctgcgtagagtccgcgtcgctcaaagcggcagtctggctcaagatacgtccggctttatccttcaagacgattctccaaggattcttgttaatctgaatggttccatagtcgctggaatagataatcttgtcattcgtctcggtaactttccagcttccatccctgcccggttcctttgccaacatgatggaagcggcaggtttgggttccaccggggtcgttagcatacggatacgtaccgtacgcggagttacaaagtcaatcttgaatttgaggttagggtcattttcataggcagtgaaggggaaatcgagcattctcattttacggggctgtgcaccgttggtattgaaggcttggcggggcatcagatgcccgcgtttccaattcaccagcccttcacccgacttggcatcgaatgactccaggtgatctgcaaaaaacaaggtattactcaagtcacggaaatcggtactcatgtccagaggttggttcatcaaatacgaagtaccgtcattgacatgtggctgtgccaacagattgccaccggcaaacaacagcatcgccactgctaaaagttctttcttcatactattaggatttaaatgatctcgcctgcaaatgtatttttcttaaaggaaacacagatgccttaaaaatgtcttttaatatccggttttgtttcatagaacccatatagggccattggaaacaaaatgcatactatttttcaccaaacggaggatatcatcccacacgaatacgcaaatctttccttgctcgttcgaaggattatatttaagtttgcagttacaatattgttaatccttctaataaagaaaatacatgaaacaactgctcctattccttatatgcaacctggccttcctccttactgttcaaggtaactcagcggaaatcccgccggctgtcatgttcaagcagctctctacaacagaaggactctccaacaacagtgtccgaagcatctacagagacaataggggattcctctgggtggggacagaatcaggactcaacaaatacgacggctactccttccagcagtattaccagaacaactccgacctgccggacgatgccatcagcgaaattttcgaaggaccggacgacaatgtatggataaggacttccagcggctacagtatctataattataagaccggtaaattcgacaatgactataaacccatactcgatgggctgcaaatccccagtaaaaacattctgaggatgggaaaaacatccaagaatgagttttgggcctacgactattccaaactttacatacgaagcatggacaacagctccatcaaagcctatccactggcagttgaaaagatttcaaacctctatataggtgtccagttcatttatataatgtactccaacggtaccctatacagtatcagcaagcagacttccgaagtcaaggaaatagccattcccaccatctatagacctttgctggagaatcatgagccacacatttacatagaccaaaacgaaagcctatgggtatacaccttccaaaacagcctacttttgcacaagaacagttttacacagcaatgggaggacatcagcctgaacaataacactcacatacagtacaatcgcgtgcaacgcatcctcgacctgggagacggcaacgtatggatacttaccagccatatggggctgttcgtttacaacaccctgaccaaatcgcttaccaacttggtgcacaatccattgaaaccgcacaccattgccagcaacaatctgaataccatttaccgggacaaagacggaaccatatacatagggaatttcaaacacggtatttcctattatagccccatgtcccaaatcatactatgcaacaaatccctggaatatgatgatatcctgaccttctgcgaagacaccagccaggaatacatttactacggaacagacggtacgggactaatccgacgttcactagtgaccgattcatacgaaaagatagcaactcccgccaatattgtagtcgacttatccatcgactccaaaaaccgcctatggataggcaccttccagaaaggactgctatgctactcgaaagggcaaatcaaacaatacacagtaagtaacagccagcttctcgagaacaatgtgtatacagtaaaggtagacaaacacggatacatctggataggtaccatgaaaggatacatacagaggttaaatccggaaaccgggcagtttgacaccatcttgtaccgtccgggagaattctttgtccgagatatgtactatgataaagacagtaccctttacgtagcgaccaaaggaggactcattatcatcgatacggaaacccaagcctataatatctacgccgaagccggccgcttcaaggagaacaatatgctcactgtctataaggacagccgggaccttctttggataggacatccacacggactgagtatatggaaccagaagaacgactccatctacttccttgaccagaaaaacggacttgccgccaacctcgtcagagccgtcacggaagacaacaacaaccagatgtggattggtaccggcaacggcatctcacgaatcaaaataacaaacggtacatacgccatcgtgaactactccgtaagcgacggactgatatgcaacgataccaatgtccacgccatcctcaagctacagaacggcaatatactgataggcacgccacaaggttaccagactatcattccacaagacatcctgaccacaagttatgatgccaatatttaccttaccggtattgagctcaaatccggaatgacccatccggacatcctgaacggcagctcacttgaatgtgcacaacatctttccttcactgaaaaggaaaattcattcactctgtccttctctgccctcgacctggtggaaacggataagataaaatatgcctataagattcattccaactggatttatgctgaaaacaacaaagtaaacctatccatgctgactgccggaaactatactttatccgtcaaggcatgcaactcacaaggcatatggagccccaacgtcaaggaactgaaaataaagatactccctccttggtggcgcacttggtgggcttataccatatatagcggtatcgttttgtgcatccttctgtccattatccgcaatctgcgcttacgccaaaagcagaaacaaatcatgcaggccatcgaggtggaaaatgaaaggcagcagaaaatcaacaatatgaaactgcagttctttgccaacataagtcacgaactgcggacccccttgtcacttatcatcaatccgcttgaagagtttttcgtagaccatcccgaatatcgtaaaggcattctggatatggtcaaacaaaatgccgactatctgctggaactgattaaccaactgctggatttcagaaagctggatgccaaggctgaaaccctgaaatgcaaacatgacaacatccttatcattctgagtgaaatattccactctttcgatccgatagcacagaaacggaacatcagctatagccttaccgctccacaacattctgtattcatggatttcgactatgacaagatacgcaagatatgcacaaatatcctgtcaaatgcattcaagttcactcccaataaaggaagcatctcactggatattgccgtaagaggcacaaatctggaactgacctttaccgacaccggttgcggcatagaggatgaagccaaggagaaaatattccaaagattctatcagtcgggcaaaaaccagtcgaacaacggaggcagcggcattggactgcacattgtttccgaatacgtaaagatgcatcagggtactgtctgtgtcagggataaccagccttgtggttctgtattcctgattgccctacccctacaccagaacagtaatgaaaccaaaaacggagaaccggtcgaaggaccggaaataaaagaagaatcccatccattcaccatactactcgtagatgacaactacgacttcttgaaatttctctctgaaagtcttgccaggcagtatcatgtattaaaagccacaaacggaaaacatgcactgaatgtactggaaaaggaagatattgatttagtggtcagtgacatcatgatgcccgagatggatggtctggaactatgttcaaccatcaagaatgacatacgctactcccatatccccattatcctcctgacagctaaggcaagtgaagaacaccaattggaagggcttagcgttggcgcagacgactatatcaccaagcctttcaatatggaagtcctcaagctgcgcatcaacaagattatcgagatgaacgtcaaacgtcaggaaatattcaatcaggacattaaaatcgagccaagccgtatcaccatcactccccttgaccagcagctggtggaaaaagccatccagattgtagaggacaatatcagcgaaaccgagttttccgtcgaggagcttgccagcagcctgaatatatcacgcagctatttctacaagaaaatgattaagataacgggaaagaaacccatcgaattcatcaggaccatccgtatgaaacgtgcacaacaactcttgacagaaagccagatgcaagtttcggaaattgcatataccttggggtataactcccccaagatattctccaaacattttaaagaagagttcaacatcagcccatccgaatttataaggcagcaggctgaatagaaacattattttgacatcaaagcatccaacgaagacaccaacgccaccaaagcagcactccaattaatggctatttcattggaagcatacgaaccttccacatctgcataagactcatccggcagattggaaggatagggtacaccgtcttgttggccaggattgggaccgccaacaaggaaaccgggaagaggtgcctctatatcatccgatgcagaaagacgatggtgcggatacagaggacttttcatcccgaaaccggtgacataacaatatcccgtggcattctttcctaaaatgtagtccatattgcggtaggcgttcgtcaggtacgacttctcacccgtaagcaaataggcgcaaaccagtgaagtggcttggttagcacacccttcggcaaggcatccccaaaagaaatctttggcatcgttgccgtaaggagcgtggaaaggagagcggtcagcaccccgcacagcctcggcagcatagtccagtagcaggtctttcatggcatttgccaactccacgtcttcaccctgatattccctgcccggttgcagccaggcaaacacgcccaacgcagtggtattgccccaagaaggagtcttatatgcagtgggcagatgcttcttcacttgttcccggtaaacgggctttcccgtagcaagatagagctcggaagccgcccagaagaattcgtcatcggcactacgatcaccgtaagctcccgtaaccacggcaggttgatattgcttgttgaggaggtcctgatgatagagcgcttgcggatgcgcttctgcccaggcgtaagcacgttcggcagcctgcaaagccacttccgaaaagccaggataatcctcttcgtaaggagcaaacaacacggaagcttgcgctaaagccgcagcatagtccaatgccgccgttactgatttctgaactacataacggggctgcttacactccgtaggcttgataaatccctcgaacgaaggggtagtcagcttgtggtagactcctccgtcggcagggtcttgcatggtcagcatccatttcaggttatagtacatctcgtccagcaaatcgggcgtgtggtttccgctttccgggatgttcacccgttgacggataaaatagtcaggaaagcgggcataaatcgcctgcatcaatccgatggaataagcggagttcacaatgtacttgttataatctccggcatcataccatcctcccggagaagaaatcaccgctcccgccttacgttccggcccggcagcattgggatgtaccagcaccttgtcatctggatggcctgccggacggctccaccgacccgcataagtcgcttcgatgggcatacccgtacgttggtaatagaaagatttcaaagcggcatcggccaaaggggacagcaccttttcctttacttcgaatgccactgaatcgccgttaaccaacagaagatatcttcccggtaccgtgatgtcactgaaatccaatattgtcctgctcctatccgaccaagcggatgaagcggtatatccgggtttgccggaaagtagccgattgcccgtggctgcatctactatggtaaattcacgtacctcaccggcattcaccacagctactttttcctgctggggataataccctaactgattcaaacgtacagtttctgaaggatgccctaaagtggccattcctcccagaactgtaaacagacatgtagttatattcatatcactattctttatatattaatattattccatttcaaaattatttatccgacaataaggtaatgaaactgatagccggcaagtgtacccgtaccagtccattctccaccttcactgcagtttccttcatgcagtcctttgtattggtcacatagactttcagttccttcacttctgcagggataccggagatgacagcctcgcaatccgccccattattgaccatatggacggcatattctccgcgcaccatatttccgaaagccgcacagtttacatttttcttgctgctactgactggaatagccaaggcatcggccggagtggaggccagctgcttaatgttccagaaacgttgtgtaggacgcaaaggacctttggagccataaatgccgtctccccacaacaacgaatagtctgaagtgagctgccactgcaagatggacaatggttggcaaatcgcacaaatacgtgtatacagattgatttcataaagtgcaaacgtcgactcattgaatatctcggcataaccatgagcagcggcatccgtactaccctcaccaaccaagagtagtacattaatctctttggcagcacccgcccacttccttaacgtaacatcatcacaaccacgccatgaatggaaagaaactgcaccaatatacttatgagtctcaggattgttcaaagcaggaaggataaaatcgaaagtagtggcatccgaattgtcgccaagcagcatgcgggtaggaagattcaaccctgccagataagcaccgaactccttaatgaaatctgcatgctcctgcggagtgtggaggacatcaatacccaaatccgattcattgaacgagaacatggagaactcaataccataataccgtttggcatacaacagataatctgccatggatttataaatcttctcctttttccggttatccagacgataagcaatgacaccaccttgacgggcataacttgcaggacctccgtcaatggcccatgcaggcggaaaccaacagcttagtattaccggcattcccatcgccttcaagcgctttgccatgaggagactttcctccacccgcttgttcagtcccccattctgtgccacggcaataggatcggattcttcttcgggttgccacaatctccacggaaattccacacggccataagctacgcgcaagttttccagacagtaatctatcactttagggtcggcagcaggattctgcaggcggaaattccctccaaagcctgcaaacaaacttcccggattctgcatatccaatgtaatttccgcgtcactgtgatctatcactccggaagcatgcagttccatagacaatgctgttctcccagcctttttcagaatcggcattagcgagatatacacaacagtaccggtagactctttttcaaccgtggcctttacagacttattgaacttgaattccaacttcctattggccgaagtaacggtcagcttcctgccacttacccttactttggcatcaatgtagttttccggacttaaagcaatacagtaataggctgcctggttcaaagtagtgtccgacagcgcatcaatagaaatctccaccaagccttttcccttatcggtcactttctgatggaactttacacctcgcagagtagccgtcacttcctgcatattcccctcacgatggaaaacgggacggacctgcttctcctttccggtaatctccatatctcctttcaaggttccgacacgcagggatgactcaaagtctatcaattcaccgtctacgcggacacccgtgatattgctccatgccatcacttccgtctgggcagaaagcggcagagataatataccacacagcaatacaactattccaaactggaaaattcgtaaattcttcataatatcaaatctataaaaggttgtcatttcagtctggtatcaatctcaaaccccatacggctgttatgataaggacaattccacatacttgctttaggctccttgtagcggggagttccatcttccagcaccgttctgaaccattcaccatactccttgtctatcatccgtgatttgatgaagttccaggtgcggacggcactgtccagataagattgttcaccagtcagttgccaggcattgatacagccgaccacagtttccgcttggcaccaccaggaagcgtccttcctgattttgtccttatgtcgttcatacatcatagctcccatcgggttgatgccctccttcaaggaagcatctgcaagttccaatgctaccttcctgcacctcccgataacctccgggtcacccagagcctctgcagcttccgtcagcagccaagaagtttcgatatcatgcccgtaagagtcgatgtcatccagattattccaatttaaatcacagtatgatatcaagtgatgtgtttgtgggttgtacagcctggttgttattaagtctattacttttgcaaggcgcttgcaaaggctgttatccttccatactttatataaagccgtgtatgcctctaatacatggatatgtgtattcattgttttggcagcaatgccatctccatcataccccagcttttggggagttccccattcgcgggtaaaggattctatatagccatcatttacgggatctttgactttgctctccattatccgataaagctctatggctttttgcaggctttcattgttgcccgttgccctgaaatgttcggacaacccatagatagcataagagcagccgtaagtctgcttgttcgtatccaatggggtaccgtccgcttttatcagccaatatacgcctccatactgcgaatcaatgaagtgatctatgaaataccgttgcgccctgtcagccaatttacggtaggcagtatcgccatacatccggtaggcggttgaaaaagtccaaaggatgcgggcattcagtacaccacctttgggagcatccgctatcggggcaccgtcacgtcccaatgaaccataaaagcctccggaagaatctacgctgtatctttcccaaaaagagaggatattctctttcaagtccgaggttatttcatcttttaaaaccttgtctacgtgtgactgtgcttgcaggaaaggtgtaaccagcaaccatactgtaatcagcaaaaaaacggaaaacatacgtttcataatatagcgatttaaggagttagccatagttacattgcaaatgtacaaaaaaacaaatggacactactcattgccatcctttttcaagggatacaattggttccgataaaggctatttttgggtactgagtccttgttttaccagacatcagcttctattggctcaaacgtgggtatccggcagctcaagcgccattgtctgacaaatataacaatgaatatcataaaaatagaggaaaaagacacatttcataacgttattggctacaaacaaaagccatccgtttcctttttagtccgtatattagtagaaaattttgtaactcaaaaatagatactatgagaaagaaacatttcctatttgcatcagtcttggcactgctttgcggcagcagtgcgctgcatgcgcaagacttcaagctgacatcctccggttatttcaagaatcagggagtcgacatcatggcttttgatgatatctatcccgaaggacaccaaggaggggtatgtatcatcatgaacggacaccgtgtggcgacgaatggagatatccgtctggaagccacacccggacaatggcagcccgtaccgaaacagctcgaccggaagctcggtgacaacagcatcaccgccacgctgtgctatcccgactcctcacgccatctcaccggattcaacccgatgatttacccggacctccaccttatatatacggtaaacgtggaaagcaaaggtaaaaacatagaggtgaccgtagaccttgaccgccccattccccaggaattcatcggaaaagtgggcttcaaccttgaattcttcccgggttccctcttcggcaagccctggattatggacggtcagagcggcatcttcccgcaacaacccaactctcccctaatgacaacccaacccaactatctgcatacgggaaattatcatgacggcaagcaatcgctggcagacatggacaaactgataggaaaaggttacagcccgattgtggccgacgacatcatcagcgaaccttatgccaaaggccgtaagtttacctcccgccccgacgacccttacaacaaagtaaccatcgaatcattgagtggtaacctacaactgtttgacgggcgtatgaaccacaataacggctggttcgtactgcgcagcaacataaaaccgggtgtcaccaaaggggccgtcaaatggattatcactccgaacgtagtggccgactggatgtatcagccggttatccagacttcacagataggttatcatcccgcccaggacaaggaagccgtcatcgaaatggatatacgtgacaatagaaaggaaacggcacaaatcatccgcattgacgcagacggcgagaaagtggtcaagaacgtcactcctgccaattggggcaagttcctgagatacaactatctgaaggtggacttcacggatgtgaaggaaccgggactctacaagattaaatacgatacctccgtatcccctatcttccgcatcgacaatgacgtatatgcccgcggcgtatggcagcccgtactggaatacttccttcccgtacagatgtgccacatgcgcgtcaacgaaaaataccgcgtatggcacgactgctgccacatggacgatgcccagatggcaccggcacacaatcatatcgacggctacgaccagaaagagggcctgtccaagttcaaaccgggtgaagtggttcccggagtgaacataggcggctggcacgatgccggagactttgacctccgcatcgaatcccaagccggagaatcctatatcctggcactggcctacgaagctttccacccgaatctcgacgtgacttccatcgaccagataaaccgtgtgacggaaatccaccagcccgacggtaagaatgacttgctgcaacaagtagagaacggcgcccttacggtagtcaacggctacctggcactgggacgtctctaccggggaatcatctgcaacgaccttcgccaatacgtacttctgggtgatgccgccgccatgacggacggaaaaatcggtaatgaagacgaccgttggatatttacagaggacaaccccggacgagaactgtcgacagccgcccaacttgctgccgtatcacgcgtattgaaaggcttcaatgatacattgagtgtacattgtctcgacattgcccgcaaagtatatgcttctaccggaaacggcaacaacagagccttgttccccaaagtgcaggcagccgtagaactgtacctcaccacgggcgaacaaccctatatggacttcattctggacaacaaagagctcatcatcaagcagataggccgcatcggctggtacacggcacgtgtggaaaaacagtttgcacaaatgaagaacaagaaagccaaagctttctccaccgctttccgcaaagctctgaccggatatgaacaagagctgaacaagcaagtgcaggagactccttacggcattccctaccgtccacatatctggggtgcaggctgggatatacagcgtttcggcttccagcactacttcctgacaaccgcctatccggaaatattcccgaaagcaccggtattcaatgccctcaacttcattctcggatgccacccgggctccaaccaagcttccttcgcctcgggtgtcggcgcacaatcagccactgtgggctacggactgaaccgcgcagactggtcgtatattcccggtggagtcatttccggtacagctcttatccgtcccgacttcccggaactcctcacgttcccgttcctctggcagcaaactgaatatgtgctgggaggaggttcatcccactatatgttcctggtacttgcagcagaacagttgctgaaacaataagaaagacagagggggaacaaaaccctctggatgttttcttttaggcgcggattacacggatttcacggatttagtttactgcatccatggattccgcgtaacccgcgcctaatattatagtataatgaaagtgtttatctactttccgttctttcaccaattatccgtacggaacggaatggtaggcaattcatttccgccaatcatcgtaccaatctggaaatcatggaaacaatagcgcacgctgacgggatgggataccttttctgaagagattaccacttcattcgtctgccagtgcagccatactttgtcggcaggatggaacacacggtcctcacccgccacttcgaaaccgcgaaggtcatagttgcgacagatacccatttccaaatggtcgaaggaaacccatgcttcactgcctttagcagtccatgacttatattgtgggccgaaacagtgtatctgcttcaatccataggtaaggttcaatgccagatagctcaagcgttgacctacctttgtcttgttgcggggatggatattgtacatctcataaggctctacaaggtcgtttgtcgaaatcataccactgttcggaatcaggctttgggcacggaattgcgcttcacgtaggtaagcagctttctcttgctgggtacctccataggcgtacggcgctatttcggcaaagtagaaaggcaattcgcccagcccccattccttgcgccacagctgcaccatgtcggccaagcgttcggcatatgtttcatggcgacctacgttcgactctccctgataccagatgaaccctttgatggtatagttctgaagcggcttcagcatggcattgtacatcagcatggggcggagcatgggatgcaggcgttcgatggaatcggggttgagagatatgtctggatagttttccagcagttcacggcttatccaaccttctacagtggatccaccgtaagcgctacagatgatgccgaccggaatccggagggcacggctcaacgaagtggcaaaatagtaggccgtcgcactgaaatcgggtgcggtttctatggaagatatgttccagctacctttgcagtcggtttgcagttcataagtctggtgcttgggaacggtgaacatacgcacccccttattctcggcagaaactatgatgtcatccgctccgttcatgatgcaacagccagcaaaacctttcaggggcatttccatattgctctggccggaagcaagccatacttcaccgattaggatattcttcaacgtagttttttctccgtcatcaaaagttatctcataaggcgtgtatcctgctgccggagtctccacggcaagcgtccaaccgccatccttatcggcacggcaagtcattgtctgtccgttccacgaaggcgtaacgcgtacttcggcttccggagcagccgttccccacagtttcacttcagtctgctgctggagtatcatgttgtcgcccaccagtgcaggcagttttactttggcgcccaacgaggcggcaccgcataatagaatcaatgcaagaaccttacttttcatagtatatttgtatttaacattatattcggaatcaataacgcgagcaaaaataaggcttttttgctcacgttctccgtttcatgtgcaaaaagtgggtgtttttgcacatgtgctcaaacaaaattatacattgatgtattatacattgatgtataatttgtatatttgtcattaaatcaagaacagaaagtttatgaaatcaccttttcaatacggcacactggttgataaagaaagtttcgtcaatcgggtagaagaacgaaagcaactgaaagaattacttggatcgggcatcaacgtaatgcttatttcaccgcgccgatggggaaaatcgtcgcttgtaaaagtagctatggacgaactgacacaagaagacaagcatatccgtgtctgcttcattgatgcattcagcatcaagacggaagctgaattctaccgcatctttgcgcgagaagtcatttcttgcgccgcctccacccttgaaaagaggcttgaagatgtgaaacagtttcttaaagccgtttctcccagtatcacattgaagagcgacccaaccgataccctctcctttgacctgaaattggaactggaagaaaaaagtgtcatggagatactggaactacccgaaaagatagcagctgccaaaggcatacacctgattgtctgcatcgacgagttccaacaactggcactactacccggctacaaaagtatggagggaaaaatgcgctctgcctggcagaagcagcaacaagtttcctattgcttttacggaagcaagcggcatatgatgatggacatcttcaacaattcttctaaccccttctaccgcttcggacaagtactgttcctgcaaaagataaagaaagaggaatgggtgcccttcatcgtcaatgccttccaccggacgaacaaagaaatcagcgaacagcaagcagaacaactgtgcgacatcgtgaaatgccattcgtggtatttgcaacagttgtgctatttcatctggagcggtacgtctgaaaaagtgacagatgagattatcgaaatccgtacccaccaactgatagacaccaacatgcctatgttcatgaacgacaccgagaacctgactgctgcccaaactgccatgcttcgtgctgtagccgatggtgaataccgcttcaactccatccccgtagtgcggaaatatgaattgggcagtgcacagaccatcacacgcaacaagcgtatgctgacagaacgtgatttcattgagaaagaggggaacaagtatgttttctccgatccgatattcgagctttggttcaggagggagtattgctgaatataaaaaaagaacgtggaactgcgtgctatccatcgtctttgaaggtcctgagaaaaccccactatacaaatgaacagacagcagacccacgccgaaaccagcacaggagcagtccatgccattcttgtgtatcattgatgaatttctcaggttctcaaagacaagaatgaagcacaacgcttcttacaatatcatttcacaaaacattgaagctaaggacacttccttgcttcgatggcaaatttaacgataaagaatgaaaacaagaaaaagattggaaagtatttttgaggttgatacctacagaagataaatatgattttgtcattctgacactttgtattttctatcgcacgagaatcccatatttccatcccattacccacccagcagtaaatacgagagtggaaatctgtaagtatcaggctataagcattataccaaaagaacatccttccaataaatcggaatcacctctccgaaagccctgatacaccgaaaaggcaaaagcaaaagaacgttttactaaaacagagtaaccgttttactaaaacgcaataccccttttagtaaaaagcaatcacccttttagcttaaaggtgtagccaatttctgcataaaagccccacaaaagcggaagaacatgcaagaagaacgcatctttatgaaccgaatatccacaacatatcccaaatccgttcttctgtaaaaccaagtgcggcaggaaaaccgggaaaagcattactttttgtcaaggttatagggatatttccgtctttcagcaccttttacaacaacccatgcagttcccacgcccgcacatgccgtattccttcatgagacggcaggcagaagtcatcaagcgagacaaccagtttctcataattatcttgtatcgcctccaacgaagcatactcacggcgcaccgtctgttcatctaccagcatgtaggtggattgcagatatatcgtacggtcacctttccgagcgatgaagtccacctctttttctttagcacatccggtatagacatcatagcccgcccgaagcaactccagatagacaagagtctccagtttataacccacaccataggctgttccgggatagaggaaattcttaaaggcaaggtcgttgatgtaatatttcgccgtaccggacagtatttcctttccgcgcaagtcaaagcgttcacaacgatacgccaagaacgagtcttcgatatagcctatgtaggcagccacggcatcatagctcgtcttccggccttggctcttgaaatagttcacgatgttgccgatggacactaaattggaggcattgcctacaagaaacgcaaaaaggtcctcaagcagccgggggtcacgtatgctgtagcgttggatgatgtccttcagcaagatggtgtccttcaaggcagacaagtaattgcgctgcacctcctgcttttcgggcaagacaaaaagttccgggattccgcccgtattcatatagcccatatagctctcacggttctgttccagatgccttatctctgtatactcctgatagctgaagggatataccggaaattggacgtatcgccccgaaagcagcgtggcaagctcaccggacagcatccgtgagttggagccgctgataaagagctcgtactcctcggtatagtcctgcgaataagaattgaccgacttttcccattcttcgatgagctgcacttcgtcgatgaaaatataaatctcctcttgtccagagattgtacttcctaagtatatccattctttcgttcataacctaaaaagtttgcgaaaaaggctagattttcggttataaacgaaagattcatttagacaagcaaggaggatacttcctttccgcatcccctttatcggccggatattccctctatagaatcatcattgttgcatctatatatccaccgcgttgcatctatacttccaccgtgctgcatctatagatgcagcaaatcccttaacctatcctaataatgctgcttattgtcacctatttagaagcgaaatcattatatttgcgcccatatatgccaatacgttgactaagcgatggcaaaacagcttgtaaaaaacaaaactgaataataacgaatttcatctgaatgaaacagtacaaaaccgtaaacaaccttgtaggctggattaccttcctcattgcagcgacggtctactgcatgaccatcgaacctactgcaagcttttgggactgcccggagttcatcaccaccggctataagctggaagtaggacacccgcccggcgcaccgttcttcatgctggtagccaacctattctcacaatttgcttccgatgcctccaccgttgccaagatggtgaactacatgagcgcgctgatgagcggcgcatgtatcctgttccttttctggagcatcacgcacctggtacgcaaacttgtggtgacagacgaaaacaatatcacacgcggccagatggttaccatcatgggtagcggtctggtgggcgcacttgcctacacgttcagcgataccttctggttcagcgctgtggaaggcgaggtgtatgccttctcctcactgtttactgccgtcgtattctggctcatactgaaatgggaggacgttgccaacgagcctcacagtgatcgctggctgattctcattgcctacctgaccggtctgagtatcggcgtgcacttgctgaacctgctctgcctgcccgccatcgtactggtatactactacaagaaagtacccaacgccaatgcccgaggctccctgctggcattgctcgcttcgggcatactggtagcagccgtactctacggcatcgtgccgggtatcgtgaaagtgggcggctggttcgaactgctcttcgtcaacacgctgggcatgtccttcaacacgggtgtcatcgtatatatcatcctgttggcagcctgcctcatctggggtatctacgaaagctataccgaacgcaacaaggcacgtatggcactctcgttcatactcaccatcgccatgctgggtatcccgttctacggacacggtaccagctcggtagttatcggtgtcattgtcattgccgcattgtggctctacctccgtccgaagacgcaggcagccgtcaaagagaaattccgcgtatcggcacgcacgctgaacacctcgctgctctgcaccatgatgattgtcatcggatattcctcgtatgcacttatcgtcatccgctccaccgccaacacgccgatggaccagaactctccggaagacatcttcacactgggcgaatacctgggacgcgagcagtatggcacacgcccgctgttctatggccctgccttctcctcgcaagtggcactggacgtgaaagacggttactgcgaaccgcgcatcaagtacaacggcacgaagttcatccgcaaggagaaagctacgcccgacgaaaaggattcgtacatcgaaatccccggacgcattgagtacgaatacgcccagaacatgctgttcccgcgtatgtacagcagtgcccatacacaacaataccatgcctggcaggacatcaagggttacgatgtgccctatgacaaatgcggcaacatgattatggtaaacatgcccacacagtgggaaaacatcaagttcttcttctcctaccagctcaactggatgtactggcgctacttcatgtggaacttcgccggacgccagaacgacatacaaggcagcggagaaattgaacacggcaactggattaccggtatcccgttcatcgacaactggctggtgggcgaccagagcctcttgcctcaggaactgaaagacaacaagggacacaacgtattctactgcctacccctgctgctgggtatcatcggcctgctatggcaagcctaccgtgggcagaaaggcatccagcaattctgggtggtcttcttcctcttcttcatgaccggtattgccatcgtgctctacctgaaccagactccgagccaaccgcgcgaacgtgactatgcctacgccggttcgttctacgccttcgccatctggattggtatgggtgtggcaggactcgtccgtctgcttcaagactatgccaagatgaaggaactgcctgctgccgccatcgtttccgtagcctgcctctttgtccccgtgcagatggcaagccagacttgggacgaccacgaccgcagcgaccgctacatggcacgcgacttcggccagaactacctgatgtccctgcaagaaagcggcaacccgattatctataccaatggtgacaacgataccttccccctctggtacaaccaggagaccgaaggtttccgtaccgacgcccgtacctgcaacctctcgtacctgcagaccgattggtacatcgaccagatgaagcgccccgcctacgacagtccttctctccccatcacctgggaccgtatggagtacgtagaaggcaccaacgaatacgtccccatccagcctgagtacaagaaaagcatcgaccagctctatgccgaagccgagaagcaggcactggacggtaatcccgaagcactagtcaatgtaaagaaagaattcggtgacaacccgtatgagctaaagaatatcctcaagaactgggtgcgcaacaagaatcaggacttgaaggtgattcctaccgacagcatcgtcatcaaggtagacaaggaagccgtgcgccgcagcggcatgatgataccgggcgactcaatccccgactacatgcacatttcgctgaaaggcaaacgcgccctctacaagagcgagttgatgatgctcgaaatgctgagcgaggccaactgggaacgccccatctatatcgctgtcagcgtaggcagggagaaccagctgaatatggaaaaccacttcgttcaggaaggtcttgcctatcgtttcactccgttcgacaccagtaagacgggcgtgacaatagactccgaaaagatgtacgacaacctgatgaacaagttcaagttcggtggcatcgacaagccgggcatctatatcgacgagaacgcaatgcgcatgtgtcactctcaccgtcgcatcttctcccaactcgtgcagcagctgatgcgtgagggcaagaaagacaaggcaaaagccgccctggactatgccgaaaagatgattcccgcctacaacgtgccttacgactggcagaacggtgccgtacagatggcggaagcctactaccaactgggcgaaaccgccaaggcggacgagatgatgaaagcccttgctgacaaggctgtagagtacctgacctggtatctgagcctggacgacaaccgcttcatgatttctacccgtgaatttgaataccactgggctgtactcgatgccgaggtgaaggccatgaagaagtacaactccaagctcgccgaaatctacgagccgaaggtggaagaactgtataatatgtatgtggacagaatgaaggagtgagaataaggattagggattaaaggattagggattagcctgtgcagttcatcactaatcattaacccctaatccttaacccctaatccttaaaatccctaatccttaaaatccctaatcccttaatccttaatcacgtgtttatagaacaacctcctgagttttttcgcaaactatatcccggtgcagtctggaggatggaccccaatgaaaaagccgtttatctgactttcgacgatggccctatccccgaagtaactccctgggtgctcgacctgctggataagcacaacatcaaagccaccttcttcatggtaggtgacaacatacggaagcatccggacgaattccggatggtcgttgagcgtgggcaccgcatcggtaaccacaccttcaaccatatccgtggatttgaatacacggccaagaattatctgggaaataccgaacaggcgaagattttcatggaaatgggtggggacatcaattgcaatgtggagaaggttctctaccctctcttgttccgccctccccacggccatatgttcgccaaccagtatctcacgctgaaacgaacctacaagattgtgatgtgggacctcgtgacccgcgactacagcaagaagctgcgcggtccgcaagtgctagccaacgtgatgcgctacgcccgcaacggctccatcatcaccttccacgattccttgaaatcctggtgcaacggaaacctgcagtacgcattgccgcgcgccattgacttcctgaaggaagagggatatgaattcaaagtattataaacttgaaacagcagaaagttaccaacatctgctgtcacaataaattccacataaaataagaaggggttgtctcggcaaaaggcaaccccttacattttataggctcatgtcctgttccacaagaataaacagatgttttataattaccaagtaaatgtacatctgtattcatcccactggtcttttacaaccagttccgtaggataactgtcggaattcaatgtccatgtaaaatacatatcggacacagagtcctcgccattgtatgtataatgccctacaagcggcagatgtttcgtagccttaccaagcatgcctccataataggcatatatcatctcgtccatatccacatccagtatttcatcaaacaacatcaggcagcccttattctcgataggagctgttatattatccgtcgtatagtctatggcagcactatactcccactcgtcattgctgtcgataattccgtcaccattgagatccccactagctacataacgtgtggaagtcttcaccacatctccatccttataggtgatgttcgttatttcaccatcgctttcagagcgtttcattacaaccagatggccttcagtgtcgtattccatctcccaagtaaactcatcggcatcgggagtaccagcgtggtctattgagttgcaaaattccacataaccatcgctgttgagctgcaagttcagttctgtaacatcgccctcttcatccgtcacggtgattcttgctcggtcctttgcaacatctgcctttgtagtagcgggaaagtactcaaagacggctttatccccatcctcagttgtaatgttcgtcaccagcccttcttcattgtgagaaatcgccatgcccgaaaccgacttcggaagccctcccgtaaacacttgcgaaggattgaccacagtggcggtgttttcgccaccctcaccattctcattttcgtcatcgtcactgcaagcagtgaatcccaagcacaacgccacacccaacatggaggcagccatcattttaaacattttcataagttacaaatcttgttttatccccatccctctaaggaaaatccataataacaaaagtataaggaatgccgtccgtatctcacgacaacaagactctgccattcaaacccggacagatacttttggccatttatcattcccagacaaagcttaatattttttgcaaagtaataaacttttcctttcactccttgtcactgaaaaaggtgatttttcagccacatacagaaaaaattcagcatctccaataaaaagcaaaatgaataagacgtatatttgcaacaactaagcacagattgaattccactaaaatataccgatatgagggtacgccatactaagctattatcactcctcttttctttaaccactatcctgcttcacgccggagaaataccaacagacactctgttggcacacttctacaaccgggcagccaatctcatggaagaaggacactacgatgaagcgcaacgtagcttcgacagcgcctttgccacccggaacgtaaagcactccttcatgtatcccatcttgctgaacgaacaagccacactactgatctatgtgggaaagacagaagaagcctttgccatgaaaaaaaatgtgctcccctacctgccgcagatagatgatttggaaaagcacatcagcgtatacaacgatttgggcctcctctaccgtcagcaccaaatgaatgactctacactctactattacaataaagcactggacagtgccttgcaatatggggacgaaagctggatagcccacatctgcaacaatgtgtccatcctatacttcaatatcaggcagctggacgaagctgaaaagtataccgacatggccaccgaacatgccgccagaaccgaagacccattcgtagctttcaccacctggcaaatcagagcaaccataaaggctgagctgaacaagctggatgatgctgaaaaatccaaccgcaaagcctggaacattgcctgccacggagagggaaacgaagacttatggaagatacgctgcctgcccggcatgctgagactctttgaacgaaaagaacaacccgattccatagaccactacttgaaattggggaacaaactactacaacgggtaccatccaactccatcgctgccataggattcatacaatcgagggcagccaccgaaacaaaccgcaaaaactatgcccgcgccttgaaggacttccactggctgcgtaaccggaaaaccggtaccgagcccaaaacattatttacacaaatggcacgatgctacgatgccttgggaaaccccaaactggcctacacctatatggatagtgcccgcatgtggactgatacgctggcacagcacaatctgacgcaacaaatggcagaattcaacgtgaaatatcacacacaagaaaaggaattggagatagcccacctgcaacaagaacaactggaacaccaagccttcctgctaaaagcctccattgctgtagcccttctgtccggtcttgctctcattactttgttgacgctccgccacaagaaacgaatagccgaaaagaagattgaactgctaaagcaagaaaacgaactgaactcggcacgccgttacattgaagggttggaagaggaatgcaaatattttgccaaggaactgcatgacggcatagccaacgacctgctggggctgcaaatgaagatagaaacttctgccagcaaagggaatgagcaggaactggcctcactcgtcagcaaactgagaaacaacgtgcggaatatctcacacgaactgatgcctcccgaattcgagcatctcagtctagaccagatactcgaccgttatgctgccaaactgaccgagaacaccggcatagaggtcagctatcatccaacggagaacaacgcatcacgccatcttcccaatgaaaccgcttatgagctgtaccgcatcgtacaagagctcaccatgaacatcgtgaaacatgcctcagccagtcatatagtcatcagtctccgtgccgacaatgaaaataaatataccctgcaaattacagacaacggtaagaatgcaaacaagcaacaaacagcaacaaacaacaatgacggcataggattgcgcaccgtaaacgaccgtatcagagccatcaacgctaccgccaatgtatgctcgtcaacagaaaacaacgttttcaccctactgcttaacataaacgaatgaaaccaaacaaagaaacatacagaatactggtaatagatgaccacccgattgttgctgaaggcatcatcgcattggcctcgcaactcgaaggagtgacgtgcaaaggagccacttgtgcaaaagacgtggaacaactgaccctcaaagagagattcgacctttgcatcattgaccttgaactaccggatatgaatggattccaactcatatcccaccttcacagccagatacccgaatgcggcattttaatctataccatgcatgaagaaccttggatcatagccaaattatccaccctaaacatcaacggagctgtttcaaaaaatgccagcaccagcgaattgagagacgccatcagtacactgaaaaacggaaccagatacttcagcaatgttttcagcgaactggacaaggaaaaacaaaacaccctaccacatgcacttcccgaattgtcgagacgtgaaaaagaagtgctcgcctatctctcgcaaggactgagcacttctgaaatatcccaattactatttctcagcatcaatacaatacagacttaccggaagcgcctgatggaaaaactggaggccaaaaacgttgcagaacttgtctacaaggggaagagcttattctgagaacacttgtcattcgcccggacagttacaagcctccagcttctcaagcttctccgtctgaaaaggaagaaaatcaacttagcggatactcaccgtcatcggattgcgcaccttctgtgcaaaatcagccatgtatcggttccaggcttcagcagtcttgatgtccgcgcggtcccaggcaaagccccagtaatacacgtagtcagcgcccggctcatagtcgctgacaaccagtacatgaccgtccgcattgttacgcatcttcttctcctctatggggaaaagcacggttttggcttccttcacaacggcagggaaagcggcccccataaatatcttgccattatccggtccggtagtggggtctacatacgtcatatagccaccggcggcatcagccaccacagcaccgtccggttcgtgcagcacaataccggtaacaatgggcaaagattcctttagattgctatacgaaacggcagtacggttcagatgagaaccggcatccagcgtaatcagacgtgtttccaccaccgcagtatcccctttcacagccaacggattgaactccagcttcacggtgaagcgcaacggaccgttgtccagcacctcctgcgtcttgtagcaccacggatagataatggtatcattcaccatcaatgcagacactccagctcccaatgttggacctactgcatagcagtccatgccataaccgtggtctatatgataggagaatgtgcgtaccagctcatcggctgccttcgggtctgtcttgcgcaattcattaacctgcttccaggagtctgcatccagttccttggcatacatgtcttccagtaccggtgcagcagtgcctcgcttcgtgaacaagtcgtagccgaaaccgcgttcaccccttgcctgcaatgcaggaccgtaggcacggaagcctaccaagtcgttctcccaggccatgtcgtccagacgttcgggatactgccgcccacaagcccttacctccacatcgacgggagtaccggcctggacggtatatgcagccgatgcattggcagctaccgtcgcagggaagattaatttgtcatcgtaggtcacttggtaaggcacctgctccccttcgacattcagaaccacaatctgtgcggtgtctgccagattcagaaggtttgagatttcggtcatggacacctctaccatctcatcggaacggtccatcgctaacggattggttaccgtaatagtcactatcttgctatcgttgcaagcaagacagcagagggccgccatacataataaaagaaagtttctcatataatcattgctttttcctaatcagttgtataactttcttttaggcgcggatttcgcggattatacggattttccttatcctttccgcgaaatccgcgtaatccgcgcccaaaagaaaaaggtgacaagtgacattatcctgccactttatcaccttctcaattatccttaaatttatttcggttgctttccgatataagccaagatacctccgtctacatagaggatgtgaccgtttaccgcattagaggcttccgatgccaggaacactgccggaccggtaagttcttccggagccagccagcggcctgccggagtcttggcgcagatgaacgagtcgaacgggtgacggctaccgtcggcctgcttttcacgcagcggagcagtctgcggggtagcgatgtaacccggaccgataccgttacattggatgttatattcaccatattcagagcagatgttgcgagtcagcatcttcaagccacccttggcagcggcataggccgacacagtctcacgacccagttcggacatcatagagcagatattgataattttaccgtggcccttcttcatcatggcaggcagaacagcctttgatacgatgaacggagcattgaggtcgatatcgattacacgacggaagtcagcagcctccatctcgtgcataggaacacggcggatgatgccggcattgtttacgaggatatcaacagagcctacttccttttcaatctgggctaccatggcctgaacagcaggttcatctgtcacatcacatacataaccgcgtgccttgatacccttttcagtataggcagccaagcctttgtctaccaactcctggttgatatcgttgaaacagatagttgctccttgctctgcaaaagctgaagcgatagcaaaaccgataccataagaagcacctgtaacaagggctactttaccttccaaagaaaaattcaaatacggattcataacgttaaattattaagtttaaataagtgatattctatttatgtacgatttgcaagtagtttatactcaatggaaactttattttgggagaatgccttccctataaggaaatcgcagcgaatgcttttcatatcgtagcttttcacataatcgggatgctcagcatagcgaatttcatagttcgttttcatgattgcactacatttaataggttataacttcagccatcaaatacacatcgtttgcgtacacgatgcaaatgtaacaaaagaaaatggagaaaccgtataaatttgtgtcaattatatagcaatatcgttcaaagattcgtaaaaagaaaaaatctatacctatagtgccaacaagagggggaaagaataacaaaaaaacccactaaaacttgcgattttagtgggtttttagctgcaattagctgtatcgtagttggactaccaggattcgaacctggacaaacagaaccaaaacctgttgtgctaccattacaccatagtccaaacatagggctttctgttaaaaagcggtgcaaagataaaaggaagccccgaaatatccaaatatttcggggctatttttactgccgaagcatcatttccttaattacttctctttaggctaccgttatttggcgataatcagatagtaattcttcttgccgcgctgtaccagcaggtatttttcgtccagcaggtcggctgtcgtaatcacctggtcgaaagcagccagtttctccttattcagagaaacgccaccgccttgcaccagcttacgcatctcgcccttggaagcgaatacagcagcattatccacgaacaaatccaccgccttcacaccggcagccagtgcatcacgggatatttcgaactggggaacaccctcgaacacagccagcagcgtatcttcgtccaacttcttcagtgcatcggaagttgcattgccaaacaagatgttggatgcatccacagcagcgttatagtcctcttcggaatgaaccatgatagtcacttccttggccaggcacttctgaaggacgcgcaaatggggagcagcctcgtgctcggccgtcagagcatcaatctcctccttggacagtgcagtgaatatctttatgtagcgtttggcatcctcgtcgctcacgttcagccagaactggtagaacttatatggagaagtgtagcgcgggtcgagccagatgtttccggactctgtcttgccgaacttgccaccgtcggccttcgtaatcagcgggctggtcagtgcaaatacctccccaccgttcgtacggcgaatcagttcggcaccggtggtgatgttaccccactggtcgctgccacccatctggagcttgcagcctttggtttcatacagatgaagaaagtcgtacccctgcaacagctggtaggtgaattccgtgaaggaaagaccgtcacgtgcctcaccgttcagacgcttctttacagaatctttcgccatcatatagttcacggtgatgtgcttacccacttcacgggcaaaatcgaggaaagtgaagttcttcatccaatcgtagttgttcaccaactcggcacggttgggggcatccgaatcaaaatccaggaacttggagagctgggccttcataccggccaggttgcgctgcaacgtctcttccgtaagcagattgcgttcggcagactttccggaagggtcaccaatcatacccgtagcaccgccaatcagtgccaacggcttgtgtccgcaacgctggaagtgacgcaaaatcatcacactgcaaaggtgcccgatgtgcaaagagtccgcagtagggtcgaaaccaatgtatgcagtcacttgttccttagccagaagttcttccgtacccggcatcatatcgtggagcatgccacgccatcttaattcttctacaaaattcatcgaatgattaagttatctgattaattatttaagtgattatctatgaattgtttgattcctattttaatctgcgcaaaaatacgactctttattcgaagaaacaactcttagggtttaaaaaagactttgcagacatttctccggagtgtttctccaagctcctcgggagagatgccgcgcacttcggcagcgcgtgcatacaattccccgatggaaacttcgctttcatccgtttcgatgaacagccggtcggcaggtacccggcacaaggctgcttcctggtatttctccccgaatgaaaggtaaaagccatgtttcagatattcctccaccagcgccgccttgccacggaaaccatgtattatccacggattcgacgggcgcaagtcccgcttcaccttcagcagttcatcaaccgccttcaccagatgaatcaccagcggctttcccacttcctctgccaaacatgcctggcacctgaacacttccacctgcaaatccatcggagcatctgccagcttgtccagcccggcttcgcccacggcaagtacttggggatggcgcactaactcctccaggccgcacaccctgctagccacagcaccttcaactcctgagtgttcacctccactccgacctatatgccagggatgtatccccaccgaataccatccgccgctctgtggagagaacgtttcgggatagcaatttgcaatggcagttccgggtacttgcggaagccagtgtgtatgtatgtcaactggaatattcatggaacgggatcatatccggaacctccccagggatggcagcgcagaatgcgcctgactgccagacaaaaccccttgaaaggtccgtgtttcttgatggcctccaccgcatattgcgaacaagtgggggtaaaacggcatgaaggccctatcatgggcgatatgcacttctgatagaaatagatgggaagcagcagcagatatgaaagcagacgcttcatgacacctgcggagtttgctcagcttcagcatttgccgctaccttctcggcaatgcgtgccaaagctgtcttcatacggtcctcaatgacagaagagtctaccaactggtccgaaagatagatgaaggccacggccagacggcactttttttccgtcagcacggccagcagtccgtgtttgttcatgcggtaggcttcacgtatctggcgtttcacgcggttgcgcttcaccgcccgcttgaaacggcgtttcgaaacacttacaagaatggaaacgggtgcctccagctcctccaccggcagatacaccacacgcaaagggaaaaccgaaaacgagcgtgagccgcccgcaaacatcttctctatcactttcttcttgtccaaccgttcggacttacgcaaggtatttggcatggggtgatgagttataagttatgagtgatgagtgatgggtgatgagttatgagttatgagtgataagttatggggcgatacaaaaacgagctacaagtacctggcgacataaaagcacaaccacttgtagctcaattttataaatccattgttatgcctacaagctataagcaaatcactcataacttataactcataactctttttactttcctttattattctccttgataaacatgtcaagcgccgccgtcattgagggtgcctgcacgctgggagcttccagatcaagacgaagtccggcatcacggactgcctgggcagtggtagagccgaatgttccgatcttgatttccttctggtcaaaatcagggaaattcttcttcaaggcactgatgcctgccggactgaagaacaccagcatgtcataatcaaaagcctcatctgcagcaaagtcattgctgacagtacggtacatgacagcttccgtgtgctgaatcttattcttatccagcagattcttcacgtcatcattgtgtacatccgacattggtaccaagtacttttcagtcttatgcttaacaatggaaggtatcaaatcgtcaatcttcccggtgtttccgaagaaaatcttacgcttacgatactgcacatacttttggatatacagagcaacggcctccgtcacgcagaaatacttcattgtttcgggaattgtcacacgcaattctgtacacaagtggaagaaatgatcaatagcatgacgcgaagtaaaaataacggcagtatgatccaataccgaaattttctgttgtctgaactctttcgctgaaaggctctccactttgataaatgggcgaaaatctattttcacaccatacttctcggcgatgtcgtagtaaggagatttctctgatgccggtttcggctgcgacacaagtactttcttaattttcaacgtcctaaaattttattatcaaataactgtttagctgcatcacaccttgatataacacaaaacaaggcatgatttcaagggcacaaaagtacacaattaaaagcaaaccgccatataaattgttacaaaaaagctttaaccacttgtataacatcaatattttagcaaaaaaggctaaaatcaatccgattattatcgtcagctgcaaactcaaatcaaaatagactacgaacagggcaaacgggaaaagggcgaatcccaagtaataaagtagcgtagaataggactcaagccatagcgttgtaacactttcgtcaaaaaaaatccaacccagaaaagagtagagcatccacttcaagcacaaatagaagagacacacaccgatgtaaatccccagcagaagccccggcgacacatgacgtaccagttccggctgtatatcattgaagtagctgaagatacagacacccgcaaggatgcaagtctgcaggatgagcagcagcaaatagcgcatatcggcggctgtggaagtggcaaatatgctggtacgttcgcgatgaagcaggaaatccttcaccagttgcagcaggaacttgcggctgcgtgacaagacataggccgacagaaagaaacagcacaaaaggaccacggtgatgccatcgtccattctcggagaatatggaataggaatcccctccatccccactactgcccaagccatcaacagccctatcatattgcagcgaatttacggatggaggcgtcccacaagggagtggtatatatcagttccacggcttcctgcggtgtctgcgccacatgccagatggcaccgtgctgcgtacgcatgaagttttcgtccaccgcctgccggagcatatcgagcagagggtcgaaatagttcttgacattcagtatcacaatcgggttcagatacagtccgagttgcttccaagtgatgatttccagcagttcttccagggtgccgcaaccaccgggcagggcaatgatggcattgctcaagtcggccattgtctttttccgttcgtgcatgctttccacttccacgagttgggtaagtccggtgtgatgccatccctgctccaccatgaagcggggaatgacgcccgtcacctctccccctgcccggagtgccgcatcggacacagcggacatcagtcccatatttcccgcaccattaatcaggcgaatttgccgctgccccagcaaagcgcccagctcacgggctgcatcgaaataaacggaatctatctttgtgctcgaagcacaatatacgcatacggaatttatcttgttcatcatcttgccacacccttttttaggtatcgccacaaaggtacatgatttcggggagatttgaaacaagagagtcttatttccaaagttcttccggatttgtggtgcggacgctgttctcgaacagccattgggtgccaccgctccgaacggtaaatccgacgggaataggtgcaagtctccggtcacccggcaaggggtcgcctgtttcatcgtccatgcggctcagttcatgcatgctgtaccaatagttatttttggccatatacgtgtcatagtattgcccttcatttgcttttctgtttatagccttacacagaccgttcgataggaaaaaatacgaaaaagctcttccttctcactcatatctgtcaattttccataaatttgcaatggacctaaaacatcatgatgtgaaatacaaacgttggatttacttaaccgtcactttcgtcatcatattggcaggacttgcttcccggaagtatggcaatgcattgcctaaatttattgcagagtatattggcgatacactttgggcagctatggtttattggggattacgctttctcttcccttcggcatccatactcaaagtgaccgcaatctccttactgttttcttattgcatagaaatcagccaattataccaggtcgattgggcgaatgccatacgaaacaccacgctcggagcattggtcttcgggcatggatttttatggtcggatatgatatgttatactgtcggggtaatgttatctgccaccgtagattcttgcgcttccttttcttcttcggatgaagcagtataaaaacaagacgcggacaaaggaacacagattctatgcaagccgctattatccccgccaaaagcattcgtaggacacatttcacgaggctacaccttttactccggatggctacaccctttctatgcgatggtatagccatctgcaaaaaagggtgtagcccggcacggaggatagttacaacattagaaatggtatgactgttatatgacaaaaaaatatcctaacatgcaagatatgggatatctgatgttaggataacgataaaaatagtcaattcatatcaaggcaagacggcctaattatcaatacaaaagagactgcgtttgtttatgataaactgcatttttcttttgaagatttacggctattgacaagagaagctactaaataaaagatattaatgattacatagcatagaaaaaacttccacactttaatcgtttcttttagccactcctcaacccataagatatcaatcttatccccacatcgattttcaatctcatatttataactaatttcacaattaataattgcgtatataattaataatgaaagaattattgatgtggcaacaaacacaattctaagccatttcataatctatcttgttttataaactacacctcctggtttggatattctcactaaatgattctgcattgatattggaagaacaaatctgttgacaataggaatagtagtccatgttcccaaattacttgtttgttgtagccttgtccctttcagagcatttgacccacttttattcaacacgtcatataccattgttgtacaattattacttgtcagcttatattcatcaataatacgagcagaagaactgttataataatcacttttaggattatctggcattgtagttgacatattaaacttttcgtctaaaatattagcaactttttcatctgccacatctgttactacaaatacagacattccaccagctgctttttttgtcattgtaagcttttgcttcatcccccattaactttaaaagaacaccggaaccatttcctaaagaattagagcttctatctggccctttattagttccattgtatcgtccgtagctataaacagtcatattagatccttcaccaacactaatccatgtgtgaccaaaggactgagtttcagtgcaaattctaatactatctccattcacatcaatattaacaaccggactattcgccccgtactgatacggagacatcgaataatacttctcggcaaatctgtcattagtcgtaaaccttcctaacgccgtatcataatgtctcgccccataatcataccaattcaaacccttcttattgtcaaactccttgccgttatacttgtaaggctgggtattgcctgtagtgccaaaaacaccgccgaaaggatagtaatgattcgtctcctctacagtacctgactggttgattactacacggttgttgccttgatggtccttcagatagtaatgatactgctgggtaccggccaggttgatgtaaccctcttctgtgagtaacaacttctgagtaccgttttcatagatcacattaccgcaatagtcagtcgttgtggttgtactacctatcttatggactgttctcagtttcgtgccgtcagcaccataagtataggtaatcgtgctaccatcactgaacgataccgtactgggcaaatttaatacattatattgaatatcggcaattcccttattcaaatctttcgttaaattaccattgacatcgtaggcatactcccctgcggcgcttgcaccgttcacaaaggcagtgtttgtaccgtatgcagcggtactcaccgcatcctccacacagctcaactgattaccggtcaatgtgtaagtcaggttatcaagcaggccgtaggcactggcaccagtctggccataacgttgcaaactcttgatgttaccgttcttgtcataacccgtaacgttctctgagaagcgattcgcatttgtgctgatacttgctgtctcgccataggtagcgttcagcatccggtcaagaccgtcataagtgaatttgtaaccacggactgtactttcgttcccggacttccaggtcatgctgctgatgctgccgttgtacttcgcagtacccacacccgtgttgtagtacaggttctgcgtgaagcgtgtgccgctgattcccgtcagccagctacgcaggttgtaggtataagtcagcttgttggtgctcgtaccgtgatactgcttggtcagtaaacgaccgaagttgtcataagtcgcatcgtacagagtaatcgcagtactgccaagactatgctgcactttgcttattctgtccgcatggtcgtaggtataggtatatacttccgtgcgcgtggtctttccgctgg

SEQ ID NO: 4458 - DNA, 4132 bp, Unknown
  gut microbiota DNA sequence
ccagacggcttgttggagaaagtataaaccgtacttgtgatgtcgtaaccactgagcaagttgttctgcacaagcacggtaggactggaagaaggattcccccctgcagggtcagccgtcccagactgtcgtacaaataatacatataggaaatgttatccagataggaagtgcccgtgctgttaagcatccggagagtacggatgtagtcctgcatgacctacatcatttgatagacctaaaaaactatcctaacatacaagatatagcatatctgatgttaggatagtaattaaataaatctcattgaaaaaaggcaacttatattagagtaatattttttatttagtatgcaaaagctttataatctcaccattactttttcttatttccacataagattgtccacagaaagtcagcgcactatcatttccattaggaatatgcccttctattacccatattccatttaccaagttaacagaaaaaggtttttctttctctatactttcctttccataaatttccaatagtacgcattccgctatctttactgcaatatccgctgtaggtataaatccctctgcaggaacatagcttttcatatcagtataaaaatctgttgagagactatcattcattacatactcaatctgttgagatgattgttgatcttctccgaccttcgatgtactgtttgtacatgacatcgcaaatagcattaaagcaaaaaaataagtcctatacatattgctatctttttaaaatacccaatgaatatgttctctctggctaacaggaatgtttaaatctggcttttgtagcaattctttcattctttgtttacccttttcagcaggaatatctttcggattaatattattctttcgtttaggatctttgggatcactaggaagatcactagtcactattgatgttttcttactataaggattatattctaacaaatcgccactcggcgtagccaaataaccattttcttttgttttctcaatatattttatatcagcttttgagaatttattatttatatgctctgcgtccgcgtctccatgcgaatgaatcgatcctacaaatctctcaccgttaggaggtaagcttatagatacgctgtgctctccttcattggctgcactataagaatatccctttagctttcccttttgcttaacttcataaatagaagagcccatttcacgtttacgtataatagatgcaccattataatacataccccaatctttagctgctgctcttttagtcttaaacagatcaccaggagcatattccataccatttgggtctatgaactttaccggattatcggcacaataagtatacggactcatcgaataatatttctctgccaacgggtcattcgtcgtaaaccttcccaacgcagcatcataatgtctcgccccataatcataccagttcaaaccctgcttcgtatcaagctccttaccgttatacttgtaaggctgggtattgcctgtagtgccaaacacaccaccgaaagggtagtaatggttcgtttcctccacagtaccagactggttgatcactacacggttgttaccctgatgatctttcaagtagtaatgatactgctgggtaccggtcaggttgatgtaaccctcttctgtgagtaacaacttctgagtaccgttttcatagatcacattaccgcaatagtcagtcgttgtggttgtactacctatcttatggactgttctcagtttcgtgccgtcagcaccataagtataggtaatcgtgctaccatcactgaacgataccgtactcggcaaatttaatacattatattgaatatcggtaattcccttattcaaatctttcgttaaattaccattgacatcgtaggcatactcccctgcagcgcttgcaccgttcacaaaggcagtgtttgtaccgtatgccgcggtactcacggcatcctccacacggctcaactgattgccgttcagggtgaaagtcagattatcaagcaggccgtaggcactggcaccagtctggccataacgctgcaatcccttgatattgccgttcttgtcataccccgtaacgttctccgaaaagcggttggcgttcgtgctgatgcctgctgtctcgccataagtagcattcagcagacggtccagtccgtcataagtggacttgtagccgcggacggtgcttgccgttcctgccttccacgtcatgctgctgatgctgccgttatacttggcaggcccgttgccggtgttataatacagattctgcgtgaacttcgttccgctgatgcccgtcagccagccgcgtacattataggcgtaagcctgcctgtccgcgtcggagccgtgcagcgacttcgattgcagacgaccaaggttatcataagcataggcagcaagcgtcaccttcgcccctcccaatgtatgctccaccttggagagcctgtctgcatggtcatagctgtaagtgtatgcttccgtccggctgtccttcccgcttgccgtgtgcgtatgcgtcaccgtggcaggcttgtccgtaaaggtatagaccgtggatgtcacgtcgtaccggtaacggaaagcgtaccgctccaagtcagcatgctcctatatgaaattccctgcttacatccaacataagcagggaattgtttagattatagaatcagagattcttaatatatcaatattcgagccaaaaataatcaggtgtacgtaaagtatcccacaacaaaataccaccgttggagctacatgaaattacaatattgggaatattatcaatccggtatcggaacgtactatctatgaccctttttccacaatataataccgtatccagagatgtgacacgtatctttatttttaaactatcatatccgcttttatcgaaacgggtgatttccattccaagccaatcttcatggtagtccaatatttggtcatccgtcttgttcacatacagtccattaaaaacaaggctgtcattcacccaacattggatataatctttaccggtacgctccttaaaaccagtacctactcgaatcatgaaatcattctctgagtccaaatgaccaatgcacgccaccagcatggcaagtatgattataaaaataaatatacgtgtcttcatattactgccttcttttaagtttttgcctccagttaggaatatgcctattcaacttgttatggatataattatctcggactgtttgtatctgagaacggtttaactgagttgctttaagataatctccatcaaaatcttgaataacttttttctgtgtcatcaagttttccacattcattgtatgccccaatcctcctgaatgaccaagttcgtgagcaaaagtccggttatcatcattgttcaacatattagaaaccgctttcgttcctattttcacatccagactatttttataagtctcagccataactacacttttatccgtttttgtcaacatatcttgatcaacaatctgcaaaacgtgttcagtgtcctttatatcatccaccgagttgacagttctcaattgcatatccatagtcgaaacaaagtcatcacctgaaatcgtatatgcggcattcacttgctctactatttgtccagccaaagtctttatatcaagctccttattattagaattatttatcaaagccgctcttaccgtaattttatattctatcttatccgtttcacgattataatgggtttgcacgcgccaatcatttccatccggatcaatgcgaccgacaggctcatttccacaatagacataaggagatactttaaaatgtttgtcatataaagcatcaaccgttataaaccttcccaacaccgcatcataatgcctcgccccataatcataccaattcaaacccttcttcgtatcaagctccttaccgttgtacttgtaaggctgaacattgcctgcacttgcaaataccccgccgaaaggatagtaatggctcgtctcttctaccgtgccgctctggctgatgactacccggttattcccctgatggtctttcaagtagtagtgatacttgctgtcgctcaaagtaatataaccctcttcggtaagaagcag

SEQ ID NO: 4459 - DNA, 1538 bp, Unknown
  gut microbiota DNA sequence
ttccgttacttcgcaggtaacggaggaattttccgtgcaaacataattgtttttctataaatgagcaaataataatgctgtttttttataattaatcgaaaaatctgcatttaagcgcacttttttgttaatgggattgttgttcgccccaattattagtgtatttgcacgtatgttctgcattataaagggattgtacttatacatattattaataagagaatgtataatttaaattgaagatgaaagagattaccttacaagaaatgctgtcaactattattggagagcttcgagaaaatgggagatggggaacagcccatatttaccaatctacattgaatgtgttttccgcattcaataactatcgggatttgcatctgcgcaaattgaatccagtggttttgaaacgttttgaaatgcacctgcgtcaacgagattgcagttggaacaccgtttctacctatatgaaagtcattcgctcggcttacaatcgagctgtagatttacgatgtgtccgttatactcctagattatttgaacatgtgtatacaggaactaaagcagacaagaaaagagctttggaagcttcggatataggaactttagttcgcgggacagaaatggatttgtccaaaaggattccttcctcaagccttcaaaaggccaaaatgctatttgtttttatgtttatgatgcgtggtctcccatttgtcgatttagctttcttgcacaagaaagacctgcaagggaatgtattgtcctatcgtagaagaaagactggtcgcaccttacgggtacttctatcccctgaagccttacagctggtacacatggtatccaataaggacgagaactcaccttatttattcccaatattacgtagcaaggatggtacagaagcggcttataaagagtatcaatcagctttgaggcgttttaactatcagctgtcagctttaaaaacacatttgaatatgagttcacatcttagttcgtattcggcaagacacacgtgggccacaatggcatattattgtgagattcaccctggcattatttccgaagcgatgggacattcatcgataaatgttactgaaacctatctcaaacctttcaacgacaagaagattgatgaagcaaatgagaaggtaatttcttttgtaaaaagcaatggaatctcggcatagatttttttatttttattgataaagcggcctagatgtgtccatatttattcctcccgcaagaagcatctcttgaagggaagagtcctctcgctcatttctcaacaacttccccttaagccaaaactctacaaaataacactttaagtctttctttccctataaatattttgatttccctttatcgtaactttacctctcggtcatattatcagaattccacctataagccacttttcatctttcatcacttaaaatgttataaacaattataggggcattacaactatattaaacttcttttcacataattgattcaagatggttcccgttacctgcgaagtaacggaa

SEQ ID NO: 4460 - DNA, 913 bp, Unknown
  gut microbiota DNA sequence
aagaaaaagcgtctagctaaatcaggaaaagacacagactcattgggagttatccttttctatcctaaatgctaatctttccactgccgtattcttttctttccacagctgtggaaagaaaagaatacggcagtggaaagaaagtaaaatccttgtggcaagaaaaataattagtacctttactgccagcttctgccgatttcgagaacatttcttccccaagtttgctgcaagtttccctcaattctctataaaccattaatttaaattattttatgagtgcttattatgacctttatgaaacgcctgtccccgaaggcgaggaaccgaagtcgctgcatgcccgtgtctgttccaagggaaccatttctggtaaagagttcatggaacgggtttttcgtgaagaacatatgccccacgccatggttgtgggtattgtgcaagccatcaccactacgcttggagactggctggcaaagggctatacggtggagatagagggacttggcttcttcagcaccacgctgaagtgtacccatccggtgatgaataagaaagaagtacgtgcggagtcggtcaagatgtccacggtgaaattccgtcccggcatcgaattcaaacgttatgtggcaggtaagatggagttggaacgtgcggataaacgctttttcccggataaaccgaaagcaatgggcgacatggttgcccgtgaaaaaagcatgatggactttctggaagctaatgtctgtattactcgtgcagaatattcccgccttgtccatgtcaccgcccgccgggcttcgagggatttgcagacatttatcgattccggcgtgattcgcaagcgtggtgccggccgttcagtggtctatgtcaaggggtgaacttagtatattccgatgcgcgcgcgtat

SEQ ID NO: 4461 - DNA, 5060 bp, Unknown
  gut microbiota DNA sequence
tactaacaaaaaaataaaattatcgcagattggacaaaggtttctttgctactttctttgtccgccatcatgctcaccgaaagaaagtagggcggctttcgccgccgccactcaaaaacgggtgtaaagtcccgttaccatcgtgaacatttcttccagcatatcgcagtatatgccctcgtgcgttgctatgtccttcgtcttgcactcaaatgtctttttactgaacgtcttgcggtagaaacgcatattgtagaggtctaatcctgcatcgtagatgatgtcaaggcggtttgcgctcgtcttgttcctcgcaaggctcatgcgtaagccgttgcccatgtctataaagtccttgcttcccgtcatggcggcaaagcgtctgccgcctatctgctgtaaaatagtctttgctatcatgcttttcttggttttaggttggcggtgcggacaccgccaacttgtttaacattctgttatctcggcaatggatgtgtttcgtttcaaccattccatcagacactccatattgtactcgcttgtgatgactgccgtatggctgtcaatggcggtgaacctgctgctctcgtagtcatctatccacccttttagggtatcaactccccacgcttcggcatcatcaaagatgccgtccaatactttgataggctcgctgaatttcactatcagcgtttgataggctgcgttcatcggttgtcctcctttccttcctttgcggtgagccacttgtcccgtgcggctcggcactcgtccaacgtgggtttgacacaagagaacaactctccgtccgtgtagcggtagtcgtactgcacaagtgtccgcttgcatctgccgatacctaattggaaacgctcgtatttctccgtacctgcttccgtgcaggtgcttattccgttgattgtcattcgtgtagccataatcgttgattttagggtggttaaaaatgtactgacaaaactctgttgcgcatcaccatttcggggtcgcttgtatagcgttggtgcaggtagaaatggtgggagccgaagccgtaaaggaaaaacctgtcaagtccgtgcttctcggcaaagtcctttacactccgtcttaactgttcctcactcgttgtcagagtaaggaggttcacaaattcaaggaacatcgtggggattttatcgtcccacagacaaaccatgctttcaattcttacttccatactattgggtattataggttgatactatgccgcttccatccgctggcggataaggttcacgttgctgttcacaaggtttacaatgcggtcgtggtactcggtattggaattgtgcaagccacgactttgcaccacctccaatgtcttcaaggaaacctccaccgtttctatgcgcttgccgtcaatggtggcggataggataagggagtttttttcaaggaaataggagttggaaaacacgcaatggtgcagttccgtcccttccgctgcaaactccgcaacgctctccaacacacgcacctgcaaagtgccgtccgtaaaggcaatgccgaagaatatgcctttgagtttgcggtatgccttctcgtgcttcttcgcttggcggatgcgttcctccaactttttgcgctctatctccttgttgcgcttgtgcataagtctgtcgtgttcggctttgaggtcggaggggcagacgtacttcgggctgttcgtgtccttgccgaaatgccgcaggaggtctatggtgtcacgccacatggagccgtcagcaatggtgtagccgttgcggatacatatcttcacggatgcccaatacctttctatgtcaaaagaactgcggatatagtggcgcaacatagggtattgccctgctttcaacagcgtttcggctcggctgtcggaaaggatagccgtgaaaaggtcgtaaggcagtatgttgtggtattcgccattgaagccgttgcgtttcagttcgggaatgaaacgctgtcggggataggtgcagacggggtttatatcgtatgcacgtagtttgttgttcttgcgtacctccatgtcgctgtattccgcccataggtcatagtaaagtatggacattccacgcagtcgggcaacggtggtagttgtaccttttggcgaaatccacctttgcaccacttcataaatggaatactcggctgcctgtcctgccttgtatcgggacttgacgaagaagaagcgtatcacttggtactgcttgcaggtggtgacgatggagaaatactcgttctcgctgaacacgctctttcgggtgcgcaacgcttccaactccatgccgcaatgcgggcatgtgcatccgcaaacggtgtccgcaaggtcgtgttcacttttccacgaatgtccgcactcggtgcagatgttcgtgccgtccgccctcttgatggcgtaatgcttgaagcaatggcggaaagcgtatgccctctgtgtggcggtcaatttcggcagtcgctcgctcaaccgtgcgacttcctgctgtatgggtgttctcggtttcataatcagaaattgaataggttgggttgttgtacttcttgtgcggtcgctttggtggtggttctcggcttgctgcggttctgcaacttgcggagttcctcctcttggtatctgcggagtgcgttctgccgtgcttccgccttttcctctgccgtgagttccacaacgtggttcaccgccacttggcattggataggcttgcccacctctatctcgttctcgtcatagtagtggacggcttgcccgaatatctccccgtccgtgaagccgttgcaaccgctccgctgcacgtagttgaggatgtaggtgacgcaatcgtctatgttcttggcagggttgcggtagttcctcgcaaagagtgtatcttccgctgcacgctgctccagatacatctgtatcgttctcttgaaatgttctgttcctttcatatcgctgtcgtttttatcagttatacatttttccgtttcccaaaaactcgtagtcgttggctgcgcaactctcctcgaaactctcctcgctgcactggtattccatatcgtcacggcacgacttgaagaagctgtcaaggcacttgtccatgaggtcgtacagagtggttcgggtgtcgggtgctttcagaaagtcgtagatgggtcgcaggatgtcctcgtctgcgcaatagcctgtcagtacgcaacagttgtccgtgaataccctgcttttgcgtcttttattgtagttgcctttgaggtagtaggctttcggcttgaatagggtatgccaatagttattgacgatgtatttcagaagccgtatgccgctgagttcctcttcctctccgctgtaatgtgaggtgaagcggtaggaataacggcacgtgtcgtaactccaatcgttcactttgaccttgaacacactttcaaatgcttccagcgtgttgcggttgtcgctgtcccacccgtattcaaaggtgcgcagccattcgttgtatgcggtttctctcgctgctgcgcagagttcggctaattggaaaaggtagtatgtccttgttatcgttctcatatcgctgtcgttttagatggtctgtttcagtatctctctccaataggtcggctccacctcgctcaaaaggaagtcggtgaagtccctccgtgcgtccttgttcagttctcggtagagttcacggaacacggatatgttgccgttgatgtacgtttccaccatgtacacgaagatgttgtccacctcgtagtatctgcactgttgcgctgccgttttgctgcttctctttgccatgtcggtaagggttaaagggtgaataaccaaaggatgaagccgaagaaggcggttgcggaaaggatagccacgattacgcctatcgccactcggaacactccgtttacaatctctctaatgatgccccaaaggatgctgaacaccccgaaagcggtgcgcaccattaagccgcatatcgcaagtcctatgtactgcgccatttgtctgaaatttgccgttgccgtcatatcttcgctgttttgattttttttaatgcggattcaagagctgagggagttgagtttcaaactatcttatctgcctctcgtttatccgacattttttttatgcgtctttctgtcgcatcggtcgttttcgtttcgggtgcttgaaaaggtagggattaggggatgcaaggtttttcgggaaaaatactacccgcagggctggagattttttccgaaaacaggaggcttgaccttgcattcccgtccaatcccggaattacctttgcgcccagaacggaaatgactgcctgatgcgctccctgaaaggcgcgaaaatggaggtaaacggaagtggaggcagattagacaggaaaacttcaaaagagaaatccgtaaaaaagggaaaacgccaaaaggaaaaggaacatcagccggaagcgtgaaaccgggcaaaccatcggcaaggaagtatgattttgtctgtctggccgagcgtgtccggtcggacggataaaatcattcttcccggtttgcctgccgtgtgtgacggcttgttccatttatggatcgggcggtcagacacggctttccgcttacggcacaaaggaacagcgaaaaaagaaatcgtctgcgaacccgtaaaagcacctcattggcataagcacaaaagaaattggccttgcatcatcagtctaaactgttgtttaggcgtgaggcaaagcccttttctccgcttatgcggcagtcggcatacgttcgtccaaaatccttttgggcgatggtgtgccgacggataaaaccgcttttacggaaaaacttgtatgagaagaaaaaaattagggagattcatttcaaaatctcccgttttattgttacttttgcatacgaagagttctttgaaggttacgcaacgcacagaaggatgatgcagtagataactaactaaatcgtaacctattactatcatgagcaattaacctacgctcagttccaataaattacactcttttcgtaacttctcggcactaaaaacaaaaggttgaatgattatt

SEQ ID NO: 4462 - DNA, 4264 bp, Unknown
  gut microbiota DNA sequence
gaagcgaggattatcgaaagcccgaataaggcgatgggataatgcattgccactgcaaagcaagtgcatgctttttgcagtgctactgcattcagctttgcagtggcgctgcaacacatatgcagtgtcactgcagcatatatgcagtagcgctgcaacacgtttgcagtcacactgcagcagatgtgcagcgacgctgacccggtaggtgtgtacgggattgtatcatgtttcgttaagaagatattataaagtatcctttgaatgtcgtatttttgtctatccgtaatttagagtagtcaaagaaagctatgaaacacactcgtatgaaactaaaaacagtggtaaagaaccttcatgaaggctggaaattccggcaggcgagactgaccaattggtatccggctacagttccgggagtagtccacacggacttactgcagaacaagattattgaagacccgtttttccggttgaacgaacggggattacaatggattgacaaggaagactgggtttatgaaacttgctttactcttgctgccgacatgatgcggaaagagaatatggagcttgtgttcgaggggctggatacttacgctgacgtttatttgaatgatgaatgtatactgaaagcggacaatatgtttcgctgctggtctatccccgttaggcagtacatcagggaggagaataatatactgaaggtgtacttccattcgccggtaaagatagacgtccccaaatgggatgcacttccctaccagtatccggcatccaatgaccagtctgaaaacgggggcttgttcaacaagaagataagcatttttgcccgtaaggcgggttatcattatggctgggattggggcccacgtctggttacctccggcatctggcgtccggtgtatatcagggcttggagcgatttgagaatcaacgatgtgtttatcgagcagaaggaagtcggtgcaggcagggccgtgattgccggacatgtggagctggatgccgataaggatatgaatggagtgttggtcacgataacggatgaggttactggaagagtgcttggcgagtggcaagcggatttgaagcgaggcaccaatcgggtgaccgttgattttgtccttcacaagccgaagctgtggtggagtaatggactgggggagccttttctttatcgtttccgtacggatatcattgcaggtggggaattgttggactctaaaaccgaaagggtgggcatacgctctttgaaggtggtgcatcagccggataaggacgggcatactttctatatagagctgaacgggcatccggtttttgccaaaggagccaattacatcccttcggataacttcctgccgcgcgtcactcccgagaattataaaaggacgattctcgatgccgccggtgtaaacatgaatatgttgcgcgtctggggtggaggtatctatgagaacgatgtcttctatgatttgtgtgatgagcatggaattatgatttggcaggactttatgtttgcctgcagcatgtatccagcagaaggcgccctgctcgataatatccatcaggaggcggtggacaatgtgaaacgtttgcgcaatcatgcttgcattgctttgtggtgtggaaataatgaatgccaggatgcctggctgggctggggctggaagcgtgagatagaacggcagaacaaggaatatgccgacaagatttgggcacagtaccggcagcagtatcatgtcaccttacccggggtggtcagggagtatgcacccggaaccttctattggccttcttctccgttcgcattcgagggagagatgtccggtactactgacggggaccgtcactattggagtgtctggcatggtaaagcacccatttctgattatgacagcgagaaatcccgctttttcagcgagtacggctttcagtcttttccagagttcgactccgtcaagcgctatgctccttaccccgaagactgggatatacgttccgaggtgatgatgtcccatcagcgtggtggcgaccatgccaacgggctgattgagacttacctgttgaatgaatataaaaaaccgcgtgatttccgggcattcctttatataaaccatgtgctgcagggagatgccatcaagacggccatcgagtcgcaccgccgccagatgccgtataatatggggacgcttttctggcagcacaacgactgttggcccgtagcttcctgggcgagccgtgactattacggacgctggaaggcgcagcactattatactcgcaaggcctatgatgacatcctgatttctccggtagtggaggggggtgatttgaaagtatatgcagtgtccgaccgcttggagaatacttccggccggctgcagctccaggtctgccggttcgacggaaccgtggtttatcactgggacaagtctgtcggcatttccggtaatgacagccgtgtctgtttttccgcaccgtttgccaagctgctggagggggcagatagaggaacggtatatgtccgcgtagactatacggacaaatcgggcagggtgtaccataacaactactgtctgggcaagcagaaggatatggattatccgaaggtggatttgcagactgaagtccattccattgaaggtggatatgaagtgatggtttcgtcagacaagtttgcccgtgccgtatgcttgtccgttgccgacaatgaaagtgtgtatagcgacaattattttgatgtccagccgaagagcagcgtgcaggtgcaggtcaggacgcgattgtctgccgaagcgttcaacggttcgttgaggctgacttgcctgaacaatgaattctgatactcgccatctggacgttggcatgcttcttccgtccggatgttttttacataaagataatatgctgcttcagtatagctgatatttgtgtcctcagctgattggcattgataggtttagccatatatgcgtcgaagccgttttccatgacctgctgttcatcagaagcataggcaaaggcggtgacggctatgatggggacttgtgtagagtatttgcgtatttccctggtcgcttcgtaaccattcatcaccggcatgttgatgtccatcaaaataagctgcgggtcgtattccctgaacatattcacggcttcctgaccattccacgcatgtatcagattgtagtcttttcgtaggatggactcaatcaaccggaagttgctgtcatggtcttcggcaaccaagacggtgattttctgcttttttacttttataggttcggtcttgctttctgcctgccggatgcggcttgccggcacataggggagggtgaaccagaaggtagagccttcgccgggcttggaagtcagtccgatattgcctcccatgtgctgtaccaacatctggcagatggataatcccagtccggtgccttgggcaaaattgttgagcttgacaaagcggccgaatatgctctcttgtttgccttcggggataccgcatcccgtatcggatacgtagaaataaagcatcttgtcgtcttgcagcttgtagccaaaacggatactgccttcttgggtaaacttgatggcattggtcaccagattgatgacgagttgagacaagcggttacgctcggaatgaatgtggcattcgggcagtccgggctcaaaggagagggtgacattcttttcgggcgatagcttcaggcagagcgaactttccagctctctcatcactttgttcaattcaaaatccgtatcaatgaattccattgtgcctgcttctatctttgacaagtccagaatgtcactgatgagttgcagcagcaaagtattgttgttctcaatgatgctgacgtattcttgtttttcttcctcctcttcggtggaagccaatattccggagaatcccacaatggcattgagcggcgtacggatttcatggctcatgttggcgaggaatgcggatttcagtttattcgactcttccgcacggttcttggcggaaaccagttccgtctccatctttttccgttcggtgataaccagcgaagagcccaccagggtcagcggcttattgttctcgtcgtaggtttctacggcggcctgggcctccacccagtcgaagtgtttgtgtccgtcggcatgattgatgacgcggtattcctccttgactttctggatacgtccctcaatcaggtctgtataggcttgtttcactttttccaggtcttccttgtgtattttggag

SEQ ID NO: 4463 - DNA, 604 bp, Unknown
  gut microbiota DNA sequence
aagcggatgcaaaggtaagaactttaaagcatatcttccaaatattttcggaagtttttttttcatttttcttttttctctttcctcgtcgtctctcttgtcgaaagggaggcaaaaagaaaaaggaagaaggaccaggcaccgtttctttaaaaagaatgtcaactcgcgctgctttcgttttcaaaagcgggtgcaaaggtaaggactttaaagcataacttccaaatgtttcggaagttttttttcatttttcttttccaaggccgaagttccgaaagaaacctatggcaaagaagagaaaaatggaagcttaccgctccgttttactgtcagaatgtcaaaacatcgccgccttcgttcccgaaagcggatgcaaaagtagcgcttttacggacatctgcaaaatatatacaagctttttttgagggtttacgtgaactttttcataactagctgattgatagatatgttttaaagcatgttttttaaagggaaagaaaggcaggaaggaaggggacacattatatatatacgcgcgcgcatcggaatatactaagttcaccccttgacatagaccactgaacggccggcaccacgcttg

SEQ ID NO: 4464 - DNA, 10393 bp, Unknown
  gut microbiota DNA sequence
attcgaaccccgggtgcctcgcagcacaacggttttcaagaccgccgcaatcgaccactctgccacctctccaaaacttctttttcagaagtgcttttcttttaaagcggtgcaaagatacaaatcattttttattctacaaacttttctgcacaaaaacagagcaattataccaaaattcttgtttatacccactacggaacgaacataacggcatttaggctatttgttgaaatttatcaagggcaagacagagttttataacttactggctatcagtatatttacaaagaaccacattcagtatacgattgaaccctattcagtatacgactgaatggcattcactatacgactgaattaggttcagaatacgactgttccttaaacctacatcatttgtaaataatgcagattattattcggttcttgtttcaattcataaaccacatataaagaaagtattaacatctctactcccccggacattcactacctaataatagttattttatgctgttcaacataaaaagagaagtatctcttataaaattacggaatttattcagtatttttgtgcgctctaaaggataacattatctaacctactaacaaaaacaaattttatggaattgaacaaaacctttaccaatgggctttggaataaagaaatcaatgtcagtgatttcgtcagtaaaaacatcgcaccctataccggggatgcatctttcttgcagggacctaccgaacgtaccaaacgtatctgggacatctgtctgaaggctctcgaagaagaaaggaacaacaatggcgtccgttcactggacaataccaccgtatctaccatcacttctcataaagccgggtatattgataaggacaatgaacttattgtcggtttgcagactgatgaactgttgaaacgatccatcaaacctttcggaggcatcaacgtggtagcaaaagcatgccgtgaaaacggagtggaagtggacgataaagtaaaagacatcttcacccattaccgcaaaacacataacgacggcgtattcgatgtatataccgaagaaatccgttccttccgctcactgggattccttaccggattgcccgacaactatgcccgcggacgtatcatcggcgactaccgccgattggctctctacggcatcgaccgtctgattgaagccaagcaggaggacttgcgcaacctcaccggcccgatgaccgaagcacgcatccgtctacgcgaagaagtggcggaacaaatcaaagctttgaaggacatcaaggttatgggcgaatattacggactcgacctcagccatccggctacatcagctcaagaggccgtgcaatgggtatacatggcatatcttgctgccatcaaagagcaagacggtgctgccatgtcattgggtaacgtatcttcgttcctcgatatattcattgaatacgatctggctcacggaaaaatcaatgagacgtttgcgcaagaactgatagaccagttcgtcatcaagctgcgcatggtacgccatctgcgtatgcagtcgtacaatgatatctttgccggtgacccgacttgggtgaccgaagccatcggaggacgcttcaatgacggacgcgtgaaagtcaccaagacttctttccgcttcttgcagacgctatacaacctcggtccttctccggaaccaaacttgaccgtactgtggagtcccgaactgccggaaggcttcaaggatttctgcgccaaagtttccgtagataccagctccatccagtacgaaaacgacaacctgatgcgcgaagtgcgcaactgcgacgattacggcattgcctgctgtgtatcctaccaagccatcggcaagcaaatccagttcttcggcgcacgtgccaaccttgccaaggccctgctgcttgccatcaacggtggccgttgcgaaaacaccggaactgtcatggtgaaaggtattcccgtattgaccggcgagacactgaagtttgaggaagttatggccaactacaagaaggtactgactgaaatagcccgtgtctacaacgaggccatgaatatcatccactacatgcatgataagtattattatgagaaggcccagatggcattcatcgataccaacccacgcatcaatctggcatacggtgttgccggcctttccatcgccatagactcactgtccgccatcaaatatgccaaagtcactgcacgccgcaacgaaatcggcctgaccgaaggtttcgacactgaaggctcattcccctgcttcggcaataatgacgaccgtgtggaccacctgggagtagacctcgtttactatttcagcgaagaactgaaaaagctgcctgtctacaagaatgcccgtcccaccctttccttgctgactatcacctccaacgtgatgtacggcaagaagaccggtgccactccggacggacgcgccaaaggtgttgcctttgctccgggtgccaacccaatgcacggacgtgacaagaacggtgccatcgcttccttgagctccgtagccaaattgcgctaccgcgactcgcaggacggcatcagcaatacgttctccattgttcctaaatcactgggcccgacaccggaagaacgtgtagagaacctggtaaccatgatggacggctacttcaccaaaggtgcccaccatttgaacgtaaacgtactgaaccgcgaaatgctggaagatgccatggaacatcctgaaaagtatccgcaactcaccatccgcgtttccggctatgccgtgaacttcgtgaagttgagccgcgagcatcagttggaagtcatcagccgttcattccacgaaagaatgtaatatgataaatgtacactcctacgaaagtatgggaacattcgacgggccgggtctccggctcgtcgttttcctgcaaggatgtccattccgttgtctgtattgtgccaatccggatacgattgatgtaaaaggaggcactcccaccactccggaagagattctgcaaatggctatcagccaaaaggcattcttcgggaagaaaggaggtattactttctccggcggtgagcctaccctgcaagcagaagcgctgattcctcttttcaaggagctgaaggcgaacggcatccatatctgtctggacagtaacggaggcatctggaatgaaaaggtggaagagctctttagtctgactgacctcgtgctgctggacatcaagcaattcaatcccgaacgccaccgtacgctgacgggacgaagcaacgaacagacactccgcaccgctgcctggctcgaagaacatgaacaccccttctggctgcgctatgtactggtccccggttacagcgattcggaagaagacacccgcctgctgggtgaaagtcttggcaaataccagcagatacaacgggtggaaatacttccttatcaccgtctgggtgttcacaaatacgaagccatgggatgggattacaaattgaaagaagtgaaggaaaatactccggaacaactggaacgggcagaaaaactgttcaaagagtatttcacgaatgtgataaccaactaaaacagaaaagcaaggctgtccggatatgattccagacagccttgcttttcatttatagggtaagaatcctattctttcaagttataggtaatctgctgtacatcatcactactgccacccaccataaagacgaaatcaccaggttctaccatataattcatctcattgtcatagaatcccagtgcatcgtcagttatctgaaaagctacagttttgctttcacccacattcagatgaattttcctgaagcccttcaattcctttatcggacgcgtaacagaggctaccttatcctgcacatacaattgaactacttcctctcctgcacacttaccggtattagtcacttttaccgacacctccgtatggacgcctgcagccttgcccggcagcagtttcaaatcagaatatccaaaatccgtgtacgaaagcccatatccgaaaggataggcaggctcagtggaagcatcgatataagatgccttataggtctgtttcaatgcggtagggcggccggtgctcttattctgataataaatgggaatctgtcctacgtgtgcaggaaatgtcatgggcaatttagccgaaggattatactctccccacaacacattgcatatggcattgccggcctcacttcccagccaccaagtacacagtaccgcatcagcatgttcccttatctcattgaagattaccggacgcccacacatgacaagagcaatgacaggttttccagtctttgccagttccgacaccagcttctgctgcccctcgggtatggctatattcactttggaagccttctcgccactctgaccgaatctctcgcctaccgccacaacaatgacatccgaagcctcagcagcctgtaatgcttcctgcaatccggtcaactgattgctcttcatatcatagccttcagcatagctcacctccagtcctttccggaccaatgcatcatataaggtcaccactttgttccggtccgtagtggcagcccaagcacctgccatatcgtactgggattttgagagtcctcctatcaaggctatcttcctcgtctgtgccgtcaacggaagcacagattccctattctccagcaatacaacggaacgctcggccatacggagcgaagcattacggacttcgggcgcattgagtattctggccgctctttccggattacagtagcgaaaagggtcctcaaacaatcccaactcatatttcttctccaatatacaccgtactgcatcatcaagcacactctcctttactttcccttcttgaacaagctccttcagataagtcaagtagcaggtacttaccatctccatgtccagaccagcattcagcgctttggctgcggcatctttcttgtcaacagcataacggtggttcaccaattcctctaccgaattataatcggacacaacaaatcccttaaatccccactgctctctcaatagccggttgagcaagaaatcattggcagtacaaggaatattattaaaatcattgaaagcactcatcacggtagctgctcctacctttatggccgccttatagggaggcatataaaaattggcaaagtggcccattgacatatccacactattatactcctttcctgctatcggtgcaccatatccggcaaaatgtttcatacatgccatgacagtcgtcgtgtctgccaaatcgtctccttgcaagcctctgacacgcgcctccgctacccgagaaccataataagggtcctcaccggccccttccatgacgcgtccccaacgtgcgtcccacgaaatatccaccatcggggcaaaaacccagttcaaaccatcggcggcactttccaaagcattgtagcgtgcagcttcctcaatcatggccaaatcgaaacttgcagcctcggcaagcggaagcggaaatccggtacgatagccgtggataacatccagtccgaaaattaaaggaatgcgcaaacgcgattgcaaagcaagctcttgataacggcgtatatcctttactcctatcacattcagcatagagcctattctgccttgccggacatactcttctttaggaatatttccaccgtcgggtccggtaaaattccctcggtaggtgcattgtgcaagctggcctatcttttcatccagcgtcatctgcttcatcaagcttgagatgaatttctccttctccgtagtttgtgccgaggtaaaggtgttaccaagtccccacagacaaaccatcagtattattatctttttcatactgccattcttgttttgatatttattttatcataaaacaacagttgccttcaatggtaaatcagctgaagaaggacctgccagaatctcaaaagtccccttttccactacaaaccgatgtgattccacatcatagtaggcaaaggcttcctcatccagcaatatccgaacgcgcttggtttcacccttcttcaagtaaaccttatcgtagcctttcaactccttcaacggacgcggaacagaacattccacatcccgcacatatacctgagccgcttccgcagcatccatctttccggtattcttgatgtcaaagcttaccgtaacccggcttccccccgtcttctcaacactcagattactatattcaaaactactgtatgacagtccatacccgaaaggatagagcggctgctttccgttccggtcatatcccctataacctacgaaaacaccttcggcatactgcacccgtttatgaggtacattgcgattgtcataataattaccatataccggattatcttcccatttttcctcgatgctgactggtagtttgccacttggcgaaagcttgcccgtaatgatttcggcaagggcctttccaccctcctgccccggataccatgccatcaaaatagcttgtacactctgcccccaattgcggaaatctattccacctccggcattcaccaccacagccacattatcatgaagtgaagccactttattaatgagatattcctgcccgtatgacaatgcaaacggacggtcgaacccttcaccttctgtactgctgttgaacccggcacatacaataacattcctggcatgcttcagtgaagaggccaaacgctcctcatccatcattcctgcctggaaactgacagtcgcctcacccacattatcaaaatattcaatacgcaaccggtatatctcccctgcactgacctgcataaatgcactgcgggtactgaatgaatggttcccccaatctccggtaatcagcttatcgtttacaaacagacggtatccgtcatcgccagccagctggaacttgacagttccatccttgtcagccttgtaaactcccgtccaacgggcagaaaactgatctaccggcatgccgtcgaacggtgtaccgtatttccaggcatggtctatggcaggctctatggcagcttgaaagagttctccggtaagattacgagtattataatattcgcccttaaaaccgttttgcgtaaaactgccatccgtataaatctgttgggacatatccttataaagaatgctgtcagacagcagctctatctgtctgccgcccttcaactgaaccataccttcatagagtgacactaccgaataaggggtgacaaatccgcttcctcctcctgtgggaataatatcggcattaggcccgattaccaatgttctaccgttccggtaaggcaacgtaccgttgtcatttttcaataagactactccttctctcgccaagtcaagtgcaatttccttagactgtgcattgtctttatcgatagatttatcttctctcggagtatcaagtgctccaaaagcaatcaatgtctggagtatatgccggactttggcgtcaatggtctcttccttcacgataccattctctattgccggaataagaatttccctggtcatgaatttaccgacgggcatttccaaatccaaccctccattagcggctcccacaccggaatatacagatgtccagtcagacatcaggatacctttaaatccccactgtttgcgcagtacatcaatgttcagccagctgttttcggtggcatgtaccccgttcagcggattatagctatccataaccgcccctactcctgcttcctgcacagcttttcggaacgcgggaaaataaatttcctgcagcgtgcgctcatccacatctgagctggcatgatgtctgctccactcctggttattggccgcaaaatgcttcaccgtagccataactccctcttcctgcactcccaagatatattctttagcagtttcgcccgtcaaataagggtcttcaccaaaatactcatagtttcgcccgcatagaggagagcggtagatattgactccaggccccaacagaatacttaccccacgggcctttgcatcccgggccaaaccatgtcccagctctctagccaacttacggttccatgtcgaagccgacaagatgccacaaggatacaaggtactttgagtattgttacgtatgccttgcggaccatcggccatcctgatttcgggtatgccaagccggggtacagcccggatataaaaagatttgggaccggaaatgtaatcgattttttcttccagcgtcatttgagaaaccaactccctggcacgctgctccacctggggagtaatacacacttgtgcttttgccgtgattgcacaacaaagcaatagcccgcttaaggctactttctttttaatcttcattttgtctattttactacgtgtttgttatattgccgggcatgtcccgacctactttctttcttctcaatcaataaaaaaccgtgtcccttcatccaccaacgaagaaacacggccgaaagttattaagaaaattctgaatctacaagaaagtggacaaaaacatgtctgtcctgctatcaataagtaagacgtataccggcctgcaacgtaaagttacacgggttctccttgcgtatagtctgtatcgacgaaccgtcatcaaagaaataagatactcccggttccacatacaggcccaccctattgcttatgttatactgggcaccgacagcacccatgacagaaagctgtaccggtttcacagtctcactctcagtaccaatcttgccatacacacatttttcaatggcaccccccgccgaaacgtacatcgtaaagttctttgcatccacaaagttccagttggcccgtaccggaatgccaatataatgcagcttctggcttatcttttccgagctgccctcataccttacgtcagaagcaagataggtatacgtcagcccgctttccacagagaaacccttcgccaagtttttccgcaccgaaacaccgaaactgagcggttgtttatggtctatatccgcaattttcttttcgcgtctttgcagatagggcataccatccttaaaaaccagttcctgcccgtcgggaatagtaacaatgccattggccgtagaggataaatctacgttaccgccataaataggacttccaggcatgtagtccgacatcacattcgcttccccttcattcgccaatgaaaaacctcccgtatttcctacggacaagccaaccgcccatcctttagcatccctaccagaactgtttttttccggaagatgcagtttgtcccggcctgacggacgatagcggtcttcccttgtctccggttcctcggcctgcattgtagtttcatggtccgtatcttccactaccggttcttccgcctgctgtccaataccgacaacctcatctgcagtttcaaccggcagcatttcctcctgctgttcttcgccaaccgatattctgatatgttgtgcaaccaaagggtgacttgcctccttattgggcgccgatgcatttccatgtgcccgataagcaggctctatggaattagtccgtatggcaggtactgtctgttccggcaagacgtccggagccacagccaaagcgggcactgacgtatgccgcatttcattccctaccggactctgcaacagccacagactgacggacgaaaccgccaccagcaacacagctgccgcggccaccgcccagcgacggaaaggtatcatcctatgcggtccggttatcggagctccggaaacggacaattccttctccaaccgctcccatccggcaaccggcagcggttcggaatagtcttccagcttgtcctttatctttttcaaccacaattcatcttccatacattccttcatttaatcatttcttttcatccactcacgtacttttgccgctaaagtcgctttagcacgcgtcaactgcgaggcagaggatttttcattaattcccaatagtcgagcaatctccttatgggatttctcttcaaaaatatataagttgaatacggtacgatagccggcaggcaattcactgataaactgcattagtaccttttgaggaatgacatctattgacgaaccttccggttcctcataagcttcgggtgcattctccaaggccgatgactgattcatcacatcatttttccgcaaatactgcaacaccgtattcaccattacgcgttccatccatgcccgcagagaaccctctccccgccaagtgaacttatcgaaagaatcaaaaagtttcagaaaaccgtcatgcatcaggtcttgggcagtctcccggtcacctgcataacggaggcatacgctgagcatgcgtcccgcatagcgctcatacagttctttgcgggcaagattgtctccttgcctacagcgttctgccaattcctgttc

SEQ ID NO: 4465 - DNA, 8271 bp, Unknown
  gut microbiota DNA sequence
ccctttcgcatacttgttttgttactaagtattccgttacttcgcaggtaatgaaatcttgttaattccattaataatcaaggaataaggataaaataggttgggtttgttcaaaatagtaaaaatcagcccgttaggatattggaaagaggattgaaagtccagaaaagtgacagtgggaaagtgatgaaatgaggctttcaaagaatgaaagtgtgtatttttcagttcaaaaggttgaatgacagtatattgatagcaccgattggagctccgtaaagacaacgccattccgttcctcaaaactcattttgaagactccggaaaatgcgcaacaaatctattctatcctatcaaaagaagtaacgttttttatactgtacacgctccgcttcttacaaaagaaattaccctctggttggcctcgtcaatctttctgttgctgaaaggcttcagataggtttccgtcaccgtgatggaggagtgccccatggcttccgatatgattccggggtgtatctcgcaatggtaagccattgtagcccaggtgtgtctggctgcataggtgctgagtgccgactgcattcccaagcactgcctgagtactgccagccgctggttgaatgccctgagtgccgactggtattcccggtatgcggcttccgatccttcctcactttgtaatatggggaataaataaggagagtccttgtccttgtttgctattattctcaccatctgcatggcttcgggtgtgagtgacacggtcagcgcccgtcccgtcttccgtcgtctgtacgatagtatatttccctgcaggtcccttttgtgcaggtatgccagatccacaaagggtatgcccctgagcatgaacatgagtacgaagaaaatccttgttctctgccgggcgttcgggagcgtccctctttgcaggctcctttccgtctcccttaccaggctgctgatgtcggatgcctcgagcgccttcttcctgtccgcccgtgtgccggtatatacatgctcgaacagtctgggtacataccgtatgtactttctgtccactgcccgatgatacaccgagcgtactgtcttgatgtaggtggacacggtgttccaactgcagttcctctgcctgaggtagttttcgaacctcttcagtacggtcgggctcagcttgcgcatgggcattggttgccatttggtgaatgccgagaatgcattcaccgctgactggtagatgtgcgccgtcccccatctgccgccttcccggagttccccgatgactgaggagaacatctcttgtaaggtaatttcatttctattcatttccaatttatttataaagggtttgccttacaagtatatacaataaaatgaagaaaaacagaagcttataatgtatttcttcattttagccagtctttcagaatgaactcaaatatatttcttatatttgcgaaaaaagtcgcattgaaaaaagtcgcaatatgaataatccatttaaattcggtacgattgtagacggtgaatactttacggatagagtagcggaacaagaaaaagtaagagagatacttgcaagtgagaatcacctgatacttattagtccacgacgtttcggcaagaccagcctcgttcaaaaagtgacgaaaggattgtcacgtcccgtttttcagttgaacctgcagttggtaacagacactgccgactttgctgcacgattattgcggattgtgcttcaacaatatcctatggaacgtctgaagcatcttatcactcactttcgttttatccccaccatttcaaccaatcccatgacggatggcatagaagtttcatttcagccgtcaatggatggtttcattctgttagaggatgtattcacactgattgataaactgggaatgaagaatccacacaagaaaccgattgtagtactggacgaattccaagaaatacgtacattggacaagaatctggataaaaaattgcggtctattctacagacttacaaccatgccaattacattttcttaggtagccaggaatcgatgatgcaggaaatcttcgagaaaaagaaatcccctttctatcattttggatatttgatgaagttgggtaagattcctcaagatgacttctatgagtttctcaagaatggctttcttctcttgggtgaggatatggatgctgaaacgataggccgcagcattctgtcgttcaccaattgtcatccctattacacccagcaactggcttaccagacatggaataactggaaacaaaacggttacagtgatactttggtggaaactgccattacggagttgactcatgtgcacgatatggattatgaacgtttatggagcactttcaataaaacagataaaaaagttttgataggcttaactatgcagatggggactccgtccagtcttccttttctacgaggtgtcggtattgattctccaagtactgctttcagtagtttgaagcgacttggacaacaaggatatgtgatacgtaatgaggggtatgaactggatgatcctttcttcagaaggtggattgaagtaaagagagaagggtgatagaaagaggaaatccttgttgggtttcgtatcattttagcatattgagttttatgcttatcatgtctttatatgatatttgcatctcctccggtagaaaagagagagtgatgaactccatccatttggtttctactttcaagagtttcttgaaaaggttttctattactttttcgtccaatcccgacgcccgcatggacgtgacaaagtcagccttcttcaatttacgttttttaccgtttagtgtaagtgcaagttcttcggtgtcttcaggcatcaccaatgcggtagacagcatgtcatatgctggtgtgagcgtatatacctcttgttggggactataaagcgagaagttcttcaaatgcatgtcggcattaccggttatccatgaaaagacgacttgctcccagaaattcaccaggtccaatttgggagcggatgaatatctcagcactagcttcgcaatctgctcataagaacctttgtatttttgttcagtgagtttttcagaaagttggcacatatcctccatagccaattttcccccttcattcgtgcggtctatgcgtcgggtgatatagcataattcaccatcctcaaagcggatgaggctatgtggcacaactcgtatcttggctatttccgcaagatgcattgtcagatcctctaattcgggaagattaccgaaccgttcggtttgcggcttcaaaatatagcgcccccataagcctacaatcgtaaatcgtccaggctcgtttttacttcctttgttgatatccaatgataatttggcctgcactccggtcagtgtggtctgactgcgaattacctgccttgccaaatcatagagattattgtgcgtataaggcaatataggcgcctctagtgtcccgaatatcttttttgagcaagccttgtggaaatccttctcatttccattcagttccttgtaacaatacagacatcttgccattctttaatcctcctcatttataggttcgacacccactgcaccgatacagtctttacagcacgccagcaacagagacattcggtcacgtgcatctattttccagttcttttccgcaatgtcaagcagccatccttcgggtatcagcccgtcgaaaaaaggaaacagcactttgtcgtgataggctttctctgtcaagggtaatgtgaggctgacagcttctgcaacatccgactgcaggaattccgtatcgtactggaaggtatagccatcctcatcctctgtgaggatgccggcttttattcctcggagatttatcaatgcctgcttcatcattcgtcagttttagttataggtactgcgccaacttcgctgccgaacaaagacagtagctggtttaccttgtccaaccgcagcgtctgtttgccttgctccaattcacggacaaagcgcaagcctactcctgacttttccgaaagttccacttgggtcagattgtactgcttacgcatcgcttttacatatttggataatgttgtttgttccgtatattccatttttataccctttggggtacaaagatagaatatattttcgttattacacccataagggtataaaaagattaaaggagaaagagattatatcttttcgggtataaattagctagaataagtttatgaatctatccatttcctgtctacctatttctggctttactcttaaagcctgccagtccttcactgcttcaacggcctctgtgataattctttcagtggcttttgggctaagcatataatctcttatgagaatcacactatatttctaggccggctttgcttgattctgctgagtacataagaagatagcttgttatattgttcaaactcttataaattcttgtcacttttgctgcgtacaactgtctaaatggtgaattgctgaaaaaagcaagaggctgtctcaaaatgcacttgagatagcctcttctatgcaaatgttttactcttcagtttattcctgatatttcacttttgttcccaaagcatcgtggcgcatttcgcgctcacttcggtaaagcttttcatcttttaaataatagtattcctgataacctccaaattcgatattggcatactctaagtggtcttcggccttgcaagacttccatgtaccttcatacttcactgaatcagagaaagtgatgagggtggttgagtctgcacggagttcaaacctcacgccattttccgttatgaatgtaccggcgaaagaatgagtagactctgtactgttagtattggtacaagaatataaaaaaccgaaagctattgtcaacatagccaaaatcgttcgtctcattgttcttttgtttttatagaaaagagagtgcttcttttccggaaacactctcttttattagttatctgcagtgatgattatctttgagcaggagtaccagagttcttcttaacatcaacttcgaatgtcaaagtgaatgtcttccacttgtaaccgaacttcacagggatgaacaatttgtaatcccagttaaccggagtaccgctgtagttgttgtaagtcagagtttcatctgcctggttgtaaacaaccttggtattagaaggcagaggaccgtttgttacaccatcagtcggaaccaagttaccgttaaccagtttcaagttagacttgatttggtctgtcatccattcgcccggaactacttcgtagaattcccacaaagctttctgcaagccagtagtattggctacaatatacttcttgcctgattcgtcagcattccaagaaacataagtgaaagcacccttaacgtcaattgtactaccacctacagttgcatcagtaaagttctcagtttcacctgtagttactgtcaacggttcgatgataaatgcatcatattccttgatagttgcagtgtgggcagcagccagcagagaaccagcagcacaagcatctttgtagcatacgtcggcaaccaacttgatggggacatacttgcctacgagagccttggcagcttctgtcggagcgtcgccgctacgcggtgcgtgagtcgggtttacttcttccaacttgatgttgtaagtgatttcattggcatccagcttgttgggagcgtagttcacaatctcagcagctttcttgccgtcgatgtacaggattgttccgtcaggacttacagtcgcagtcttttcaacaacgcttgtaccgttgaaatattcgtacttgtaagcagaattggcagcttccagtttttctttgtcgaacacgaagcgggcaccttcctctgaataagcaccacctttcacaccctggtggccgctggcagcataaggatacagtccggaatagaagaacttcttaccggcacgcagtgcatcggcataccagattgcgccgcccaaaccggttgtcggtttaactccgaggtcgttcaggaaaccgttcagcaagtctgtgtagatgttacatgtcgggttattctctgtattgttagaccatgccgggttggattcctcggtattgtaaacaatcgggtttacattgaatgtggaccattcattgtcgttcttccagtagcgaccatcgtaaccccagaggttgaataccggcttgtagatagtacgtgtcaaagtaatcttcaatgtaggatatgcacctgtaggatcggagtagtagcaaaccttgctgaagctcatcttttcctggttgttccagttcggatacttcttaacgatgtctgcatgagtcagtgtccagatgatgttgtaagattctacaccagcttcagagttggcaatcacagaagccgtaccttcgccggcaccctttgtaccatcaaattgagtataaacggcgtggaattcctgtttggtcataccaccttctttagccttgtcgtagatgtcctcattcatttcctgagtaccgatgcgaccggtgtagttgctgcagtaatagatagaatcagcaaaagcatgagacaactctctctcgccagcttctttcacccatttcactttcaggtaacgcatggcaaccaaagcattgtttactgtatccaccagttccacgcgaacgataggctcacgacctacagctgttgcagaagtaccttcgacagtgtaaaccttggaagacatgataccgttttcgtgagaatctagcttggcaaatttctgctggtctgtcttgttggtgttaccatctacgccacccaatgtgttataaggagcagtagggatgtagaaacggaatgtcagaccataatccttgtagtttgccagatttgcatggttagcgtggttagttttagcatctttagcgtctgtaacacaaaccttcaccaatttcttcaaatcaagcggctcgttataaggttgcttaaagtctacatattcgttggctttagattcgtatacgcatacagagtcatgatagtgtacatagaagtcttctttgccgtcgttctggatttcatcggcaaacttaccggtcatagttttgctaaagtcagttttgctattaaccagatacggaaccttaacctcttcgtgcagacgtacatattcagagttcacatacaccttagtaccttgttcgtcaaaagctttcttttcagcagctgtatagttttcagcagcgataggagctttcaaagatgccatgtagaacttttccttgtcgccggcagtcgttgcagcgatagaacccttgactgtctttttgaattttactgtcagcacgtccttattgatgtcgtacttaaccggttgaatcgggctgttagtcttaatatcagcaccggtagccttggtcataatattttcagatgtgatgcaatcaaatgagggcaattcaatatctgaagtacggacacctacgctggggcttacatggaaataagcctcgttgtaatctgtagaaatggagttagctgtagcagcagcatttacgtggtccaaaaccggagtcgtagtgtggtcttgagttgtatgcttagccatagcctgatacttctgcggggtatattgcagggtagtcagcgtgatggcggcaataccgttgatgtggctggtagggattacggccaggctggtcagacgatgaccaatcagggacatcacctcagcacttaccttgtcaatttcagcagccaagtccttcagcttctcgtctgtaacgaagtcgcctttcaattcttctttcagagccgcaatcttttggtttacgatgtccaaagaagccaacttgtcgatttggtcttgcagttctttcttcagagctttcaagtcgtcatcagaaacaccaccttctgccgaaccggccttgtccaaagcttcctgagccttgtccttagcttcgttggcagctgttttagcatcgttgacagctgtctccaaagtcgaaacttttgcagccagctcttcaagtgaagctttcttgtccagttgttcctgcaagttcttgatgtcgtcatcatagtccttacaagacgtgaacgttcctgtcgcacctatcatcaaggcactgaacagggtcacacttagaaactttttgttcataattgaaaaactttaaatttataaatttaaaaaataaaaagtgaataatttctcatttccggcattccttttcccacaatgcttttgttaaaaaattccgttacttcgcaggtaacgg

SEQ ID NO: 4466 - DNA, 265 bp, Unknown
  gut microbiota DNA sequence
cggagtttcaaaagaagctttttcatgccctccacatccaggcgggcagtgttatggctgtgatagtcctctatacgggcaatatcctcattgccttccgtgaagaacttgtcatagttcaagtcacgggtgtcgcaggggatgcggtagtagtcgcccatgtcgacagcctttgccatctcttcgcgggttaccagtgtctcatacagtttctcgccgtggcgcgtgccgatggtcttcacctccgtctcaccgtatttcggat

SEQ ID NO: 4467 - DNA, 5026 bp, Unknown
  gut microbiota DNA sequence
gacttcaacatcgacaacatgctcaccaccatgcggcagtattaccggggcggacgctatgacttcctgctcaactcggcggagaacatcgacctgctgggcaaacggttcatcgtcttcgagatcgattccatcaaggacaaccgcgaactgttcccggtagtgaccatcatcatcatggaagccttcatcaacaagatgcggcgtctgaaaggggtgcgcaagcagcttatcgtggaagaggcttggaaggctctttcttcggcaaatatggctgattacctgcgctatatgtacaagacggtgcgcaagtatttcggggaggcaatcgtggtgacgcaggaggtggacgacatcatttcctcgccagtcgtcaaggagagcatcatcaacaactcggactgtaaaatcctgctcgaccagcgcaagtacatgaacaagttcgaccagattcaggcgttgctcggactgacggagaaggagaagtcgcagatactctccatcaacatggcgaacaacccctcacggctctacaaggaggtgtggataggcttgggcggcacgcagtcggcggtctatgctaccgaggtcagtgctgaagaatatctggcgtacaccaccgaggaaacggagaaagtggaggtgtaccgtctggcggagcaattgggcggcgacatcgaagccgctatccggcagcttgccgaaaggcggagaaacaagcagtaagtaatcaataatcagtaaaacagatttatcaacgaaaaaagaaaagcgtatgagcatatcaagaatgaagatgctgcaagtcagcaagtgtctgatcggattggcggtcatggtgctgcaatcctgcgacgtggcggagaaccgccgcgacctgctgtgcgggaactgggaaagcgtggaggggaagcccgacgtgcttatctacaaggagggcgaagcctacaaggtgacggtattcaaacggagcggcatccgccgcaggttgaaaccggaaacctacctcttgcaggaggagaacggcaacctgttcatgaacaccggcttccgcatcgacgtggcgtacaacgaagccaccggcgtgctgaccttctcacccaacggggactacgtgcgtgtgaagccgcagccggaaactccggcagaaaaataagaaccactaaaatccaaagaaacatgagaacaagaataacattctccatctgcctgtgcctgcttttcgcgggcagggcttccgcccaatgggtcgtgagcgatccgggcaatctggcgcagggcatcatcaacgcctcgaagaacatcatccacacctcgaagaccgccaccaacatggtgaacaactttcaggaaacggtgaaaatctacgagcagggcaagaagtattacgacgccctcaaatcggtgaacaatctggtcaaggacgcccgcaaggtgcagcagaccatcctcatggtgggcgacatcacggacatctacgtgaccagcttccagaagatgctgcgcgacgacaacttcacggtggaggaactcggagccatcgccttcggatacacgaagctgctggaagaatccaacgacgtgcttacggagctgaagaacgtggtgaacatcaccacgctctccatgacggacaaggagcgcatggacgtggtggaacgctgccactccaagatgaagcgttaccgcaacctcgtaagctactacaccaacaagaacatcagcgtgagctacctgcgtgcaaagaagaaaaacgacctcgaccgcatcatggggctgtacggcaatatgaacgaaagatactggtagcctatggagttcgacaaccttcaccagattctccgctcgctctacgagcagatgatgccgctgtgcgccgacatggcgggcgtggcgaaaggcatcgccgggctgggcgcgctcttctatgtcgcctaccgtgtatggcagtcgttggcgagagccgaaccgatagacgtcttcccgatgctccgcccctttgccgtcggtctgtgcatcatgttcttccctacggtggtgcttggcacgataaacagcgtcctctcgcccgtcgtgcagggtacggcgaaactgctcgaaacgcagactttggacatgaacaagtaccgggagcagaaggacaggctggaatacgaggcgatggtgcgcaatcccgaaaccgcctacctcgtgtccaacgaggagtttgacaagcaactggaggaattgggctggtcgccctccgacatggtgacgatggcggggatgtatatcgaccgggggatgtacaagatgaagaagggcatccgcgatttcttccgcgagatactggaactgatgttccaagccgccgccctcgtgatagacaccatccgcacgttcttcctcgtggtgctggcgatactcggtccgatagccttcgccatatcggtgtgggacggcttccaaagcacgctcacgcagtggatatgccgctacattcaggtctatctgtggctgcccgtgtcggacatattcagcaccatactcgccaagattcaggtgttgatgctccagagcgacatcgagcgtatgcagaccgaccccaacttctcgctggattccagcgatggggtgtatatcgtgttcatgattatcggcatcatcggctacttcaccattccgacggtggcgggctggatcatccaagccgggggcatgggcggctacgggcgcaacgtgaaccagatggcgggacgcgccggaggcatggcgggcagcgtggcgggtgctaccgcaggaaatgtggtaggacgtgccgggaaactgctgaaataatcaatgtggaattataaacggaaaaagtaaaatggaattcaagtcactcaaaaacatcgaatcatcgttccggcagatacgcctgttcggtatcgtattcctctcgctgtgcgccgtgataacggtatggagcgtgtggagttcctaccgcttcgcggagaaacagagggagaagatttatgtgctggacaacggcaagtcgctgatgctggcactttcgcaggacttatcacagaaccgtccggcggaagcgagggagcatgtgcgccgcttccacgagctgttcttcacgctctcgcccgaaaagagcgcgatagaacacaacgtgaagcgtgcgttgctgctggcggacaagagcgtgtacaactactattcggacttcgccgagaaggggtactacaaccgtatcatcgccggaaacatcaaccaagtgctgaaggtggacagcgtggtgtgcgacttcaacggttatccctaccgcgccgtgacctacgccacgcagaagattatccggcagagcaacgtcacagagcgcagcctcgtgaccacgtgccggctcttgaactcgtcccgttcggacgacaaccccaacgggttcaccatcgagggattcaccatcatcgagaacaaggatttacagaccatcaaacggtaacaggcatgaaaggaatcggaaaatcgctgtggagggtctattggaaactccacgacaaaaagaaaatgctggtggcaaggctcaaaggctatctggatggcttgccgccgaagacacgcaggcgcatcgtgctggcaatgctcgccgcttttgccgcacttgccctctacaccttcggtaaagccgtctatgacatcggcaggaatgacggcagccggatggaaatagaccatgccggacaggtggaactgtccgtgaagccggataacaatcacaatgtaataccttatttatatggaacagacgaagaatgaacccaagaacgaaaacaaggcggctcccggcaacgggaaaccaaagaaggagcgcaagccactgaccgaagcccaacggctgaaacgccagaaaatgatagtgctgcccgctatggtactggtattcatcggggcgatgtggctgatattcgccccgtcctccagcaaggagcaggagccaacaggcggctacaacatcgagatgcccgatgcggacaaggagaaccgccggattatcggtgacaaggcgaaagcctacgagcagggggcgatggaggaacggcaggagaaccgcagccgcgccatgcagcagttgggcgacctgttcgaccgcgaaacggcggaaacagatggggacaacgacttcgaccttgccaatcccggcggaacggaagaggcggtgaagcccgcaccgaagaccatccaatcctcggcagccgcctaccgtgacctcaatgccacgctcggcaacttctacgagcagccgaaaaacgacaatgcggagatggacgaactgctggaacgcatcgccacgctcgaatccgaactggaaagcggaaaagagagaacctccacgatggacgagcaggtggcactcatggaaaaatcctacgaactggcggcgaagtacatgggcggtcagaacggcacgcaggcggcagcgggacagaccgcagagccgtcccctgtgcagaaagccggaaagaacacggcaaaacccgtcaggcaagtgacacaccaagtggtgtcctcgctcggacagcccatgagcaatgccgaatttgtcgcttccttctcgcaagagcgcaaccgcagtttcaacacggcggtgggcgtcacgaccgtatcggacaggaataccataccggcgtgcgtctatggggcgcagagcgtgacggacgggcaggcggtcaggttgcggctgctggagccgatggcggtggctgaccggatcatcccccgtaacgcggtggtggtcggcgcagccaagattcagggcgaacggctcggcatcgaaatcacctctttggaacacgacggtataattattccggtggagctggaagtctatgacacggacgggcagcccggcatattcatccccaactcgatggagatgaacgccatcagggaggttgccgctaacatgggcggctcgctgggcagtagcatcaacatctccaccaatgccggggcgcagctcgcctccgacttgggcaaggggctgatacaaggcacg

SEQ ID NO: 4468 - DNA, 1900 bp, Unknown
  gut microbiota DNA sequence
aaacgaccaacggaagtgaagaacttaccttgacaaaggaggtctatccgcagaaggaggcggacggcgatctgtatcacggtctgacgagaaagctgggctttgaccgcatggttcccccgcacggcttggaagtgacctacgacaagaccgtgcatgtcatcttcccggcggaagtgcgctatgtcgatttaggctcgcccgacctgattgcgggcaaagccgacggagcggagaacgtcatccgtgtgaaggcaaccgtgaggaacttcccgaacgaaaccaacatgtccgtaatcacggaggacgggagtttctacactttcaacgtgaagtacgccgccgagccgctgctgctcaacgtggagatgtgcgacttcatccatgacggcgaggcggtgaaccgtccgaacaacgcgcaggaaatctacctgaaagaattaggcagtgaaagtcccatgctggtacgccttatcatgaagtccatccacaagcagaacaagcgtgaggtgaagcatatcggctgcaagcgtttcggcatccagtaccttctgaaaggcatctacacgcacaacgggcttctgtatttccacacggaaatcaggaaccagagcaacgtgcctttcgatgtggactacatcacgtggaaaatcgtggacaagaaggtggcgaagcgtaccgccgtgcaggagcgtatcatcctgccgctccgcgcgcagaactacgccacgctcgtgccgggcaaaaaaagcgaacgcacggtcttcacgatggcgaagttcaccatccccgacggcaagtgcctcgtggtggagctgaacgagaagaacggaggtcgtcatcagtccttcgtgattgagaacgaggacttggtgcgcgccaataccatcaacgaacttcaagtgcgctgaccatgagaaagtacattgcaataatcatagcgtcgcttgccctgttcacggggcaggcgtacgcccagcgatgcctgccgaagatgcagggcatcgagttaagggcgaatctggcggacggcttcaaacccggcggcaacgacggcgggtacagtttcggggcggctctctccacttacacgaagaaggggaacaaatgggtgttcggaggtgagtatctcctgaaaaacaacccgtacaaggacaccgccatacctgtggcgcagttcacggctgagggcggctactatttcaagatactttccgatgctcgtaaaatcgtgttcgtctatgcgggggcttcggctctcgccgggtatgaatcggtaaattggggcgaaaaggtgctgcatgacggctccacgctgcatgaccgtgacgcctttatctacggtggtgcgctgacgctggacgtggagttttacgtggctgaccgtatcgccctgctcgcaaacctccgggagcgttgcctgtggggtggcgacacgaagaagttccatacccaattcgggctgggcatcaagttcgtcatcaactgacacgcggcatggaacggacggatatagacaccatgaggcaaatatcccttgcggattttctcgcacggttgggacatgagcctgtccgaaggagcggaaacgaactttggtatcgtgcgccgtaccgtaatgagcgcacgccctctttccgtgtgaacgtggcgaaacagctctggttcgacttcggtttgggcaagggtggcgacatcttcacgcttgccggggagtttgcccgaagcggcgatttcatggcgcaggcgagattcatagcggaaaccgcccgtatgccgtttgtcgcagtggaaaagccgttgttcctgccggaaccgtccgaatctgcctttgagggagtggaagccgtcccgctgctccgctcaccgctgacggactatctggcggaacggggcatcc

SEQ ID NO: 4469 - DNA, 572 bp, Unknown
  gut microbiota DNA sequence
gcataggcggcaatggcgacagccttgtgctgaactccgtcgccaacgtaggcaaggcggtgaaacacttggacgggtacgggcgcatcgactgcttcctcgaccgtgacgaagccgggcggaggacactggaagtcctcaaaggacactacggcggacgtgtctgtgactgttccgcactctatgacggttgcaaggacttgaacgagtatctgcaacggacagcaaaaaaagaaatgaacaataacttaaaaatcaaaggacaatgaacatactgaacaacaagaacaagagaacatccatcttcaaggcgttggtactctgcctgttcgccgccatgtcgctcacgctcgcatcgtgtgacgacgacatggacatccagcaatcctatccgttcacggtggaaaccatgcccgtaccgaacaaggtcacaaaggggcagacggtggaaatccgctgtgagctgaaaaggacgggcgattacgccaacacgctctacaccatccggtatttccagttcgagggggaaggcaagttggaaatggcgggcggcattactttcctgcccaacg

SEQ ID NO: 4470 - DNA, 16192 bp, Unknown
  gut microbiota DNA sequence
caaacgttaataggtacgagtacatagctgatgaaagacgcgacttggctgacttgttaatgaggatacacgcgacttacaacttagtattgggaaaaataattaaggaaatatagaataaaaagattgcttatgtcacagattgtcggacatatctcacaggtaatcgggcctgtagtagacgtctatttcgaaggaacggaggcagaaatgatgttgccgagtattcacgacgcactggaaataaaaaggtcgaacggcaaaagactgattgtagaggtacagcagcacattggtgaaaacacggtgcgtactgttgctatggacagtacggacggcctgcagagaggaatgacagtgcatccgctgggaggccccatcaccatgccgataggtacacaaatcaaaggccgcctgatgaacgtagtgggcgactctatcgacggcatgaaggagttggaccgtacaggtgcttatcccatccatcgcgacccccctaagtttgaagatttgactaccgtacaagaggtgctttatacaggcatcaaggttatcgacttgctggaaccatatagcaagggcggtaaaatcggtctgtttggtggcgccggtgtaggcaagacggtgcttatccaagagctcattaacaatattgcgaagaagcagcacggcttctctgtgtttgccggtgtaggagaacgtacacgtgaaggcaacgacctgctgagagaaatgattgaatccggtgttatccgttacggagaagaattcaagaaaggtatggaggaaggccattgggatttgtccaaagtagattatgacgaagtggccaaatcacaagtgtctttgatattcggtcagatgaacgaacctcccggtgcgcgtcagtccgtggcattgtctgggttgacggtggccgagtccttccgtgacatgggagcggagacggacggtccgcgtgacattctgttcttcattgataatatcttccgtttcacccaagccggttccgaggtttcggccttgctgggccgtatgccttctgccgtaggctatcagccgacactggcaacggaaatgggtgccatgcaggagcgtattacctctacaagaaacggctccatcacttccgtgcaggctgtatatgtgcctgccgatgacttgacggacccggcacctgccacaacgtttacccacctcgatgccaccacggtgttgagtcgtaagattactgaacttggtatttatcctgctgtggacccgttggaatctacttcacgcattctcgacccacacatcgtgggggtagaacactacgaagtggcacaacgtgtaaaacaaatattgcagcgcaacaaggaattgcaagacattatctccatccttggtatggaggaactctctgatgccgaccgtacgttggtgaaccgtgcacgtcgtgtgcagcgtttcctttcacagccgtttgccgttgccgagcagtttacgggtgtcccaggtacaatggtttccattgaggacactatcaaaggcttcaagatgattcttgacggggaggtggactacctgcccgaacctgctttcttgaatgtgggaaccattgaagaagccattgagaagggtaagaaactactggagcaggcagggggaaaaacgattaaaaattaaaagtctgggagctttgatgatgaaaaagttgcatttgaatattgtttcaccggagaaggaactcttcaacggggaagtggaaagtgttacattgccgggcactatgggctctttttctatcctgccgcagcatgcaccgattgtatcatcgttgggaacggggaaattgatttacgcaacggacggtgaggaacatgagttggatattcaaagcggattcgtggagatgagtaacggaagggttgccgtctgtatagaacagcaataggctattaaaaaattaaaaattaaaaaatagaggttgttagcgtgactattactaagagaaactacttattgcatacagcgctcttgacggtattgataggaattgtaggcggttgggcgtatttttcgataaatccgcatcactatttcggcggttatccgctgattccgcttttcttctttgttttcggagtattcatgattaatatgaccgaaagctgccgtcaccggatgccgggacgaatgttgcagatttatctgctgatgcgtgtgatgagaatgctggtctccatgattgtgatgctggtttattgcgttgcagtacgtgaggaagccagggcgtttctgttgacgtttatagccaactatctgatatatttgatttatgattcctggttcttcttcacttttgaggcgaaccggaaactgaaaaagaaaagtaacaatgaaaagattgcgtaacatactgactgtagttctgctggcactgggcatgttgctacccgccacggtgcgggccgagaatacggtggacgtgaaggagattgtcttcgggcatatcggcgattcttacgaatggcacatcacgacgtggggcgaaactcacgttacgattcccttgccggtaattgtgcatagctctaccaccggatggcatgcctttctatcctcacgtctagaggagaacggtggaagttatgaaggcttttccatcgctcccgcaggaagcaagtacgaaggcaagctggtggagtatgatgccaccggaaacgaaatacgcccgttggacatctccatcacgaaggtgacactggctttgctcatcaacagcgcattgctgcttctcatcattttgagtgtggcgcactggtatcgcaagcacccgcagggaagtgccgctcccggtggtttcatcgggtttatggagatgtttatcatgatggtgaacgatgatattataaagagctgtgtcggtccgaagtaccgtaaattcgcaccttacttgctgacggccttcttctttattttcatcaacaacattatggggctgattcctttctttcccggaggggccaacgtgacgggaaatatagccattacgatggtattggccatctgtactttcttggccgtgaatatctttggaaccaagacttattggaaagatatcttttggccggatgtgccctggtggctgaaggtaccggtccccatgatgccgtttatcgagttcttcggtattttcaccaaaccgtttgctttgatgatacgtctttttgccaatatgctggcagggcacatggcaatgctggtgcttacctgcctgatattcatctcggccagtatgggacctgctttgaacggaacgctgaccgtggcatcggtgttgttcaatatctttatgaatgcacttgagttgttggttgcctttatccaggcatatgtgttcaccatgctgtcagccgtgttcatcggtctggcgcaggaagagcataaggagaaggcggtgaagtgatacgattattgggaatataaatattaataaaaataaccatttaaaaactgaaagttatgttactatctgtattattgcaagctgctgcggcaggtgtgggagttagtaaactgggtgcagccattggtgctggtttggctgttattggtgctggtgtaggtattggtaaaatcggcggttctgctatggaggccattgcccgccagccggaagcatccggagatatccgtatgaacatgattattgccgctgccttgattgaaggtgttgctttgttggcagtagttgtgtgtttattggtattctttttataatgtacaatctaccatttaccatttacaatttgtccgtgcagcatcaccgcgcagccaaattgtaaatcgtaaattgtcaaatagtaaataaaattatgtcattgttattacccgatagtggtctgctgttctggatgctcctttcattcggtgtggtgtttgtggtgcttgccaagtacggttttcccgttatcaccaagatggtggaaggtcgcaagacctacatcgaccagtctttggaagtggcacgcgaagcaaatgcccagctctccaaactgaaagaggagagtgaagcgttgattgctgctgccaacaaagaacaaggacgtattctgcgggaggcgatgcatgagcgtgacaagattatcgtcgaagcacgcaagcaggcggaagccgccgcgcagaaggagctggacgaagttaaaaagcagatacagcaagagaaggaagaggccatccgcgatattcgccgccaggtggcagtcttgtccgtagatatagccgagaaaattatccgcaagaatctggacgagaaacatgagcagatggagatgatagaccggatgctggatgaagtgctggccgcaagtaaaaacaattaattctcaaagaaatggatataggaatcgtttcgatgcgttatgcgaaagcattgatggaatatgccaagagcatgggggcagaagatactctgtacaaggagttttgtatgctcgaccgtagcttcaggaaacatccggatttgcgcatggcattggaaaaccccatcctgacgatacgtgagaagttaacacttatctgtaccgctgctgtgggggatgctcctgcgggccgtgagtttgcgcgtttcatgaccctggtgttgaagaaccggcgggaaaactttctccagtacatctgcctgagttttctggatttgtaccggaaagacaagcatatcggtgtaggaaagctgataacagccgttcccgtcagtcaggaagtgcgggagcgcatccatgacagtgcttcctccctgctgcatgccagcatggagctgcagactgaagtggatccctccattgaaggtggttttatcttcgacatcaacgacttccgtctggatgccagtattgctacgcagcttaagaaagtgaaacagcagttcattgataagaatagaagaatcgtgtgatttacgatttgacaatttacaatttacttatttaatagtcttgtgatgcgtaagttgtagaggtcaaacagtatatgattcgggttctttcaaatagtaaatagtaaattgtaaaatagtaaatactaagatgttgtctgaaaatataaaagtaagcgaagtctccgatattctccgcaagcaactggaagggattgacacccgcgtacagttggacgagattggcacggtactgcaagtcagtgacggtgtagcccgtatctatgggttgcgcaatgccgaagccaacgagttgttggagttcgacaacggcatcaaggccattgtgatgaacctcgaagaggataatgtgggtgctgtgttgcttggccctacggataaaatcaaggaaggcttcattgtaaagcgtaccaagcgtattgcttccatcatggtgggagagggtatgctgggccgtgtaatagaccctctgggtgcgccgctcgatggcaaaggactgataggcggagaactttatgaaatgccgctggaacgcaaggcgccgggagttatcttccgtcagccggtgaatcagccgctacagaccggtctgaaggctgtggatgccatgatacctatcggccgtggacagcgtgaactgattatcggtgaccgccagaccggtaagacggccattgccatcgataccatcatcaaccagcgtgccaattttgaagctggtgatccggtgtattgtatttatgtagccattggtcagaaaggttctaccgttgcctctatcgtgaataccctgcaccagtacggtgcgatggactataccattgtggtggctgctacggcgggagacccggctgcattgcagtattacgctccctttgcaggggctgccatcggagagtatttccgtgataccggccgtcatgcgctggtggtctatgacgacttgtccaagcaggcggtggcctatcgtgaagtgtctctgattctgcgccgtccgtcaggacgtgaggcctatccgggtgatatcttctatctgcactcccgtttgttggaacgtgcggcgaagattatcagccaggaggaagtggcacgcgagatgaacgacctgccggacagtctgaaaggcaaggtgaaaggtggcggttcgctgactgcattgcccattatcgaaactcaggcaggagacgtgtccgcctatatcccaacgaatgtgatttcaatcactgacgggcagatattccttgatacgaacctcttcaaccagggtaaccgtccggccattgacgtgggtatctctgtgagccgtgtgggtggtaatgcccaagtcaaggctatgaagaaggtggcaggtacattaaagattgaccaggcacagtaccgggagctggaagcgtttaccaagttcagtggcgatatggaccccgtgacggcattgaccatcgacaagggacagaagaatacacgcctgctggtacagccccaatacagcccgatgccggtagaaaagcagattgccattctttattgcggcacgcacggcttgttgaggaatgttcctttggacaaggtcagcgagtttgaacgcaacttccttgagtctcttgagatgaactatcgcatggaggtactcgacgttttaaagacgggtgccatcaatgacgatgtctgcaagaagattgaggagacggcagaggcggttgcaaggcaattcatgtaatttacgattggacgatttacgatttacgattggggctactctatatggtaagtggtaaatcggctgcaagcaaaagtaacttcaatcgtaaatcgtaaataattaaatcgtaaatagatatatgtcttcactgaaagaggtaaaaaatagaataagctccgtcaagagtacacgccagataacatcggctatgaagatggtggcatctgccaaactgcataaggcgcaggggcggattgagaatatgctgccttatcaacggaagctgaatgagattctgacgaactttctgcgtacggatgcttccttcgagtcgccctataccgagaaaagacccgtgacgagagtagcggttgtggcgttttcgtccaatagttccttgtgcggtgcattcaactcgaatgtggcgaagatgctggaacgggctttggaagattaccagtcgctgggcaaggagaatattctgatatatcccgttgggagaaagatggaggaagccgtcaagaaaatgggatatgtgccgcaaggcagctaccaggtgatggcagacaagccttcgtacgttgaagcgtatgagctggcagagaagttgatgcatgagtttgtggaaaagcagattgaccatgtggagttgatttaccatcacttcaaatcgatgggttcgcaggtgctgctccgcgagaattatctgcccattgacctgacgcaagtagcgcaggaggcggcagaagatgtaccggaggatgcccgcagttttaataatgattacattgtggaaccttccgtcggcgaactgatagcggaacttctgccaaaagtgttgagtcagaagatatttaccgtgcttctcgattccaatacttcggaacatgctgcccgtatgcttgccatgcagacggcgacagataatgccaacgagttgattcaagatttgacgaaacagtataacaagagccgtcagcaggccattacgaatgagctgctcgatattatcggcggtagcttgaaatagtccggattgccccgtaaagggctttctcaggatgggtacaaataaatggaataataggacaaggataacgaaataaccgctatctttgtcctattatcatatatggctactgatgaaatccgtatcattctgagagagagcggattggttgaataataaacatatcaatggagaataatcccgaaatagcgcttgcatggcaattcattgaaaacacaggcactcatctttttttgaccggcaaggcaggtaccggtaagacaactttcctgcgaaaactgagggcagagagtccgaaacggatgattgtacttgcaccgacgggaattgccgctatcaatgcaggcggtgtcaccatccactcctttttccaagtaccttttgctccttatgtgcccgaaagctcattcagcgcagatggcaaggcaacctaccgttttcgttacgggaaagagaaaatcaacattatacgcagcatagatttattggtcatcgatgaaatcagtatggtccgtgccgacttgctcgattcggtggatgccgtcttgaggcggttccgcgaccggaacaaaccctttggcggcgtgcaactgctgatgattggcgacttacagcagctgtctcccgtagtgaaagacgatgagtggcagatgctgcgcaaatactatgacacgccttatttcttctccagccaggccttgaagcagacggaatattgcaccatagaactaaagaaagtctatcggcagaacgatgggacttttcttgaattactgaaccgcattcgcgaaaaccgttgtgacgggcaagtgctggaagccttgaaccgccggtatattcccaatttcgtaccagataaagaagaaggatacatccgcctggtgacccacaattatcaggcccaacggattaatgaccatgagctggaacaacttccgggacgctcgtatgcctttcgcgccaagattgacggaaagtttcccgaatattcctatcctacggatgaggtgctggaactgaaacgcggtgcccaggtaatgtttgtgaagaacgacacctccggtgagcaccgttactacaatggcatgattggagaggtgacagccgtgtcggcagatggaattgaagtgcgcagtaagggaagcgacgctaccttcttacttcaggaggaagagtggacgaatgccaaatacgtgctcgatgaggaaaccaaggagattacagaagatattgaaggaacattccggcagtatccgttgaaactggcttgggcaattaccatccacaaaagccagggactgacgtttgaacgtgccgtgattgatgccagcgcctcctttgcgcatgggcaggcgtatgtggctttgagtcgctgcaagacattggagggagtggtgctcagtgccccgctttctgcaaaggccgttatcagtgaccatgcagtagataccttcacgatggaggcacggagaaacgagccggacgagaaacgcttccgttccttgcagcagacctatttcctggaactgctgtcgggcttgttcgatttccagcccatggagcaggctttgcggcggtatgtgcggctgatagacgaacacttgtacaagctctttcccaagcaactcgcagcctgcaaggaggaaatggaacgttttcacgacaaagtgacgaaagtagcccagaagttcagtatccagtatacccgcctgattgatactgcgcaggactatgcagccgacccgactttgcaggggcgcatacactctgccgccacttattttcaagagcagttgcaaccgctggatgcggtgatggcgagtacggtaacttctgataataaagagttgaagaagaagctccgggatgccatggaggagctggaggaagtgtttgacatgaagactgatttgctggattatgtgctggagaatggtttccatatggcaggatacttgaagcagaaagcactgctttccattgatgattcggcttcgcagaagggtaaaggcaaagggagaagtgcttctgccaaagaagggcagggaagcagtaagcaggctgataaagagaaacgtccgcgtgagcggaaacgcgatgctgcggctgttgaagtacccacggatgtgctgcatccggaactttacaaccgcttggtagcatggcgcaatgcagaagcttccgcattagggctgcccgtatacaccgtcattcagcagaaggcaattctaggcatcagcaatctgcttccttcggataaggccatgcttgtacgcattccgtatttcggaaaaaaaggggtggagaaatatggagatgtgattctggagatggtacgtgtgtatcgcaaagagaaaggactggcagagccggagttgctgtagtcgaatctgctgccatccgcacctgcattatttaccatccgaacatctgctttattccttcttccagcgtgtgcggctgataccccagttcccggcttgccttttctatactcagcccgctgaaacggggacgtggcgtcttttcattcatctccttcgtagtgacgggacggatgagcgagcgattcagccccaatacgtccgctacccgataagcgatgtctgcaatggtcaggcactcgctgccacagagatgatagataccgttttgcggatgacttatcagcttctccactccttgcgacacgtctcccacgaaggtgggcgtacgccattggtcggatacgacgaacacttcctcattgttccttaatctgtttgccaccagttggagcacattgccatgctgtccgggcagggcggcaccgtacactaccactacacgcacgatggcataatccctgcaaacggcggcgatacgtttctcaccttccagtttggtgtagccgtaataattaacgggagcgggaatattctcctccgtatagggtcggtccgtatcaccaccgaaaacgaagtcggtggaaagatggataaaacggctgcctcccgcctcacagcattctgccagatgctccacggcagtaatgttgacggcatccgcttctgcatggtgcgtttcgcagtaatcggggacggagagggcggaggtattgattacaacatccggctgtacttcctggaaaagcttttccaccgcctggcggttgcatatatccgtacggataaagcgatagtcgcccgaatggggacagatgtcgtcgtgcagggaacagcccgttgtctggtaagacaagttgcgggacaaatcatccaggatgcgtctgccggtaaaaccgttggcgcctatcaccagtattttctttcttgtcattgattctgttgttaagtgatgggcatcaatagggcacgtgtctgccctgctgtacctcgatgcgtatgccaaaggctccgttggctgatttcagctcgaacgcccctttgaaattgttcttttcccaaggcagtgcggaagggttgggcactttccagccgtccttgtcatattcgccgtacgtatggatgcgcatgccgttcttcaaagtgaaacttcccatttgcaggttgtcagtagagccccagaagcccgtcagtccgaagggattcgaactgaaataccgggagttgctgagtgagaatatgttcgaaaggccttgtgaataagtcacgttcgggtttaaccggaagatgcggctgtagtccttgctggcatccggtatctccaaagtgaatttgggaagagtgggggcagacagattcatcagccccatatccagcaggaagccgtcgtaattcttcacgtccggcagaagctccttttcagacggagacatgccttcgggagacgcttcgccacgtactgcagtacgtaccgtatcggcaggcatctcgctctgtgcgctgacggatgacatgcctgcaagtaaaatgatgatgcagaagaagattcgtttcatagttctttgttcacaatttcagttgctgtctgccgcataggggcggactgaacaaagatactcgtttccctctatttccggaaatatctttgtattatttctatttctttatacgaatggtaggggcgaagacgggcgaagtcacccatttcattttggtggggtcgtagctccgtcccaggcctccgttgaggtcgagccagtccgtcactttcagttccagtaccatgccataaccgctttgcggatacatcgggttcatatatccatgaaaggagttgcttctcccgtagcccgaatactggccgaaggcatgcaggcgcatgtagggattgatgcggtaggatacggaggcattgtagcctatgtcccattgagtacctcggggggcatcccttttggcatactgggcaccggtaatggatgaaggttgggagatggaataatgggcggcatatacccctccgctcaattcccaatgtccgtcgggactgtaataagtaactcctgcgccagcctgcatgatggagcccattgcaggataggtgttatggctgccgtacatcgtcagtacgacttccggcgagagcaggaaatcggcgaaacgctggaagtcccattcaaagatgtttttctgaaagtgtatcttcttcatgtccgtccagggcaggggctccacatagtcggagggagggagatggagatttatctcttcctgctgttcgccctgcagactttgttggggctggctttcatcaaggcctgtacgcttgttctcttttggagaaaagggaatctgctctttctttacgggaggccggttctttattgtgtcttccggaatctcgctctgtgcataggcgcagagtgaggaacagataaaagtaatgaataataactttctcataaatagtagtttagttttagtttagtttactattagtttatatcctattccccgcacattgacgatacggatgcgctcgtctccggccagtttatgccgcagtttggtgatgaacacatgcaggctgcgggagttgaagaagctgtcgtctccccagaggtcgagcaatacgttctgggtgttgaccacctggttacggttctcgcaaagacgtttcagtatctcggactcgcggtgggagagttccacttccgtatccgcgtcaggtgaagtcggggtgctgcctgcaaaagcaagtcgttgagtgacggaattgaaacggtagtcaccgatttcaaaaacggtagtttccttgggattttcttctgtaaaggagaaagctttgcctaccagggcctttatgcggataatgagttcctgcattccgaaaggctttttcaggtagtcgttggcacccagctcaaacccttccaccacatcgttgatggtggagcgggcggtaaggaacagtaccggggtctgtttgtcggtctgccggatgcggcgcaccatttcaaagccgtccatgcggggcatcatcacgtctgccaccagcacgtcgggacggaggtcgaagaacttgcgcaatccctcttcaccgtctgctgcggtgtggatgatgaagttctgcccttccaatgtgtccttgataatcatggcgagggtctgttcgtcctcaaccagaagtacggttatcttttccataattgtcgcttttgttacaagtaatgtaaagctccttaacaagtaatgtaaagtaccctaacaaataatgttatcatatccttatcgtaaaggtacttccttttcccaactcactctttaccgatacgctgccaccatgcttctctatcatggtcttcacatagaacaatcccagcccatagcctttcacatcgtgcagattacccgtgggtacgcggtagaatttgtcgaagatgtgcttctgcttctcgggagcaataccgataccgtggtcgctgacggagatttcggtctgttcattctgcccttcgacggttaccttgcggcaatggatggccacttcggcctctccgtgcgaatatttgatggcgttgtctatcaggttgctgatgatgttgctgaaatgcgtgcggtcggcaagtacgctcaaatcttccggttcgatgtccaccgatatgtggacggagctttccgctttcagcttgtgttgttcgatgagcgtttccagaatatcacgtattgcaaactcctccgggtgcaggcggaaagtcctgcggcgttccatactcatggaaagtatctgttcaaccagtccactgaggcgctgaagctgttcctggcagatacgcaggtatttgtcgcgttgggccttttcctccgcttggttgaagttgagcagagcgtcgttggcggcgtaggctacggcgatgggggtcttcagttcgtgggtgatgttgttggtgaaatcgctcttcatctcttccagtgtcttctgtttcaggatggtgcgtatcaggaaccagaaggagaaagcgagtacaatcaagatgatgaatgacgtggtgagaatgcccgacatctgccgcagaaccagcatgccgaccggttccatgatgagacggtagctttgacttgtattgatgtcgaaagaataattatattccacagcttttgaggtaggcacatagccgggagtaccgatgtttaccaatgtatctatatagagaatggtagagtcccatttactgcctttgtgaagatgtagcagcctatggggaagattgatgttacggtcgtgcaggaatgaagtcagcaggctgtcataaagcactacgtcggggtcggaaatgatgtccagtcccgaatgcagtccgcgctggaagtaggtggcgagttccagcatactgttttggtcgcgcaaaatcacatccagtccccctttggcactcaatgcggattggggagagctgtccgagtccctgacactgacttccacgcgggttgaatcgttcgggtgggtcacgtaaacactgtctcctttgggcatgaaggtttcgtgcagggtggtgttgtccaaagaatcttcacgggagatggtggtactgctacggacaaatgattttccgtcatcgctgtatccggctgatacgctgacttcaccgtggtttatgtcgtcctgcttcattttatccacgcgtatcatcatttcgttatagtcgctcatgcgcatggcttcggtgatgtccctctccatttcactgtgcatggtatggtagagccccgtcagccagtaggcttggtaggcgaagatgccggccagggagacgatgacaagtatggcaatatatttgaatggcagtttcatgtttgtttccggttacttttatacatacaaaggtaagactaatattgtgaaccctatcatccgataagactaaataacactcccgataacactggataacacttggtaagccgctgataacacaagtttctgctgattctgccgtactttgcagacgaagatttacagaagaagaatatgaacataaataaaaagaagaacatgaaacgattctatttactccctcttgtatgctgtgcattgagcatcagcctttcggcacaagagaacaacggcactgcaaccacctccggtgcggacgacaaccgtatcctcagcgccgacagccttatcacgaccgatgcccgtctggacagcctttatcagaccttgccggaagtgatgattaccggtgaacgccccatcgtaaaggcagcgcaaggcaagctggtgtacgacctgccccgccttatccggaacctccccgtagacaatgcctacgatgccgtgaaagagcttcccggcgtcatcgagatgaatggcgggctgcagttggcaggccagggagtcaccgttatcctggacggtaaagtaaccaccctcagcacagggcagctctatgccttgctgcgcagcatccctgccagccgcatagagaaggcggaagtgatgtacaacgcccctgcacgctaccaggtgcgtggcgcacttatcaatatcaccttgaaacaatcggcaggcggccccggctcctggcaaggcgaactctacgtcaagtatcgccagaagcacaacgaaggctttgaggaacgcgccagcctgctcttcagcaaaaataaattctcagcagattttctttactcgcacagccatggccggggctactctactaccgacaaagaggctgtgcacaccctggcggacggctcggttcaccccatgacaacagatgaggtgggccgtggccgcagccatacccataatttcagggtaggggcggactatagtatcgccaagaaccatcagctgagtttcgtctataacggtggctattccacctcccacaactggaagggcgtgacgggcacgcaggtgtccacaactcatagcaatagcaccgactggctgcacaacggccgtctggactatcgtacccctttcggcctcaaagccggtgccgaactgacctactaccgctctccgtccaaccaactactgcatagccgtatgcaggatgaggaactcgatttctacacggaagactgtcagcgcatcaaccgctggaagttctttctggcccaggagcata

SEQ ID NO: 4471 - DNA, 23789 bp, Unknown
  gut microbiota DNA sequence
cccgataccggtgaacagttgacctcatcagatgccttgagcaatatgaagtcccgccgccgcgagcaaacttggaatatctatgcaggtttcagcaagagtttcggcgacaaacttgctttggacgcttctctggctgtggagcattacaagactcccgtctgggaccagtgggactggtatcccattgtcaacttgaactatatgccggcaccgggacatatcctccagctctccttgagcagcgacaaggactatcccgactactgggccgtgcaggatgccgtctcttacatcggcggcggatactctgagctgcatggtaatccgttgctgaaaccggcacaagagtatgagctgaaaatgacctatattttgaaaagcaaatacatcttcagcgcctggttcaaccacaccaaagactactccgtacagacgctttaccaatcttccgaacgtctggttgaaatctacaagacactcaattttgattatcagcaacaagcaggaatacaagcctctatcccatttaaggtgaaggattggttgaattctcgccttaccctcatcggcttgtggcatcgcgaaaaggatggtgatttctgggatattcctttcgacagaaagcaatgctatggcattgcccagatgaacaatacttttactctctccaccaaacccgacttgaagctgacggtgaccggatttgtgcatagtaaagccattcagggcatctacgacctgcctacgtcgggcaatgtgaatattgccctgcgctacggctttgccaagaacaaagccatcctcaacctctactgcaacgatatttttgagacgggacagatttctccccgcatccgtttcaagacgcagaatgtgacgaatcattactcatgcttccgcgaattcggcgtatcgtttacctataaattcggaggatataaggagaagcaacgggaggcggtggatacgtcgcggttcaaatagatagaagatgcaggtggtcaggtgaaaatacggtattcttttgtactttgccacatctttcgtacttttgcaactttcaaaacattaaagttgttatttaaagaaaagactctgtatgaaatcggacattgaaatagcccgcagcatagagctgaagaagataaagcaggtggctgaaagtgtggatatcccgcgtgacgaagtagagaactatggccgttacatagccaagattcctacgcatctgattgatgaagagaaagtgaagaagagcaatctgatactggtgacggctatcacggctacgaaagcgggtatcggtaaaacaaccgtgtccatcgggctggcattggggctgaacaagattggcaagaaagcgattgtggctttacgcgaaccctcgttaggtccttgcttcggcatgaaaggcggtgctgccggtggaggatatgcccaggtgctgcccatggagaagataaatctgcactttacgggcgactttcacgccattacctccgcacacaacatgatttccgctttgctcgacaattacttgtaccagcatcaggcggacggcttcggactgaaagaaatcatctggcggcgcgtacttgatgtgaatgaccgttccttgcggagcattgtcaccggattgggaccgagcaccaacggcattaccgaggagtcgggcttcgatattaccccggcttctgaaattatggctattctctgtctggcaacagacctcgacgacctccgtcgccgtattgaaaatattattctgggattccgtttcgatggtactcctttcacagtgaaggagttaggagtagccggtgccattaccgtactgttgaaagatgctatcaaccccaacttggtacagactaccgaaggctctgctgcttttgttcatggaggaccgttcgcaaatattgcccatggttgcaactccattcttgccacaaaaatggccatgacatttggcgattatgtagtgacggaagccggtttcggggctgacctgggtgcggagaagttctacaacatcaagtgccgcaagagcggcctacagcccaagctgacgataatcgttgctaccgcacaaggactgaagatgcatggcggtgtcagtctggaccgcatcaaggaacccaatatggaaggactgaaagagggcttcggcaatctggacaagcatgtacgcaatttgcgttcattcggccagcaggtcatcgtggcattcaaccgttttgccagtgatacggacgaggaggtggaagctatccgccgccattgcgaagaaaagcttgaggtaggttttgccgtgaacaacgcctttgccaaaggaggagagggagccgttgaccttgccaatctggtagtagatactatcgagaacaaaccatccgaaccgctgaccttcacctacgaagagagcgattgcgtggaacgtaaaatagaaaaggtagcctgcaacctctacggggcaagcgtagtgacttacagtctccactcccgcaaggttatcaaactgatagagcagatgggtatcagccattaccccgtctgtattgccaagacgcagtactccttctctgccgacccgaagatatacggtgcagtcaacaactttgagttccacatcaaggatattgtggtcaataacggtgcggaaatgattgtagccatcgccggtgaaattctccgtatgccgggattacccaagaaaccacaagccgaacacattgatattgtggacggaaatatagaagggctgagctaaacgcgcggagcgcgtttagaattaaaaattaagaattaaaaattaaaggctgcgcaatgttcgctttgaactgcgcagcctttaatttttaattcttaatttttaattctgtttgcttattaataagcaaacagcgggtattctttcatcttcgcattgacgcgtgcacgtacctctgcgatgacttgttcgttgtctacgttggacagaacggtttcaatcatctcggcaatttcgagcatcaggtcttccttggcaccacgggttgtgatggcaggagtacccagacggataccggaagtctggaaagccgagcggctgtcaaacggaaccatgttcttgtttacggtgatgtcggcagataccaacgccttctcggcaaccttaccggtcaaatcgggatatttgctgcgcaggtctaccagcatggagtggttgtccgtaccgccggaaacgatggtgaagccacggtctatcaaggcttgtgccaagacagcggcgtttttcttcacctgcttggcatattctttccattccggttgcaggatttcgccgaaggcaacggctttggctgcgatgacatgttccagcggaccaccttggataccggggaatacggctgaatccagcaactgggacatcatcttgatttctcccttcggagttttcttgccccaggggttggggaagtccttacccatcatgataacgccaccacgaggaccacgcagagtcttgtgggtagtggaggtcacgatgtgggcatatttcacggggttatccagttcaccggctgcaatcagtccggcaggatgagccatgtcaatcattaggatggcacctatcttgtccgcgatttcgcgcatgcgcttgtagtcccattcgcgggaataagcagaaccgccgccgataatcattttgggtttctcgcgcagggcaacttcttccatctggtcatagtccacacgtccggtttcctggttcagattgtattcgcagggagtatagataataccggaagtgttgaccagtgagccatgggagaggtgaccgccgtgtgcaaggttcagtcccatgaatttgtcgcccggattgagcacggcgaggaatacggctgcattggcttgtgcaccggagtgcggctgtacgttggcccattctgcgccgaagatctgtttcaagcggtcgatggcaatctgctcactctggtccactacctcacaaccaccatagtaacgcttgccggggtatccttcagcatacttgttggtgaggcaggagcccattgcctgcataacctggtcacttacaaagttctctgatgcaatcagttcaatgcctttgagctgacgttggtgttctttttcgataagttcgaaaattaaatcatctcttttcattctgcttattagataagtttgataaatctgtgttctcttattaagcgcacaaatttacgggaaataaatgaataaattgaaagaaaaggaagaaatttactgtcaaaagaacactccgaaagaaaaactcagcacattgtccctgcggtgaaaacggatttcgtttttcgtgttttcgtcagcagcgttgttgtcggccggaatatcgtatgtcacgctcttggagatgttgtgcagccccatgtcgtaacggaagtcgaaaaagacgcgtgagatggtgacggatacgccgacggtgaaactgagattgagcggacgcagcctttcacggatattcacctggtcgaaattctcgaagtcgatgtcacttttcctgtcccatatatagcgcactttgggtcctccaaagacggcaaggctgtacggcccctccttgatgaagttgtatccgtagatgacggggatgtctatactgtggatggacgatgtaatggaggcttcctccggccgggctcctgatgcggcgtcttcgggcagaggtttctcgaaggtgatgttgcaccggttgatgttgtaggatatttccggttgcaggaagtggcggtcgaagtttatccgcatgaaaagggaaccgaaatatcctattttgtaattgttctgcacttcgtcaatgggcactccgttgacgctgaactgggatacaaggaacaaggaagaggtgaaaccgcctttgaaaccgaaattgaccggagtttccttgcggtgtctggaatgctcttcgtcggcagtaccgggcacaaccggagtctgtccccacatcatggcggggaaggccaacagatataagcccatcaagattcgtcgcaactccatctcttaaaacctttatcgcattattacttctttttctctactgaccatccgaatttgcctatcttttctcccagctcataatatccaccgtgcacatagaccagcggattcgtttccgccagttccagtttgccggtttcagggttcagattacgggtatcggcacgtacatttaccacatccgctataaacatgtcgtgcgaaccgagagccataatctcctttacccggcattctatgcaaagcggtgattccttgataagaggcgcgctgactacggtgcttttccccggtgtcagatgcatttcctcgaatttgttgtagtcctttccggagcgtacgccacaccagtccgtggcacgggccatgtctttcgtggtgagattgatgacgaattccatattccgcttgatgatgtcgtaggagtggcgttcggggcgtacggagatgtagcacatgggcgggttcgtacaaatcgtccccgtccatgcgatagtcagaatgttatattcctccggagtgcttccgcagctcaccaatacggcaggcagcggataaatcattgttccgggtttccagtcttctttcatataatctcaatatcttctctggtctgctccttttcgcagtagtggcatttgatgacgcaattgtccttatccacgacatgaaacaacgtaggcataggctcattgttcgtgatgcacttcgggttggcgcatttcacgattccgcgcagctcttcgggcaggcggacttcgcgtttctccaccacttcgtagtcgcggataatgttcagttttacattgggagccaccacggcgatacggtttatctcttcgtcgcagaagaacttgtcggcaatcttgatgatgcctttcgtgcccagcttcttgctcttgaggttgaagccgatggtgatattgttgctcatgtgttccagtccgagcagggagactacggtaaacagtctctcggagggtatatggtctattacagtgccgttttccagagcagcaacctgcaattcctgtttcttttcgcttaacatcttgaaatattagttattagacgattctactgaattactcctttactctttttcacctcatccagcgtgatgcccagtacatcgcacagaatagcttcacgggcatacagtccgttttgtgcctgctggaaatagtatgccttgggattgtcgtccacatcataggctatttcgttgacacggggcagcggatgcaggatgcgcaggttgggacgggtatgttccagcatcttgttgcgcaggatgtagacattcttcacccgctcgtactccataaggtcggtgaagcgctcgcgctgcacacgggtcatgtagaggatatcggcatcagcgatgatttcttccgtaaagtccgtatgttccacgtacttgatgttgtgctcgcggcagtagattttgtattcttcgggcatccgcaactcgtcgggagcgatgaagtggaaagtggggttgaagtggcgcatggccatcagcagggagtggacggtacggccgtacttcaagtcgccgaccagaaaaatgttcaggttttccagtgtgccttgtgtcttgtagatggagtagagatcgagcatggtttgtgagggatgctggttggcaccgtctccggcattcacaatgggcacggtggtgacttcactggcatagcgtgcggccccttcgaggtggtggcgcatcacgatgatgtcggcatagttgcttaccatcttgatggtgtctttcagcgtctcgcccttggatgagctggtggcctttgggtcgctgaacccgatgacacgtgctccaagccggttggcggcagtctcgaaactgaggcgtgtacgggtggaaggctcgaaaaataaggtggcaactactttcccgtccaatatatgccgattgggatgggcttcaaactctttcgccatctcgagcatatagaggattttttcccggctatgctcggcaatggtgactaaacttctgttttccatatcgttgaattcatttatacttttcgagagtgtaaagttacggaaaatatgcgggctacggaaatatgcggggaagttttttgcgaaatatgggctgtttttttaaccgtgtggcttgttgtccggaatgccacacttcatcatccgaaatgccacacttcgacaaagtaaatgccgcatttcgcgaatgttcaagtgtggcatttgccttagtcaagtgcggcgtttgccttgtcgaagtgtggcattccggacagtgaagtgtggtatctctttacgccgtcgccgtcgttctttttaacgacaacgtcgtttttttctcttctcttcttatcttatctcctcttacgcgcgcgagggcaagttttcattgtttcaatctgtattatagctcattacgatgtgtttttcctttccgattttttcttcaagttttctaattattttgcaatcgttttgcatttcactgacagtttccattaaaataaacgggcgttttttttgtgaatgccggaaatcttatcctgaaaaagatataaaaagcataggcacatccaatatatttccgtacctttgccctattattgaactttgattttagcaactgaaacatgataaggaaagtcgtcaaaatcctatggattttcatcgcactgatttcgctggtgtgtgtctttatattcttttccatagccaagggctggataggctatatgcctccggtggaagacctggaaaatccgaattacaaatttgccacagaagtcttttccgaggacggaaaagtattgggtacttattcctatagtaaggaaaaccgcgtgtttgtgggatacaatgatttgtcgcccaatatcatcaacgccttgatagctacggaagatgtacgttttgccgaacattcgggcattgacgcctacgccctgacgcgtgccgtagtgaagcgcggtatcctgatgcagaagaatgccggcggtggcagtaccatcacccagcagctttccaaacagctttattctcccagtgccgacaatgtgatggaacgtctgttccagaagcccatcgaatgggtgattgccgtaaagctggagcgttactatacaaaagaggaaatcctcaccatgtatctcaacaagttcgatttcctgaacaatgcggtaggcatcaagactgctgcctttacctacttcggttgcgaaccgaaagatttgaagattgaggaagcggctacgttggtgggcatgtgcaagaatccgtctctctataatccggtgcgctacaatgaacgttcccgtggacggcgcaatgtggtgctcgaccagatgcggaaagcgggatatattacggaagccgagcgcgactccctccaggcattgcctctgaaactgaagtacaaccgtgtggaccacaaggaagggttggccacttatttccgcgaatacctgcgcggcgtgctcaccgccaagaagcccgacaaggccaactaccgcggttggcagatgcagaaatactacgaggattcactcgactgggagaacaacccgctctttggatggtgcgaaaagaacaccaagaaagacggtaccaaatacaacctctacaccgacgggctgaaaatctataccacgctcgactcgcgtatgcagcagtatgccgaggatgccgtgacagagcatctgaaggaactgcaaggttacttcttcaaggaaaagaaaggggccaagaaagctccctacaccttccgtctgacccaggagcaggtggacgagattctgggacgtgccatgaggttgtccgaccgctaccgcattatgaagaaagccggagccaccgaagctgaaataaagaaagccttcgataccccggaggagatgtccgtattcagttgggaaggggagaaagacaccattatgaccccgatggattccatccgttactacaagttcttccttcgtgccggtttcatgtccatggacccgcgcagcggacatgtcaaggcatacgtaggcggaccgaactaccattacttccagtacgatatggccatggtgggacgccgccaggtaggttctaccatcaagcctttcctttatacattggctatggagaacggtttttctccctgcgacgaagtgcgccacgtggaatacacgctgattgatgaaaacggaaaaccgtggacgccgcgtaatgccaacaaaaagctgattggtgacatggtgaccgtgaagtgggggctggcaaactcggacaactggattacggcctatctcatgagcaagctgaacccctataatctgaaacgtcttatacatactttcggtgtccgcaaccgtgatatagtaccttccgtttcactctgtctgggcccgtgcgagatttccgtcggcgagatggtaagtgcctataccgcattccccaacaagggtatccgggtagctccgctgttcgtgacccgcatcgaggacaatgatggaaacgtgctggcgacctttgctcccgaaatgcaggaagtcatcagtgtatccagcgcttacaagatgctggtcatgctgcgtgccgttgtcaacgaaggtaccggaggccgtgtgcgccgtctaggtgtgaaagccgacatgggcggcaagaccggaacgacgaactacaatgccgacggctggtttatgggcttcacgccttcgcttgtgtccggttgctgggtgggcggtgaggaccgcgacatccacttcgatacgatgcttcacggacaaggtgcttccatggcattgcctatctggaccaaatacatggtgaaagtgctcggtgacaaatctctgggatatgatgaaaatgaaacattccagttgcccgaaggctatgacccgtgcaaggatgatgtgaatctggaaggagacacccatatagaagaaccgatagagggactcgacgaactgtttaattagttgaaaggtgaaaattgaaagtggaaaggtaaactttcaattttcaccttttcccctttcaccttaaaaaaatggattatacgattagtattgggagcaacgagcagcggagggagaacatggaactggctcgcagacgcttgacggaacttttttcgggaatacgtttctcggaagaggaggagacggtacctttgttctttcaccgtccgaatctgttctccaatcaggtggcatgctttgcttccgataatccggtagaggaagtcaccgcctgcctgaaagccatcgaacgggaagccggaaggaagcccgaggagaaggagcaggaaattgtacggctggatatagacttgttgtcttgtgacgggactgtctataagccaaaagatttgaaacgtgattatatcctgcgaggattgaaacaactgttataattaataaagaatataaggagatgggtcgatagtatatgaacactttcggacacactctcattttaaaaaacgaagattgaaaatgaaatttttaggaatcatacctgcccgttacgcatctacgcgttttccagccaaaccattggcggtgttaggtggaaaaaccgtgatacagcgagtatacgagcaagtggcaggaatcttggacgatgcatacgtggctacggacgatgagcgtattgaagccgcagtaaaagcattcggaggaaaggtggtaatgacttccaccgaacataaaagcggcaccgaccgctgtcaggaagcttgtacaaaaataggaggacagtttgatgtcgtggtgaatatccagggggatgagcctttcatccagccttcgcagttacaagccgtcaaagcatgtttcgacgatccggccacccagatagccactctggtgaaaccctttacggtagataatggttttgaggcactggaaaatgtgaactctccgaaggttgtgctcaacaaaaacaggaatgccctctattttagccgttccatcattccctaccagcgcaatgcggcgaaggaagactggctggagaaccatacgtattataagcatatcggcctttatgcctatcgcgtagaggtactgaaagagataaccgcccttccgcagtcatccctcgagattgccgaatcattggaacagcttcgttggttggaaaacggatacactatcaaagcaggtatcacggatgtagaaactatcggcatagatactcctcaagatttggaacgggcagaagaatttcttaaaagccatgggctgtaaactagaaagcccatgctgaaccgaagtgaccaaccccggattcttgaaccggaacaactggtggtgcaaaggccggaacgtatcaagttgcctaatggcgtgccattgagtgtgctcaatgccggtgacaatgaagtgacacgtatcgatctcctcatggcaggcggccgatggcaacagaaacagcccttgcaggcgttgtttacgaaccgcatgcttcgcgagggaacccgacgctacgatgccgcccagatagcggaaaagctggactattacggagcctggctggaattgtccagtgcatccgagtatgcctatgtcaccctttattctctgaataaataccttccccaaacgcttgacatattggagtctatcgtcaaagagccggtatttcctgagaaagagctgggagtgattgtagacaacaatatccagcagtttcttgtcaactcttccaaggtggactttctggcgcaccgcggattggtgaaggctctgtacggcgggcagcatcccggtggacgtctggtgcaggaagaggattatcggcgcatcactcctgcggtgctacgcgagttttatgaccgttactatcattccaataattgcagcatctatctctcgggtaaggtaaccggtgattgcatccacaggatagagtccttgtttggctgcgaggctttcggtacggatttccgcaaaccggagaagactgaattccatccggttaccacctccggaaaacgtatcttcatcgaacgtccggacgccctgcaaagtgccgtccgtatgggcatgctttccctggaccgtaatcatccggactacttgaaggcccgcgtactggtcacactgttcgggggttattttggcagtcgcctgatgtccaatatccgggaagataaaggatacacatacggtatctccgcagccatcatgccctatccggggcagggagtgttggcggtcagtgccgaagccgccaacgaatttgtggagcctcttatcggtgaggtttatcatgaaatagaccgccttcagaacgagctggcttccgatggagagctttccatggtgaagaactatatgttgggagacatgtgccgtagttatgaatctgcattctcgttggcagatgcctggatttttgtgcaggtatcgggcttgcaggatacctactttaccgaagcactggatgctgtcaaggaggttactccacaagaaatccgtgaacttgcagggcggcatttatgcaaagagaaattaaaagaaatagtgtgcggcaaaaaaatgtcataaaaagcgggagttatcgcatcattttaccggataaatcctacctttgtcaattatcaactatcaattatcaattaatgaaatatctatatactgcactcattctggctttcttatgccaaggtggagccactgcccaggaaaaaaaaagcggctttttcgataaagtgaaaagtacattctcttcggagataaagataggtacctatacgttcaaagataacggggccgtctataccggtgaaataaaaggccgcaagcccaatggaaaggggaagaccgttttcaagaacggcgacgtctacgagggtgagtatgtgaagggcaagcgtgaaggctacggtacatatatgtttcccgacggtgaaaagtatgaggggcaatggtttcaagaccagcagcatggtaggggtatctactattttatgaataacaaccgttatgacggcatgtggtttcaggattaccagcacggtaaaggaaccatgtactattacaatgatgatatttatgagggcgactgggtgaatgataaacgcgaaggccaaggaacgtatacctggaagaacggttccaagtatgtaggctcgtggaagaatgacaagaaagacggcaaaggaacactgacctggaatgacggttccaaatatgacggggagtggaaaaatgatgtccgggacggtaaaggaacttttgaatatgccaacggcgacaaatatgtaggtgactggaaggacgacatgcagcatggcaaaggtatttactttttccataccggcgaccgttacgaaggttcttatgttcaaggtgaacgtaccggagagggcatttattaccatgccagcggcaacaagtatgtgggcagcttcaaggatggaaagcaggaaggccacggcacatttacgtgggcaagcggcgccgtttacgaaggtaattggaaagataaccaacgtgacggatacggtacttacaaatggaatgtaggtgactcttacgaaggtgaatggaaagacaataagttcaacggccaaggtaccctgattcagaccgatggaaccaaatataaaggcggttttgtgaacggtatggaagaaggtagcggtatccaggaggacaagaacggaaaccgttatgaaggcttcttcaaacaaggcaagaaacacggtccgtttgtagaaacagacaagaacggaaaggtgatacgaaaaggaacctacaagatgggaaggctggagaattagaattaaaaattagaaattaaaaattaaaggctgcgcggttctgaagtgaacattgcgcagcctttaatttttaatttctaaccgcggagcggttagataatgtattgtgaactgattgattcattgttcatcacccgcttgatggtttcggcgaacatatcggcaatgctcaactgtttaaccttgtcacattttttagagtaggggatactatcagtaaataccatttccgttagtgcggattcttgtacacggaaagaagcagggtcggacattacgcagtggctagcaatggcacggacagatttggctcctgcttccagcatgatgttggcagccttggtaatggttcctgctgtatctacaatatcgtctaccaatactacattcttgtcttttacatcaccgatgatttgcatggtggcaaccacgtttgctttttcgcgtgtcttgttgcacaataccagaggtacaccgaggtatttggagaatgtgctggcgcgttttgaaccgccgacatccggggtggcgattaccaagtcttccagtttcaaggattcaatataggggaggaatactgctgatgcatacaaatgatccaccggaatattgaagaaaccttgaatctggtctgcatgaaggtccatcgtaatcagacggtcgatacctgcaacagagagcaggtcggccaccagcttagcgccgatggaaacacggggtttgtcttttctgtcctgacgtgcccaaccgaagtaagggataacggctacaacgctttttgccgatgctcttttagcagcatcaaccatcagcagaagttccatcaagttgtcagaattagggaaggttgattgaaccaggaatacatgcgagccacggatagattcctcataagagactgcaaactcaccatctgcaaaatgggtgatgttcatctttcccagagggcaatcaaggctagcgcagattttctctgcaaggtatctcgaatttgttccggagaataccataaagggtgctttttcgctcatttgtgtaatagatgttacctatttgttaatttgcatgcaaaggtaggaatttcccgttacataaaacaagagttattgtataaaaattatttttctttcccggatttattcgtagctttgctttatgaaacgactttcttttatatggtttgcggggttgttgtgcctttgtacaacaatggtttcgtgtgtgggaacggcacccatgaaggaagtacgccttatcgactctctaaaccaggtggcttatgcttttcgttataaaaacctggattcatcctgccatgcggcatcaagggcctaccgtgaagtcagcctctataaacaaggaaaagcggaagcatccaataatctgggcttttgtgcttttatgcgcatggattttgagcaggccgaaaagtttcatatggatgtctataatctgaccaagaatgaactggaactccttattgccgacatcggtttgatgaagatttatcagcggacggcgttgaacaaggagttctacgattatcgcaatagtgccttgcaccgtatgaaaagaatagcggaggatgacaatctgtttgtggaccaacacgagcaaatgcgtttgaattatgcccgttcggaattttatattgtatctgctgtgtattattattatttgcaacagcgtccggaagctgtagcctctattaatgaagttactaaaaaacaagagttgctggcagataccaatcagctgttgtattatcactacatcaaaggttctgctgccttatgcgagggtgagacaccggatgagcgaagactgagagaatttgatgagctctataccgcatggcagttggcttcgcgcaagggctatctttactttgagggcaatggagtgcagggacttgccaacttgatggcttcaccggataattacgcattttttcaagaccgccgctcccatgccttgacacgttttggagtaccggtagattcgctgcttcccatgcgtctggggcagttggcattgcaaaaattcagccaatacaaggatttgtatcagatagcaggtgcatatgtatctatcggcaaatacctgaatgcccacagtcactatacagaagctcttgacacgctaaaacttgctctggaatgtgtaaatgaccatcaccgccttttctatgactgccacgatagtttggactggctgaaagcatttgaccgtcgagatacgatttgtgcggagaaggcatggatggagcagaaactgaaaaccgtgcccgagtggatttcacgtattcgtgaacagttgagcgtttcgtatgcaggactcgggatgaaagaaaaatcagactataaccgcaatatttacctggatatccttgaagatacacgccaggataaagagctggaaagccgctatcaagcattggaaaaggaggcggggcagctcaacgtcgtgttgtcactggtcattgtgggcttcgtgcttgtatccctcttcttctggtttttcaacaagcgttccaaagaccggaacagagtgcatctccgccgtctgcagctgatgctggatatctgtcagaagataacggcatccattccggcagatgcacagactgaggaggaaatcgtcgactctatccggacggctgtctgcccggaattggaaaagctgtttggagtgaaggacatccgcatagacaacgggcaattagtgttcccgcgtcggatgagcaaggatgagcaggcgatggtacgggtgataactccctatatccaatgggcaatcgacaacggcatgacgtccatctcccttggcgacgaacgccgcagactggaaaagcaacgctacatttacgagcagcacatcgcggggaacaaacggcaaaatctgataaagaaagcatgtatggctattgtcaacggaattcacccgtacatagaccgtatcatcaacgaagtgcagaaactgactcaaaaaggattcattaaagaggagcggatcaaagaggagaaataccagtatatcgacgagttggttactaccatcaatgaatacaatgatattcttgccctttggataaagatgaagcaaggaagccttagcctgaacatagagacgttcgaattgaatgaacttttcgagctgcttaggaagggaagccgtacattcgagatgaagagacagtcgttggaggtgcagcctacggatatccgggtaaaggcagacaaagcccttacattgtttatgataaatacactggcggagaatgcccgtaaatatacccctcagggcggtatggtgaaagtatatgcacggcaggaggaagattatgtggaaatctcggtagaggataatggttgtggattgtcaccggaagatgtagcccgcattgtgggagaaaaagtatatgactcgaaagccatcggtatgagtgacgctcccgacaaggaggaattgaggaagaacaaaggaagtggctttggactgatgaactgtaagggcatcattgaaaaatatcgcaagacgaatgatttgttcaaggtctgtctatttaatgtggagagcgggctgggaaaaggcagccgtttttatttccgtctgcctgccggtatccgtaagtccgtgtcggtgttgctcgtcgtgttgtctttgtgcatgtcatcctgccggcatgctgtggaacagcctgcttccggagaggtgttaccggattctttggcactgcttgcacagaatgaatacgaagctttgctggacgaagcctccgattatgccaatgaagcttattactgcaatgtagacggagaatacgaactggctttacaatacatagattcggcaatgtattgcctgaacgaacattacaagcaatacgcccatcctatacatcgctatatgacgctgacgggagacggggcgcctgcggaactggattggtggaaccagatgttcaattcggatttccatgtaattctggatatcaggaatgaagcggctgtctcatttcttgcattgaagcaatgggatgactatagttataataatgctgcctacaccaccttgtacaaactgttgggagaagaccaatccttggaagaatattgccggcagctggagcgttccaccaacaacaagatggtgggcattttgctggcggtgattttgctgttcgtattgctgttgggatattacatactctacttccgtaaacgtctggtgaaccgctggaatctggagcaagtactggaaattaatggaaaggtgttcaatgcctccttgttgccggtttcggatatggaggaaatgttgcagcgtgaggaggatacattgaaggaaatcccgcggcagattgtaggttccgcttttgatgcagtgaacgaacttttgagtatcgaccggttaagcatagctgtatacaacgagactacacataagctggaatacacttccaatccagtggaagataccgccgtggacgagttgcctatctggaggaaatatatggagaattgctttgagcagcaagagtacatatcggaaaagggtatacaaacattgccgcttgttgtggatgcgggaaatatgtgtcgttgcataggtgtgctgtgtctggaacgcagggaaggtacggagcaggagaccgaccatttgcttttggaactgatagcccgttatgtctccattgtaatcttcaatgcagtggttaagttggctacgaaataccgggacatcgaagtggctcaagatgaagcccggcgagcttcctgggaagacagtttgctgcatgtacagaacatggtgctggataattgtctttcgaccatcaagcatgaaacaatttattatccgaacaagataaagcagctgatagggaaactgcggtccggcaaacagacagaagcggaggagcgggaaacggtggttgccatcagcgaattgatagagtattacaaaggtatctttacgacactcagttcatgcgcttcccgccagttggaagaggtgactttcaggcgtgcgacaatatctgtgccggaacttatggctactgccgggaaatatttccgcaaagtgtataagggaaacaaggcgcatattgattttaagatacaaccgttggaaggacggattaccggtgactggaaccagttgcgtttcctgcttgaaaacctgatagacgaggcttgctccgtaactctggatggagctgtctgtctgtcggcccgggaagatggggaatttatacgttttctgtttacagatatgcgcagggaaaagacccgtgaagaattgaaccaattgttctatcccgacttgtcccgcatgacggccggtgagaaaggagaactgtatggtacggaatatctggtgtgcaagcagattatccgcgaccatgacgagtttgccggacgccggggatgccgtatcaatgccgaaccgggaaaggaaggaggttttacaatatattttacgctaccgaaaaaatgaaatatggaagacaaaaaatttaaagtaatcatcgttgaagatgtcaagttggagctgaaagggacggaagagattttccgccatgaaattcccaatgcggaggtaataggtactgctatgactgagcaggagttctggacattgattgaagccggcgtgccggatcttgttctgctggacttgggactgggaggttcgaccacaatcggggtggacatctgccggaatatcttcaagcgttatccgggagtacatgtgctgatattcacgggagaaatattgaatgagaagttatgggtggacgtacttgaagccggtgccgacggcattatcctgaaaaccggagagttgctgaccaaaaccgatgtgcaggcagtgatggccggcaagaagctggtctttaactatccgatactggagaagatagtggaacgcttcaagaaatctgtcctgaatgatgcaaaacgtcaggaagcaatcataagctatgatattgatgagtatgacgagcgtttcctccgtcatttggcactgggctataccaaagaaatgattgccaatcttaggggaatgccttttggagtcaagtcgctggagaaacggcagaatgacttggtcggccgtcttttcccgcctagtgaacgggtgggggtgaatgccactcgtctggtggtgcgtgcattggaacttcgaatcttgaatatagacaatctggaagccgacgatgagtaaactccgaatgccacatcccgctacgatgttcttcctgctgacgctggcagtcatcctcctttcatggatattcgatgtctatggcctgagcgtgctgcaaccgcagactggagaagaaatacgggtgcagagcctgctgagtccggagggcatacgctggctgctgcgccatgtcataaccaattttacgggattcgctccgttagggctggtgattgtggctatgttcggaataggggtggcacagcattcgggtttcatcgatgcatgtattcgcaggggggtacgacgtccacgtgatccttggcgcattattctgctggtcattgtcttaggactgttgtccaatatagtgggagatgcaggatatatcattctgttgccgatagctgcaactttgttccagtctgtcggtctgcaccccattggaggtataattacagcttatgtttcagtctcttgtggctatagcgctaatgtgtttttgagtacattagaccccatgattgcctctgtaacgcaagaagcggctgataggatgaatattgctccggggcagactggaccgctgtgcaattattattttctctttgtttccacgttcctgcttgcattcatcatttatcatattacccgcaggagcttgttgccacgtttgggagagtacgcaggggatattcattttaatggttacaagcaattgtcacgcaaggaacggagagctatgttgggagctgtatttgcaggcttgctgtatattgccattattctgtgggctacattctcttcatgggggatattgcggagtgtcaatggtgggttgattcgttctccgtttatagttggtattctgtttttgctttcgtttggaataggtttgatggggatggtctatggttttgcctccggccgataccgtacggacggtgatgtgatagaaggacttacgcagccgatgaaactgctgggcgtttattttgtgatagctttctttgcctcacagatgtttgcttgttttgaatattcccacttggacaagtgcattgccattttaggcgctaatctgctgtcctccgcctctttgagtagtttatggatattgattctcttcattctttttacggcgctggtcaatctctttatggtatctgccacagctaaatgggcttttatgtctttcatttttgttccggtattggcaagtatgggcatttcgccggatatgacccaatgtgcgtttcgtataggtgacagtgcaacaaatgccataacaccttttatgttctacatgccacttgtcttgacctatatgcagcaatatgataggcaatccacttatggttcactgctgaagtatacttggagatattctttagtcattctattggcatggaccaccttatttgtactttggtacatcagcggtttgccattaggactgtaatgtcataaccgatgaacagcccgctttcgataaccccggtaatggctttcagtttctgttccaaatcaggaacaatgttgctgagatgaatgtcaagaatgaaattaccgttttcggtaaataccggaccgtcttttccttctgcaagacgtaggctgatttttgaagctcccaataagcgtatctcgttttccacatgggagagagcatgtggaaacacttccaccggtatggggtatttgctccccagtttgctgacaagcttgctctcatcgacaatgatgtaagtcttaccactgcttttaatgagaagtttctccttaaacatggctccaccacgtcctttgatgaggttattatgcggatccacttcgtctgcaccgtcgaatgtccaatccggacgcttattccacagagtagtttgcggcaggccaagctgtatacatgtcatcgaaatttcggcagatgccggaatgatttctatatgcaaagattcttgtttaactcgttgagctaatgcaaacaaagtgagataaacggtagagccggagcctgctcctatgacatcaccgtctttggccagtccggcaatctcctgggctaccaattccttactcgccttattgctgattttatttgaccattgcaattcttgtatcaactgattttcccattccatctctttaaaatttagttgttattactctttcattcattttcgggtcaatgctacttttcctacttgaatattcctccatatttttactttttataattagtaacattgataatttgcaaaatgttttaatacatctgtatataaataccgtgtatcttatttgtaaaggtaactaatcattactttttatgtagcaaatgagccttttatacataggtaacgaaaaaaggtgatacaaaaatttgcaatattcgtaaaaaagcgtacctttgcaccgcaattaaggctggttccgtagctcagctggatagagcaacgcccttctaaggcgtgggtcttgcgttcgaatcgcaacggaatcacaacgataaggcaagtagtcgataaaaaggctgcttgcctttcgtcgtttagctgggtatcaacgatttactaccttgccaatttcgacagaatttgtgcaaaaagtaggtaacatagcagaaacacagctttccgtagttccacttttccggtgggtagaaataatttagaaaacaaaaatgagtacggtaagagtcatccagaacaagcagagattgaccaaagagggcaatgctccgctatatataaccttttatctcggtaaggaaaagttaatgcttccttgcaaagtgtctgtgcctgctgctaaatttgacgagaaaagcggacttctcaaaggaaacagtaaggaagcaaaggatataaatcttattgtgagtaacctgaaagcacgtgtcaacgatatattggtgaagttccggctgaggaaccaggctttgacaaaagatattttcatgcgggagtataacaatccaagtgattataagactttccatgacttcgtgaaggagcatatgaaaacctacagccggcgaatagagatgggaacgttcaagcatcatctgagctgtatgaaaaagttcaaggcatataatgaactgttacagttccaggaccttactccggattatctgactgactacctgatttacatgaaaaaggagcttggaaatacggagataaccgcacaacgtaatatgtccaccatcaagatatatgtcaccgcagcctacagaaagggctatatagaagaaaatcctttccaggaattccatatcaaaagaataaaaagcgatgtggactatctgacagaggaggagctgatgcagtttgtgcaattatactatcaaagaacattgccggaaaagcttcagctgaccttggccttcttccttttcatgtgtttcacgagcatgcacattacggatgcacgtatgttctgtatcgagcaggtaaacaatgatgtgctgacttactaccgtgtgaagaaccggaactgtaaaccggaaccgataaagattccgatgccggtacctgcggaaaaacttctggaagaatgggcagagggtagggaagaaggacgtctgttcaggaacgttcaatgtgaccaggtcgttaaccgacagttgaaggccattgccaaggaactggggattaacaaaaaaatatcggccaagacaggaagacatacgtttgcaactatttatctccggaaaacaaaagacttatccagcctgcaa

SEQ ID NO: 4472 - DNA, 14095 bp, Unknown
  gut microbiota DNA sequence
gagtggctcgcaaaacgcggaaagtatcacactgcgaaatcggtggagatgatttgaaagattgaaaactacaactgaatatcagagatttacaagatattggtgagccccaggcggatcaccaagaagctggacaaaaccagacaaagaaaagacaactcctacaatatcaaggtattgcaggagttttttctttgtataaagtccgtgacctaagacacgaaatggtcacaaaaagacatactttcgtgaccaattcgtgacctgtccgacctttcggattttaggtcacggaatgtctgaaattggcggtttgttgtcttgatttgtccgtactgcaaatatctcattttcagttcatcaatttaattttgtaactaaaaaagagattatgagaagtactttcaagctactctatttcgtcaaacgaaatgcagtaaagaagaacggcaacgcaccgattatcgcacgtatcactatcgaccaagttgtagcccagttcaacaccaaactggaaataaatccggctcactggagcgtgaagttaggcaaggcttccggcagaaccgcagaagccgtacatatcaattctatgccggaaagcatccacagcacggtaccccagactaaatggttgatttataagattgaagcaatataatactggcgaaaagaaaaacagaagtttgtcatttactatccttcgtccattcgtttgactaagctgtcttgcaaacggctaagatatgccgtccaatccttcttccgttctttcatggcaatataagcggcataataatcgcctaactccatttagagcaccgtactgagaaaattcatcatttcttttattcccacgttgccattgttaatgccacccgaagaaacaggttgagaaattcaggtctttatcgaattgtgcgctatcggtacataggcgtaaatcaaactttccacgaacaacataatattcatcatacaaggtcgaatgaaaacgataatattggtaaaagtccagattacggttaaagaagcaggtcaggttatccagttctttacttaatatagtttctgattacatcattactaccatcggggcattgtgtttctatccgataaatcttatagaaggaatgaatttgcagttttgtttttaaatcattgagaaccgcttgcaaacgacgcactattgaaagaaaagtttcaacaatattataaccgtagaggtcgatttcagatatattgacctctatttcagctaacatgttattaaccaattctttcattttactactttaatagttttgtaaatttagactcagtacaaatacttaaatccgtagttacaaacttcccattgtaaaaaagagaaaatatagtagctggtgtaggagagttttgtgcttgctctctcgtttccaatttaattactttcaaaggaatatttctttcttgcgcaagaacacgcaacactccatttacataataatccgtatatgggcaacgattagaataataagccactattcccagtttgtcggggcattctccacttttgacgcaatcattaaaatatggaactgcactattctcatgaaaactcattaccaacaatgaaaatccatttggaagtttttctatttccttaaagccatgttgcagcaaccatttcgtatcactcataaaatggttcttttttgtacctacaacagtaaccaatccatttttttgttgcttttttgcatcttcaatcacaaattggagcaaattatatccatgcccttgacctttatactgccctgaaacccaaaaacaattaatcattaaataattaggggcagtaaccggaagccacacatattcagcaggaacatattctataaaaactttggctcgtgcatcaagccgcctaaaaacatagccattagcaaattccttttttagccattcctttttgaactcatatccttccaagcattttttgtcagagaatgcgcagcagatatgttctttatctatattatcctctgttagagttatatatttaggtaaactattttccatgcttttatttattttatcggtatgtagatttttgtgatactctcttttttattttcttttgaataattgatatactcctcaaaagacatcccatgacgaagtgaatattcttggcttacgttaatgatgttataccagtcctgcaaatcagtataatacccctgcaacgtatagaccgcatatttaccttgtggtagccggattgtaccaaattcacaagtaggcataatttccttttgtaccgatgcacaagcatagaaacgacattgattagggtttgtcacattagggtcgtcaaaacttaacccaataaaacgtgtatcgggcataagtaagtcattgctctttaagaaatgtatcaatttactccatactgtttcataaggttcttcctctccgtacttaccccatatacggatatatactaaatttaatccctcgaaattgtagacttcagaatgcaattcgcactcctttccatcatgttcgcactcttttaatcgcatccttaatctgctgatatatgttttgggagagataccaaattgtttcttaaatgctttggagaacgattgcggattatcgtagccgactaacccagccaaattctgtaaactcatgtcttcagtttgcatatatagtacagctcgttctactcgttgcctcgccacataagagtataatggttcatccaaagcagaactcatcatacggagcaattgccgttgagacatatttactatgtcggctattacattcaattgcaatggctgatgcagattaaaatttatgtaatcaattacttgattgactttctgtttgtatatattttcagtgctacttttcatctataacgatataatttgcaaatatatagagttcatacaaatgtatgattgtccaatctcgccaattttagaaatcttaggttacggttttaggaggttatgtcaaaacgttggcacaacctcgtttttttaaaggcacctacgacgtaatgagttggctggaaactttataagcataccgatgcttcagaacaaaaagcagaatcacaatgattgtcaaagcctccgagagtggcattgccaaccagattcccgacacacccaagaacttcggcaacagaataaaactcggaataaggaaaacaaagccacgcaacaaagcaaaaatcgtagctggctttattctttcaacactctgaaaataacctaccacagcaatattcacaatgaaaaagacaaagccgcttgcaaaataggggaaaccgtgtatcgctatcttcgccgcttcactgtcaagactgatgaaaagaccgaccagcagataaggataaacagtgaatgccaccgttgcaaccacaccgcagaccacagccgtcagcaacgcaatacgttccgccgccatcactctttccttgtagcccagtccgaaattatagctgataataggttgggcagattgtgcaatagcattacctaccatgaaaacaaaaggaatataatagcacgctataccgaatgcccctacgccatcgtcccccagataggacataaatacctgattcccgacgaacataagaacagcaagcgttgcctctcccaataaggcagaaggaccgatacggcactggtaaccaatattccgcacggaaagccgcaggctcttgacactccatttgagtggttgtaaacgcaaatgccgagcataaaacagtagatagaccatcgccaccagtccgccggccatgatgctgatggaagtggcaaatgctgctcccatgactccccagccaaaaggaaagataaacagccagtcgagcaccacattgattacagccgtaatcaggctgcacaacatagccagctttggagcaccgtccagacgaatgacgaacagcggcaccgttatccatatctgaaagacccatgacggaacaaaccacagcagataatccgtcaccataggcaacagatgttcggaagagccgagcatccgggctgtttctgccggaaaagccatcatcaaaacagagggtatcaaagctacaatcgttacaaacagtaatgcttgtgtcacattcaaccgagcagacttgcttttgcctctcgacaattggatagaagcgaccacagaacacccggcaccaaccataagcccgattcccgtaaaaagcatcagtaaagggacacagatatttacggccgcaatcccgtcgctacctactccatgcccgacaaatatcccgtcaatcgctgttacggccgacatactgagcatacccagcaacgtaggaacaaaatatttccgaaacaatgtaaacacattcagtgtactcaaatcaattacatctcttttcatgttcaactatatttataggttattgtcttgcccaaaagcaaaaaaatgccggataaaatgattggttttacccagtcatcttatccggcatttttacagccctccgatgaggattacaaaactcttttggttttctaattcgcgtgcaaaggtgggacttatttttcaagtatccaaatactcatgatttctttcactgaaaaaacagcaaaacatgaacattatccactaccatatcactcttttgaaggtagacacacagccaatgaaagacagtctatcagtctttcattgctctaacataggctgtcaatacactgaataaatgatagttagacatgcgcactattgtggtacgacttctccacaagcatgaagaagccgtaccacaatagtgaagaagttgcatcacaaccgtgcacaatagtcattaataagcttttagtagaagaaagagctgttctttgcggaaagaagaccagccatttgcacaagaaaaaacagcatgcaagcaaagtttgcctacatacttgcatggcatctgcttacatatcgtaaaacgcggtataacaaacaattagaaagcgccatgcaagcatgtaagcaaaatgtgtggtaaacctattgtatatcttttcattttgcgacgactccatagtaaaccatgttatcaatacgcttctgataaatctggttattctgcagcagataccccaaggccaaacacaaatccacatccctgaacttcgtcagtttctgtaattcaaagattgtacacttcttaagattgcacagaatggaatataccattttcatattattggtcgccttctcaatattcttcatattattatcttattattagttcctttcttaaaatgatatcctatattatctactcaaatataagataaagacagagcaatgacaaacattgcccattcttttcatttcagataacattctttgaactacatatacctaaaatctgcaaaaaatatagaactttataaatatcagcactttatagaaaggtatattcacattatactatatccggaaacgattatgctggtataatcaaggtactattatatgcttgccttcgggagtgactactaccgagcccattttgatgtaatgtttcccttccggcgaaactattacctttgtttcgctactcttgtcggaagattcttttttctcattcatgaaacttttgtcccgcgaagtggtaaccggataagtatcctccagatagctcttcatttcgtccacttttccgtctttgaaccacaccttgacagccgaccaccccgcaggagtataagcgcggaatgtccaagcctctccctccttattcaaatctctaaatgcaggctctcctaaaatggtacacacctctttaaagctcataccacgttcaatgctgctcaactgcttataatcaaacccgtagctttcataaatgccacagcccatcaccaagacagcgagtaacaagcctaaaacaactgacatctttttcataatagaaagttttagtatttatccatacagcaaatgtagtatgataaaaacctccttttccgtgattctctctatttatacatagggatttccctatcagtttatctgtatctttacaacctataaagaatatcatcccagccccgttccaatgagcaatatcaagtcggaaggggccaccaccgtatggttggcaaccggcaaagacagtcttaaaacaaaggtgcagccaatccgaaagcaggtttgtgctttcaggaagaaggaaacagcgtagtgctcaccggtaaggtggagataaaggcccggcagctcccaattatgtattactgaaattcaaaggacaccatgccaccatttggattgacggacattttgtacgcagaaatctttaagaagagcattcagttcctcatctgatgtcttgcatggggggatgaaaactatagccccttcgttatcaccggcaatccgaaacctcctttctgcaaagtcaggactttcggtttgccttttcgtgctttgttgtatgtggctgtggaaacatgcaaggtctctatcgctccatcctcgaaagccacctttaagtaatattccttacgtactccgtccgacacataacgatgcttgcctactttacgtctcttttcatgttcttttatcagcttctcaagtacggtaaccgtcacctcctttgtcgaagcaggagccgccatccgataattccctaccagaaaaagcgaacaactgatgacacccacgcacaccacatggcacaatatattcactgccttttgctccatcgttgtcagccatatccattttttatatagaggaagtgtaacgactgccaccacaagtcctacccctacgggtatccacacagcagccaacgtatcttcatagatgttatatccgatgcagcccaaagctacgaccagtacaaacatcagaaaacggagtatttttataaacagttctttcattgccgcgtttatattttttgcaaatataggaaaaatatcattcgaccgactgtcaaatctgttcaatctacatgaacttacttgcttgatagaatgttataactacaataactaaaacagaaaatatcatggaaaagagcttaattcatagtaatgaactgcattttatcagtaagaaacgcattcatcaagcagtagagaaaatggttgagtcattggatttggctgcgggttccacaaccggcttcaacatctatgcagtagtggagagctatttcacggatttggaaaaacgaaaagaaatcaatcagctgctcaacctggagcaagatgtctgcgaagaaatagaggcagaattaagttataaataaattacggagttaccgactactattaagttacgggctacaagtgtcctgcagtatgataatgcagtacacttgtagcccgtaacttatagtagctgatagccagtaaattgaaacttgtagcccactcagtctttcgcctgatgcaccgtcaactgcgggaatgggaagtcgataccttcctcattgaatacggagtaaatcttcttgttcatatcaaaataaacgccccagtaatctccactctttacccaaacacggataactacattcacgctgctggcatccaaggcatgaagagccacaaacggctcgggagtattcaagatacggctgtcttcggagatgatacgacgcacggtgctctctaccttgtcataattctcaccatattctacaccgatcacccaatctacacgacgcgtatcctcacggctgtaattagtcactgtaccactgctcaacgcaccgttagggatatagattaccttattgtcggctgtggtcagaatcgtatggaagatttggatttcgcgtactgtgccggacactccctggctttcaatccagtcacctaccttgaaaggacggaacagcaagacaatcagtccacccgcaaaattctgcaagtttccggaaagtgccataccgatagccacaccggcagatgccaacaaagctgcaaaagaagtggtttccactcccaatttgccgataacggcaataatcagcagaatggtcagcaagatattgactaaacttttcacgaagctctggatactggcatccacatgtctttttgccaataacctcgccagcattttccgaagaagggaaataaggaaccgtcctaccacaaagatgataatggctccgataatacgtccaccggcacttacgccccaatctatcaattgctgaaggaatatctgcagtttgctgaaaccgtcgtcagcaacttgggcagcaaaggctaccatgaataaagatgataacataactatactcttttttaaaattaatgctgcaaaattaacaaataactctgactttcgttcacttaacttgccactttcgacgaaaactcctacctttgctcccgatttcaactaaggggtgccctaatacgacgggctgagatcatacccattaacctgatccgggtaatgccggcggagggaaaagaagaaaagttccccttttctgtattcatctaaacgaaacaattgcaaatgaagagacatgcaatggcgacctgcctccttatggcagcactgggtgtctgtgcgcagacacaagagcaagacagtctgcgggtgataaacctgcaggaagtggaagtcatctccacacgtgccacaaacagcacaccggtggcattcaccaatataggcaaagaacaactgaaaaaacagaatttcggacaagacctaccgtatctgttgagtatgacaccctccgccattactaccagcgatgccggtgccggagtgggttacaccacgctgagagtccgcggaacagatggcacacgcatcaacgtcaccgctaacggtattcccatcaacgatgcggagagccacacggtattctgggtcaacctgccggatttcgcctcctccgtcaaggacatgcaggtgcaacgcggagctggtacctcaacgaacggtgcaggagctttcggtgccagcatcaacatgcagacgggtgatttctccatgaaaccctatgcagaattcaacggttcctacggctccttccatacgcacaaggagacggtgaaagtgggaacgggactcatcaacaatcattggtcgttcgacgcgcggctctccaacatcagtacagacggatatatagaccgggcgtctgtgggactgaactcctattacctgcaaggagggtactacaatgacaacacttctatcaagctgataacctttgccggcaaagagcgcacttaccatgcatggaactatgccagcaaggaggagatggaacgttacggacggcgttataattcctgcggattcatgtacgccaccgaccgggacggccatgtatacaacaaagaatattataaagatgacaacggcgagaagcattacctcacggacgaaggaggtgcactgcatttctatgacgaccagaccgacaactatacgcaaaagaattaccagctgctattcaaccacaatttcacctcgcaatggaacctaaatatcggcctgcactacaccaaaggcgacggatactatcaagaatataaaggtgaacgctcgttgacagagtacggtatgtcgcctttcgaatacaatggcggcaaggtagaagtaagcgaccttatccgcaagaaggcaatggacaactggtttggcggtggaatcttctccgtaagctacaaagccgaccgtctgcatgcctcgctaggcggtgcactgaaccgctatgacggcgaccacttcggaaaagtgctttgggtaaagaactatatcggcgaactgaaccccgaccacgactactaccgcaacaacgccacaaagaatgacggaaatatttatctgaaagtcaattatgaactggtaagcggcctcagcgcctacctcgacctgcaataccgccacatcaactacaagataaacggactgaacgacaagtacaactggactgccgccactccgggaatgcaaaaattggacattgacgaagacttcgacttcttcaacccgaaagccggactgtcctggcaaatcgaccgcaaccaccgcttatacggttcgttcagcgtagcccataaagaacctacgcgcaacaactacaccgacggctacttcaccgaacatcccaaggctgagcgtttgttcgactacgaactgggatataccttcgccaactcatggctccatgcgggtgccaacttctactatatggactataaagaccagctggtactgacgggagagctgaacgagataggcgaagccatggccagcaacgtgcccgacagctaccgtacgggtattgaactgatggctggcatcaaactggactgcggcttgcaatgggacatcaatgccacactcagcaagaaccgtgtgcagaactttaccgagacactttttgaaaacgaggaggctgggtcggaagcatgggtcatcaaacacggggatacccccatcgcattctctcccgacttcatactgaacaaccgcttcggctatacgttcaagggattcgaggcctcgttacagtcacaatatatcagcaagcaatacatgagtaacgccaagcaagaggagtgcacactagatgcttatttcgtaagcaacctgaatctgtcctataccttcaagttgcctaaagtaaagtcggtaaccgtagggtgcaccatctacaatctgttcaatgaagaatacgaaaacaacggatacgcaggcagcggatactatcacgacgacaacggaggaaaagtccgttacaactatgccggctacgctgcccaggcgggaacgaatgtattgggacatatagcaatcaatttctgatggaacatactcttgagattataggcactgtggtcgggattctctatctctggttggagtaccgggcaagcatttatctttggatagcgggcatcattatgcctgccgtctatatttttgtctactatgatgcggggctgtatgcagacttcggcatcaacatctattatctgggtgctgccatctacggctggatgatgtggaagtacggagcatttctgcgccggactatcttgcggcggaaaggtgcaggacagaaaggagaggacacaagaacagaagaacaaaaactggaacttcctatcacccatatgccggcgcgctacttgctgccgcttaccgccgtattcatcgccgctctgcttggcattgcctggatattgataaacttcacggacagcaatgtgccctggctggactccttcaccaccgcactgagcatagccggcatgtggatgctggcacggaaatatgtagagcaatggtgggcatggattgcggtagatgccgttagcgccggactgtacatctacaaaggacttgattttacagccggactatatgccctttacacaattatagctatctttggctacttcaaatggaggaaaatgatgaacaaggatgaaggattagagattagggattaagaaagacatgaaagacgaactatcaacgagcaacgagcaattattaactattgatgccgtagttttggcgaatggggaatatcctgcaagtcccctacctttaaagatattggcggaagcgccttacgtggtttgttgcgacggcggagcggacgaatacatccgccggggccatactcccgacgtaatcatcggcgacggtgactccctcagtgatgaaaaccgccggaagttcggacatatcctacaccgtatcagcgaccaggagaccaacgaccagactaaagccgtcaacttcctgctggcgaaaggcaaacgccgtatcgccatcatcggtgccacgggcaaacgtgaagaccatacactgggaaatatcagcctgctcatcgactatctccgtgccggagccgatgtacgtacctataccgattacggcatcttcatcccctgccggagtacccgcaccttcccaagccatcccggacagcaagtatccatcatcaacttcactgcacacggtctgcatggcaaaggactggtctatcccctcagcgatttcaccaactggtggcaaggcacactcaacgaatgcaccagtacagaattcaccatcgaggcggaaggggaatacctggtattcgtcactacttcttcgcttccgccacttcaacaaagtacacgctgatacaaatcatggcaatggcagcggcttgcgtccaactgaaacggtcttgccccaaggtgagggaaacaacggtagtcaccaccagtatcagatagctgtacatggctacaaccgtcgtcttgagatacttcaagcccaccggaaccagaaagtaactgaggtaagtagggaaaaccagcacaaacgccagcaccgcccacggcacccagtgccactccccatgcaaggcatccgtaagcaagggtgcatcccagcctataatggacgacacaatcaatcccgttactgccgcaccgccaaagatgtacttcatcatcgtcactaccccgacctcttccagcagtttcttgctcacaatcaggtaaacggcaaagaccagcgagctcaccatacagagcatgttgcccgtaaacgcatcgtgcgccaggtcatcactgccttgcgtaaggatacacaacaacgcaccgccaaaacccagcgctatgccgattatcttcatcagcgtagccttttcgtgcaggaaaaagacagatatcagaaagacccaaatgggctgcatggagttgaagatggcactggaaaccggagtcgtcttactgatgcccagcagatagcagaacatgaacccgtagagtccgaaagctcccagacagaacagccctatccgctgccgccttgtgaccggtgcctcctttacaaaccagcttgttatccaaaatgccacggcagcaaagacacaacgcaccgtgacacctgtcaatgcacccagccacaaagggagcagaaatttcaatccattcatattcaaccccgccatgacgcgcgatgcaaccatactgagattggcttccagtttcttatctttcatcagcttcgtatttttcccctcaaacaattcattactttgaaatgttttaaggaaaaaggagataacgttatggcaaaagttaaagaagagcaatcgtcccagcaaacaaagcaagtcctcgcattctccacccggctacgccatgaccttaagaaagcctgccggcaactggatgagggagaaggacaagaggacgtcacaatcagtaaggaggtgaaggcatggctaaacaaataatatggtcgccacttgccaaagaagctctgaaggacttgctgatttcctcgcaagaaagagatggcaacaaacggtgtggcgggactctgtacaccttgttccaaaatgcattgtaccgtgtcacgctgaatccgtttatcggacagcccaccgaagcagagaacatacggtacatcattccgcatcccgactatacgcttctttaccggcacagtctccggaagattgaagtgcttgtgctatggaacaaccatcataagttgggcagcatgataaacatcatccgggaagaacccgatacagaataaagcagccaatcttgtcaagagcagatttatggaagattaacggaacagacgcatgatcgtccgttcatatagccggaacaaaccatgtatccgtcccgaacatatcatccgtttatcctcgacacaccatctgtcagcgctgaacatatcatccgaaagctcggagcttttcatccgaaacatccggacttttcgtcaaaaacatccgagcttttcgtcaaaaccgccgggattttccaagcaaatgcctgccattccgcttgctgaagtggaggattaaatctgtaaagcaccggtttaggagagtaaaccctaagctttggctaatgaagtgacggaagaacacaacaaaaaaggagaagcgacgcctctccttttatgctaatttaaaattgaatctgaactaagattgcagttacaaagttactacaaaaaagtgaaatgcggaaagatatagtgatagaattgagttacaagggttttagttgaa

SEQ ID NO: 4473 - DNA, 257 bp, Unknown
  gut microbiota DNA sequence
aaacggcagacatacgtgatgttcatacagaacggaaaagccgggtattgctgattgcacataccccataagacaagtaaacgggtagcaccacaaaaggtgtcacccgtttactttttcatgaaaccgcctcactccagcggcttgcggtagttcgcttccagtaccccgcgcagccccgtttccgggtaaagcaccttccctcccaaaagtatgaagggcaacacgcggttgttgcggtattcctgcaaggtgcg

SEQ ID NO: 4474 - DNA, 157502 bp, Unknown
  gut microbiota DNA sequence
atcggcaattctttatgtacgttacacattgaaccggaagtgcataatgtccccatcctgcaccacatactccttgccttccacgcccagctttccggcttcgcgcacagcggcttcgctgccatacttgatataatcctcatacttgatgacctctgcccggatgaatcccttttcaaaatccgtatggataacgccggcgcattgtggagccttccagcccttgcgataggtccatgcttttacttccatctctccggcagtgatgaaggtttcgaggttcagcaggctgtagatagctttaatcaaacggttgcaaccgctctctttcagtcccaggtcttcgaggaacatctgtttttcctcgtatgtctccagttcggcaatatcggcctcggtctgggcggagatgatgataagttcggcatcctcgcccttgatggcttcgcgcacctgctctacgtactggttgccgccggcggcactgacgtcatccacgttgcagacgtagagcacaggtttggtagtaagcaggaacatctgcttggcgcattgttcctcgtcgtcgttctgcgggatgacggtgcgggcgctttgtccttgttccagggcatccttgtagcggagcaggagttcgtactctatctttgcagccttgtcgccacccaccttggctattttctctacgcgcttgatgcggttttccacggtttcgaggtctttcagttgcagctctgtgtcgatgatttccttgtcgcgcacggggttcaccgaaccgtccacgtggacgatgttgccgttgtcgaagcagcgcagcacgtgaatgatggcgtcgcactcgcggatgttgcccaagaactggttgccgagtccttcacctttgctggcgcccttcaccagtccggcaatgtctacgatgtcgcacacggcaggtacgatacgccccgggtgaaccagctcggcgagcttcgtcagtcgttcgtcgggtacggacacttgtcccatttgggcgtcgattgtacagaacgggaagtttgccgcttgtgcctttgcgctgctcaagcagttgaaaagagtggattttcctacgttgggaaggcccacgataccagcttttaatgccatagtgttatcttgtttttttagttattgttcagttaattggatgcaaagatagtgcaaaccgaatgcagaataaaatgaactcgttcattttttatgctgaggtgcagcctatcttcgctttttttagcaaagatagtgcaaaccggacaaacttactgaaaaatagctgatttttgcatacaccaacgaagaaaggaggagatgggagagccgccggaacggtatttagaaattcgtattgaacgtgttaatttgcattaaaagcatgacgatgaaacgataaattgatagttttgtcgcaattataatttaagtatcattctataaatcaatgcgattatgaaaaacaaagtaagaaaaattctgatgattttatcatgtctcatcagcttgtcttttacattatctgcacagaatccttatctgccgctttgggaatttattcctgatggtgagccctatgtgtttgaggatcctgactgtcccggcaagtaccgtgtctatatttatggttcgcacgacaatctcaagtggatgtattgcggacgtgaccaagtggtgtggtcggcacccgtagaggacctgacccgttggagatatgacggcgtgatatttaaagtcaatgagtcgcccgagctgtataaactgaatgctgatggaaccgacgacgtgctttttgcccctgacgtgacagtaactaccgatgccgatggtaagaaaacttactacctctttccgaataatcaaggtggtggacgcaattccatgattgccaaaagcgaccgtcccgatggcccgtttacggtatgcaactggcataaggagcgtcctcgcgagactttcggttgtttgggattcgaccccgcagtgtttgtcgatgatgatggacgtgtgtatggttattggggatttggcatttcgcatggcgcggagttggaccctgctaccatgtgcacggtaaagccgggtaccgaagtggtggagaacatgatttcaggctatcggcaggaaggtatattccgcttctttgaggcatcctccatccgcaagattgaggataagtatgtgtttatctatagccgtactaccgctgagggtgaagatggcttgccgaacgccagcaactatacgctggcatacgcttatagcgagcatcctctgggtccctggacctatggcggaacaatcatcgatgcccgtgcgcgcgagtatgatgaaaaaggcaatgtgatagcttcggccatgcccggtggaaatacgcatggcagtatctgcaagataggagggcaatggtacgtgttctatcatcgccagataggtactgattgctatgcacgccaggctatggtgtcggccattgatgtaaaggtggaaaaaggaaaaggtgggaaagtcgtgatttcgcgcggggaattcaactctgagggtttccttcttgaagggctcaatcctatgcagcgcatctcggccgggttggcttgttggcacaccaatcccggaggtatcaaagaggtctatccccattatgtctacacggggtcttacatccggcctgtgtaccgggataataatccctatgccggcgataacaaccacaaaatcccgttcgctccggtggtgaataacacaagtgggtcgattgtaggatataaatacttgaatatgaatgccgttccgcgagataagtctttgcagatgcagttaaggttgaaggctgaagataccgacgggcgcatccgcatcatgctgggtagcccttggacaacaaaaggcggtgtagagataggacttgtgaatgtgaaggctggcagcacttgcagggagttctatgcttcgctctctattccggcaaagctgcataagggaaagtagccgctcttctttgtcttcgaatcagagaccgaaggccagtccatctgtgagttttatgatttcctcatgttggcacgcccataagtctttatacttatggaggcggatacttatcttgtgagaccttctaaatagagctattgtattagttcacagcactgaacactttgttacaccccgtcggaacagattgtttctcttgtatgaaacgacttgtttcgacgggataaaacgatttgttccgttataggaaacactttgtttccttatagagaacactctgttccattataggaaacaaaccgtttccatagtcggaaatgaaatggggcatatgcttcattgataccgctattacttttcctcctcgaatattcggttgaaaacttgccgcagctgtccttcgtctgcgataatggcttggagcttcttcagctgttccgcattcttcccctcgggaaaccagagcttcagataaccgccaggtgcatattttgccatgagatgctgatggaaccgctggtagtgccactccttgtcggcggcaggattctgtttcaatccgtactgcacggtgcggcgcagggtgatgtccgggtcgatgatacggtccgcttcggcaacaatcttgccgtagatgctacgaggttcgtggtctgtagaggcccggtggtcctctacggcttctttcatgaggaggatttccgtgtcggagaaccattgccgcagggtggagtccgccatcagtatctcgccggagacaaggtggtgggtggcgcggtcgcggcacagtcccgtgtcatggtaggcggcaatgacgtatgccaggcgttcgtccgcttcgggatattgccgggcgagggcaaggctttcttcgatgacggtgcggacgtgtgagaggttgtgtgccttgtcaaactccttgtaccggggaatgattgctgtctcgatgtaggtaatgagggtctcgggtatcatgtggcattcctttttaggaggcgaagatataataaaagagccggaatgtgcgaatcattccggctcttttatgaaaggtttcggttattgttgttaggaataagatttcttactttaagagagagtttgtcaattacatgttagggttgtccatgattactgtcatctcgggaaccagtatgtattcgcctttcttgttgttccatttgtagtatgtggtagtcatcgtcttgccttggtatgcatagcggatgcacatgtccttgccccatgtattcttggtgctgttccatttcagggcttcgctttccgtcatgcggttctggtcgtcgtacttataattgtacttcatatagttggcaagcgtgtttccgtccatcttgtatacggtctctgccactttcatgccatttacttcttccgaattgtaaatgaggttgctcttattgtcggctgaggcatttaatccgcaaactaagagaagtgctgaaacaatcactgtttttaaagatacttttgctttcatggttttatgtcttttttagtttaactttctattttctatcaatatgtcattgatttcgctgcaaaggtacgtattaaattgacataaatataaatattggattaaattttatcaatatgtcagtagtgagggtttcggtatgctttccttttggcaagattggtgaataaaaaatatccggcagtgaggtcgccggatattctgatgagcaaactgtatttggaaaggattgcttctgttgctttctgattgtaagttaaataaagttattgggctgtttagtgtgcctgcaaccagttgtttccccacccacaatcggctttcaggggtacgtacatgcgatatgcctgctccatctcttcgattacgattttctgtacaagctctttttctgcctctggaacgctgaaatttagttcgtcatggacttgtaaaatcatctttgctttcagattgtaagcttggaagcgctgatagatgtgtgccatggctacttttatgatgtcggcggcacttccctggatgggagcgttgatggcattccgttcggcatagccccgtaccaccccgtttcttgagttgatgtccggcaggaagcgcttgcggtggaagatggtttccacatagccgttctcgcgtgccacctggatgcttttatccatatactccttcacttgtgggtaggtttcaaagtagccgtctatcagctctttggcttcctggcgagaaacgcccatgcgttcggcaagcccgaagacggagatgccgtagatgatgccgaagtttgccgtttttgccttgcggcgcatgtcggcggttacgtcgtttatatctatcttatatatcttggcagcggtggcggcgtggatgtcgtgtccgctgaggaaggcgtctatcatgttcttatcttcgctgaggtgtgccatgatgcgcagctctatctgcgagtagtcggcagagaagaactcgcagccggtgtcggggatgaacgccttgcggatttcctttccgtcttcgtcgcggatggggatgttctgcaggttgggattgctggagctgaggcgtccggtagcggtcaccgcctggttgaaggaggtgtgtatgcggcccgtacgtgggttgatgagctggggcagggcatctatataggtgctcagcagtttcttcagtccgcggtattccagtatcttcccgatgatgtcgtgcttgctgcggtagctttgcagcacctcttcggaggtgacgtattgtccggtcttggtctttttcgctttctccacgattttcagcttgtcgaacagcacttcgcctacctgcttggcggagctgatattgaatgtctcgccagccatctcgtagatttccttctcaatctcctgcagacggacggtgaagtgttgggacgattgcttcaaggcttccgtgtcgagcagcactccgttgctctctatattaacaagtacggggacgagcggcatctctatttcgtagaacagatgttcggcaccttgctccttcagttccttttccagcacgtttttcagtttgagggtgacgtccgcatcctcgcaggcataacggtagacatcttcgggtggaaggtcgcgcatgttcttttggtttttgcctcgcgctccaattagctcatcgatgtggatggtctggtagtgcaggtagatttccgccagatagtccatgttgtgtcgcagttcgggttgaagcacgtagtgggcaagcatggtgtcgaaaagtttgcctttcacctggacgccgtaattttggaggataatcatatcgtacttgatattttgtcccaccttcatggatttctcgttttcgaagaggggacggaactcgtttacaatttttaagacttcctctcgttcggcgggaacgggtacgtagtatgcacggttttcggcatcactgaagctcattcctacaagttcggcgtccattggctcggttccggtagtctcggtatctattgagagaatttcgcttgtaagtaacttttgaataatttctgctcttttatcttctgtatcaatgagttggtagtctatatcgagcatttctaaccgcgtcaggtttgaattttcagaaacgcccgtcccctcgcccgcaaaatttgcaaacaaatcgccttgaatcggggcgctgttttcgggagtggaggtttgcggctgggcaaacagagtcccggcaaagaggtcgggtaccggagaggttggagtaggggaggacgaattgccgcttccctttttgagtacccgatcgatgagtgtgcggaattccaactcctcgaaaatcttgcggagttcctcttcgttcggttcttcgcggacgagcgaatccatgtcgagctgaatgggaacatctgttttgatggtggcaaggaatttggagaaggttatcatctcgcggttggtttccactttcgttttcagtgcgcctttcagctggtcggtatgttccagcaggttttcgatactgccgaattcggcaatcagtttctgtgcggtcttctcgcccacgcccggacagccggggatgttgtcggaagcatcgcccatcagtcccagcatgtcgatgacctgctcggtggattgtatgctgaacttcgtctttacctcttccgtgcccataacctcgaatccgccggtatgcttggggcggtacatgaagacgcggtctgataccagttggccgtagtccttgtcgggagtcatcatataggtggtgatgccctgccgtccggcttcggtggcgagcgtgcctatcacgtcgtcggcttcgtagccggatacttcgaggatgggaatgcggtaggcgcggatgatgtcctttataataggtacggaaaggcggatggcctcgggtgtctcctcgcgctgtgccttgtattgctcgtaggcctcgtggcggaaggtggggcccgacgggtcgaaggctactcctatgtgtgtgggattctcttttttgagcacttcttccagggtgtttacaaagcccagaatggccgaagtgttgaatccttttgaattgattctcgggttcttgatgaacgcgtaataggctcgatatatcagtgcataggcatcgagcaaaaacagtttatcgattgaattcatacatttaatcctttttttcatggtaaaagtacaaaaaaataccgtattaaccgttttattactatttttgtaggcaaatagcgatgcatggacaactcatcattgataaaatctccgatttctgaggaattggaggacttcaagaagctttttgaaagtactctctccagttccaaccttttgctgaacagcgtaattgcgcatatccggcagaagaacgggaagatgatgcgccccattctggtgcttctggctgcgaagctttttggcaaggtatgtcctgcaaccctgcatgctgcggttgcgttggaacttcttcataatgccagccttgtgcacgatgatgtagtggacgaaagtactgaacgccgtggacaactctccgttaatgccattttcaataataaagtagccgtactggcaggcgattatctgcttgcaacagcgttggtgcaagtgggcatgacccgtaaccatgacattatcgacatcgtctcctgcctggggcaggatttggcagatggtgaacttctgcagctttccaacgtcagcaatctccatttctccgaggaagtctatttcgacgttatccgcaagaagacggccgtgctctttgcagcttgtacgaaggcgggcgctctctcggtgggagccagcgatgaaaaggcggaatctgcgcgtctgttcggtgaatatatcgggctttgttttcagataaaggatgatattttcgattactccgagagcaaggaaataggcaaacctaccggaaatgatatggtggaggggaagttgactctacctgcgcttcatgtgctcaataccgtgaaggataaaacagcggaagaaattgccgtaaagataaagaatggggaggcaacgcctggcgaaatagtccatttaatcgaatttaccaagcagaatggtggtatagagtatgcttcgcaagtgatgtatgactataaggaaaaggctctttctttgctggcttctttgcccgatacggaggtaaaagtagcgctagccgggtatctggattatgtggtagagcgggaaaaatgacggaactgtttccggttgataatatgagaaagcctgatggaacccactccatcaggctttatttataggtaaatacagctttctcttagaagaatttcatctcttcacccttgatttccgaaagcagcaggttggcaagacgactggttcccagacggaacagctcgttgttcagccattcttcgccgagcacttccttgacgatggtgtaataaatcagtgcatcgttcacgcagttgattcctcctgcgggcttaaagcctaccttgatacccgtcagctcgtgatattccttgatggcctggcacataaccagggcggcctccggcgtggcggcaggctgctgcttgccggtggaagtcttgatgaaatcggcacccgaatacatggaaaggatggatgcttttttgatgttcgaagccgtcttcaaagctccggtttcgaggattaccttcatgtggtgctctttgcaggttgctttgagttcttgtatctcctcgcacatgccttcatagtctcccgccaggaacttgcccaccgaaataacgatgtctatttcatcggcgccttccatcagtgccatggcagtttctgccactttcacttcaatgaaagtctgggaggaggggaaacctgctgatacacaagctatttttacatcctccacttccagcgtgtcttttacgacttctgcaaaattggggtatacacagatggctgccacattcttcaggtcggggaactcttcgtcgaatttattcactttctgggtgaatttcatgacgctttcatcgctgtcttcactcttcagggtggtaaggtcgatgcagttgaaaaggaatttctttacctccggcgtgttgtttgccggcactttctctgcaatgattctggcagcttgtgcagctatttccgcatcatccagttgggtgttgtactttgccagggcggcgtcatacttactctgggtaggctcattcttctccatggtctttcaatttagggttattgatatgtcttgtctggtcacgtctggttttcttctcgaagttgcggcagaaggcgtctgtcaggttcactccggtctggttcgcaaggcagagaagtacccaaagaacatctgccatctcatcgtcgagattgtctttttctcctttcttgaaggattggtcgccatacttgcgtgccatgacgcgggcgagttcgcccacttcttcggtcagtatcgccatattggtgagttcgctgaaatagcgcactccgtattcctttatccaggaatccacttgtttctgtgcttcttctaacgtcattattccttgttttttgtatctatacagatggtcacgggaccatcgttcatcagttctactttcatatcggcaccaaattcgccggtacctatttctttacctaatgctaaactcagttcccggcagaattgttcgtacagtgggacggatatttccggccgtgctgcccgtatgtaggagggacggttgcctttcttggtggaggcgtggagggtgaactggctgataaccagtatctcgctgtctgcttcaagaatggatttgttcattacgccgttttcgtcatcgaaaatgcgcaggttgactatcttcttgcaaagccagtcgatatcttcttttccatcggattcttcgatgcctacgagtatcatgaggccctttccaatggaggctttgcaggttccgttgatggtgacggaagcgtgtccggcacgttgtatcactactctcatgttgttcttgtctttttgaggggacaaagttacgaattaattcgttgtgtgcatggctctgcaggctgatttatcagtcattatttctctgagaaataggtctggatgattttggctttcgcttctcccaccacggcggcaagctcctcggcagatgcttcgcggatacgcttcacgcttttgaactccttgagcaacgtgcttttcgtcttttcaccgataccttttatctcgtccagtgcggaggcaatctgccgtttgctgcgcttgtcgcggtggaaggtaatggcgaagcggtgcacttcatcttgaatctgcgtcagcagtcggaagaggggggtgttctgtttcaatccgatggtctggggagggtagccatacaatagctcggaagtgcgatgtttgccatctttggcaagtccggcgatggggatgttcaggccaagctcgtctatcacctcttttacggcgctcatttgcccttttccaccgtcggtgataagaaggtcgggcaggggtgctttctcttctatagcgcgctgatagcgccgttttacgacctctttcatggaggcatagtcatccggtccctctacggtcttgatattgtacttgcggtaatccttcttggaaggtttccccttgacgaagaccacgcacccggccacggggtcggaaccctggatgttggagttgtcgaaacattctatctgcatgggcaggcggtccaggtgcagctcttgctgtatctctttcagcaggcgcacggtccgttgctccggattcagcttttcggcttgcttcaggcggtcggctttgtactgcttcacattgaggagggagagttccagcagcttctttttgtctccccgttgcgggatggtaaagacgacatctttcagctccatatccagttcaaaaggcacgatgatttcacgagaaaggctcttgtatctttcccgcatttcgatgatgccgagagagagcagttcttctttgctctcattcaatcgtttcttgtattcaaaggtgaaagcctggttgatggcaccgttcgtaatgtgcaggtagttgacgaaagcggacttttcatcgctgtcttcttcgatggagaacacgtcgatattgtgcagcacgttgcttaccacttccgatttcgcccggtagttttccagcagcaggtatttcttctttatcttctgtgcttcttcaaacttcatttcggctgccagttcctgcatttgctggaaaagcatccgttctatctcctgggtattccctttgagtatttccttgatttcagcgatgtttttcagatactcttcctggctttgcttcccgatgcaaggtcctgcacagttcttgatgtggtattccaggcaaacattgaactttccggcacgtatgttttccggagagaggttcaggtggcatgtacgcaaagggtacagatgcttgatgaggtcgagtaatgcgtacatggaaggtatatggctgtaagggccataataggaggaaccgttacggattatcttccgggttctgaatacacgtggaaagtattcgttctgcacgcagatgctgggatacgtcttgtcgtctttcaacagtacgttgtagcgaggcttgtatttcttgataagattgttttccagcaatagcgcgtcttcttccgtattcaccacgatatatcggatatctgcaatcttgctgaccagcaccctcgtctttcccggttcgtgctcccggttgaagtaggaagacactcttcgcttcagattctttgcctttcctacatatataatagtcccttcggtattcagatattggtaaataccgggactttcgggaaggttggatacaatccctttgaggtagtcgttagttctgagttcttccataataccgacgtttcaccacagattacacagattagcgcagatttctcttcgataaaactgtgttttgtggtggataaataatctgtgttaatctgtgtaatctgtggtgaaatatgaaatggctaaagcgacagcacagcctccacttccacatcatctccaaacacatccttgccatgaagctctttcagctcgatgatgaagtttacatacactttcttggggttcatctgtttcaccagtttgcaggcggcttccattgttccaccggttgccagcaagtcgtcgtgtagcaatactacatcgtcttcattgatggcatccttgtgcatctgcacggtgtctttgccatattctttctcatagctctcttcgatggtttctgcaggaagttttcccggcttgcggataggaacgaagcctgctcccagtctggtggcgagaatggggcccataatgaaacctcttgattctatacccactactttggttattcctttgtccttatacatctcgtacagtgtgtccgagagctcctgcagggcagcaggttccttgaacaaggtagttacatcgtagaatagaattcccggaatggggaagtcgggtatttcccggatgcttttggcaagcgtttctttgctcataatcagttatttaataggtttattgaattctttgtttcacgtggaactttgcgttctatcgtccgcaaagtaccagtagcacgttgatgtcgctcggagatactcccggaatccgactcgcttgggctattgtttccggatctatcttcatcagcttctgtctggcttcggtggaaagggattgaatggaattatagtcaaacttaccttttatcttgatgctttccaatcttgccaacttatccgcaataatccgttcgcgcccgatgtatccctcgtacttgatgagtatttctgcagcttctacaatttcttcctttctatcggatattttatccagttctcgtttaaaggcactgacgtgttcggcaatgttctcaatcgttatctgcggacggtttatcaaatctatcaatttgcatccctggcgcagtggagtagtgccgagctgctccaataccggattgattaatgccggtttcatcgagtaattccgcgcgaagtctataatccagttcacggcttcacgtttttctgtcagcagcttgtaccgctcttccttgacgagtcccagcttccaggctttttccgtgagtcgcatgtccgcatcatccatacggagcaggatgcgatattcggcacgggaagtaaacatacggtaaggctcgtccacgccttttgttaccaaatcgtcgattaaaacgccgatatatgcttcatcccttgcaagggtgaacggctctccgccgtggcaattgatgtgggcgttgatgccagccatgattccttgtccggcagcttcctcgtaaccggttgttccgtttacttgtccggcaaagaacagattctttatattcttcgtttccagcgtatgtttcagttgggtggggtcaaagaagtcgtattcgatggcatagcccgggcggtagatgaccaaatctctgaatgccggtatctttttcaatgctgcaatctggatgtccatgggcaatgaagaagagaatccattcaagtagagctcttgggttgtttccccttcgggctccaggaaaagctggtgctgcggtttgtcggggaaagtcacaatcttggtttctatactggggcaataacgtgggccgatactttggatttgtccgttgaaaaggggagaatccggcagaccttcctgcaggatgcggtgtgcttcttcgttggtgaagcaggtccagcaagggagctgtttcaaatggcgtacatgagtgtccatgaacgagaacttgtggaagtcacattctccgtcttggatttccatatcctcataatgcacgctgcgtccatctatgcgtacgggggttcccgtcttcatgcgtccaaaggtgatgccatgctttgcgatggattcggttaattggtaggatgcaggttctgccatacgtccgcctggaagcatggtacgtcccacgtgcatcagtccattgaggaaagttcctgcggtgagtactacacatttggcatggaacgttactccccataatgtgactactcccgtaatctcaccgttttcaacgaggatttcctgcacggtatcctgccagatatgcaggttggggatattttccagtatctctctccatgcccagatgaatttgttgcggtcgcactgcgcgcgcggactccacatagcgggacctttggaacggttcagtatacggaactgtatggctgtctggtctgtcaccaatcccatatatcctcccaaggcgtctatttcgcgtactatctgtcctttggcgatgcctcccactgccgggttacaactcatctgtccgattttgttcatatccattgtgataagacaagtcttcgaacccaggtttgcagcagcggcagcggcttcgcatcctgcgtgtccggcgccgattacaataacgtcatacttaaactccattcgttcagtgtattttaaaactgtgcaaagttacgaaaaaagttgtatgccgggacgtgtcatatcttaaaatccggatatatcttctttggcattgcttatatttccgtatccagcatcatacttattgcttggaatgcttaggctatagacatattgcttgtgtttagcttaaaatacaatcaaaatgaagctttttgaatactattgcttttctttttgaaaaagatacatacctttgcaacgtttggatattaaaaagtgttttgattgactaattttaaggaagagaagcatgagaaagaaattcttcttgttaatcattgtctgcctggttatgggggcgggagtgatggctcagacgtctacggtctcgggaacagtatttgccgaggacaacaatgagccgattattggggcatcggtattggtgaagggtacaacgctgggggccgtgaccgatatcgaaggtaaatttacaatcttgaatgtgccgggcacggcaaagacagtgattgtctcttttgtaggtatgcagaaagtagaagctgccataaagcctgctatgaaggtggtgctgaaatcggattcggaactgctggatgaagtgatggtggtggcttacggcacggccaaaaagagcagctatgcaggttcggcttctttagtgaaagcggatgcgctgaaagacattccgacgaccagctttgaaaacgcgttgaacggtaaagtggcgggcttgcaactgacgaataattccggccaggcgggttccgcaccggccatccgcatccgtggcataggttctatgaatgccgggaatgaaccgttgtatgtagtggacggtgttccggtctcttcgggcaatacggggcagatgagcggtgagctctattctaccaacaacatcatgaatacgttgaacccggaagacatcgaatctatttctgtattgaaagatgcggcggccagctcgctttatgggtcgcgtgcggcaaacggcgtcattctgattactaccaaaaaaggacagattggcaagccggtggtgacgctgaaagccgaagtgggcttcacgccctgctgggcaacggacaactatgaaacggccagcgtacaggagaatgtgaatatgctctacaccgtatttcacgatgcccgtacaagtggtaagggcgaaacggacgaaaaggcggcagcctatgccataggccagttgaacagccgtttcaacaaacatggctaccaatttaccacaaatggtacgggagcttacgagaacgtcaatatccttgagtacgacaactccgggcgtggaggcaaatactacgattgggacaaggcatatttccgtaccgccatttaccagacctacgatatgtccgtcagcggtgctacgcagaataccaactattacacttccctttcctatacccaggacgaaggacgtttgaagatgaacagcttcgaccgtgtttccggtcgcctgaacctcacccagaaggtggggaaattccttgaactgaccaccaatgccagcctggcgcgtaccaagaaaagcggttataatgatacacgcaacacgggcagtaattacttcatgcagacccgtaacttgctgtggggactctactggcccactgattacaagaccggcgagctctggaccgaacgttacggtagctacgcctacaatgggctttattatgacaaagagtgggagaacggttctaccagtaccaaaatcatagctgcggagacgctcaccctgcatctgatgccgggcctggaccttcgttctatctactcttacgacaatactactgtaaaagaccatatctattacagtgccaatcactataaaggctcggcagacaatgggaatgtcaacgaataccgtactacatacgagaagatggttacctccactaccgccaattataccggcaccttcgacaaacacacagttggcaccatggtgggtttcgaagcggagaagaacaagacagactatgtgcgtgccacaggaagcaatcttgcggtcagcaccattcatacagtttctactgccggaacgcagacttctgccggatattcctggggaaactcgatggtgtccgtgctctccaagttggattataattacgatgaacgctacttcatttccggttcttaccgccgcgacggttcttcccggctcagcaagcaggaacgttggggaaacttctggtcagtggcgggagcgtggaacatcatgcgcgagggttttatgagcaaatattctttcctgagcaacctgcgtatacgtgcctcttatggtattaacggtacgctgccttcggacaattacggctatatgagcttgatgagctataccagtaagtacatgggtaacccgggcggtacaatcactaccgtcaccaatgacaagctgtcttgggagacgagctacaacacgaatgtgggtatcgacttcggcttcttcggccagcgtctgcgcggtacggtggaatacttcaaccgtgattcgaagaacctgctccaggatgttcccatttcgatggttacgggattttcctctacgttgcggaacgtaggatgcatcaacaaccatggggtagaggtggagttgagtggtgacatcattgatagtaaaggatggttatggagtgccggcgtcaacgcaaccttcctccgttctgaggtgaaagagttgtatggcggtgcggacattatctggtacgaccccaccagtagcgacagccgtgcgcaatatgtataccgggaaggtcagtccacgctggctttctatggatacgaatgggcaggtgtggacaagaccaacggcaagaacgtctactatgtaaatgaccccaagaatggcaaggccggagattttgagtataacgggcgcggagctacttatgactataacaatgccaactacaccatcatcggcaatgccgttcccaaagtgtatgggggcatcaatacctcggtctcctacaaaggcatagccctttcgttgggctttacctataagataggaggagacttgtacgatggagcctacatggatgtggccgacgacggttattattgggagcgtatccgtgctaaaagctactacaacaacctttggacgccagaccatacgaacggtacagagccccgtatcgaaggtgtagacctcgatgacccgcaacaatacagcagccgccacttgttcaatgccagttatctgcgcttgaagaatctctcattggcctatacgctgcccaaagccatgacccgcaaggctttcatcgagaatgcccgccttttcttcactgccagcaacctttggacaatagccaaatacaaggaggcagaccccgaagtgagcgaatacggcacacgtggttgggaaacccctatcggaaaaacgtttgtcgttggcgttgaattgaaattttaatgaactggaggaactaacaatgaaaaagatatatcatttattggcacttgtgatacttggtgcctttacattcacttcgtgtgacgattttctggatatgcagcccaccaactccggaaatgcagaaggtgctgtcggtacggtagccgatgcgcaggtggttatcaacggtgtgatgagtgcgatgacctcatcgtcctattacggcagaaacctttttatgtacggtgatgccaagggcggtgacctcacgatttttgctgccggacgcggactggatgcattctatacgttcaaccacacttccaacagcaatacttattccggtttctggagccgtggatattactgcattctgcaggtcaacaccttgttgagcaacattgagaagctggaagaatcgggcagtatggaagacttttccgaagccaaagggcaggcgttgactctgagggcgctgttctatttcgatttggtccgtctctacgggcttccttacaattacaacaagacctcttatggagttcccaatgtaaccgagccgcttacggtgaacgcccagcccacccgtgctactgtggaggagaactatcgccagattctgcaggacttgtcggacggggcggccctgcttgccaagaagaagacaaagcagagcggatatgcggactattacaccaacatagccctgcaagcgcgtgtgaaactctatatggaagattatgacggtgctttgaacgctgcccgggagattatagaaagcggtgtgtacaaactgtatgagcctgccgattggacggcttcctggagcaagcagtttggttccgagtccatctttgagctgggcatcaccactgaggaatcagacctgggaacttcttctttgggcttttacctgatgcgctacggacagttgaagaatgccatgggctggtatcttgccagcgattatttcctgaaccgtctgggtgaagacgagacggatgtgcgttggggaatcatggacaacgatgaatactgggtggacaatgagattgaacgcaagggagcctgctacaagtatatgggcagtaccactctggcaggtgacggcaaggcaaccaatacagccgtcaatatcaagataatccgtctttccgagatatatctgattgccgccgaagcagccttgcactccacgaagcaggaagcaggcgcagatgccgccgccggttacctgaatgaaatccgcaggcgttctcccggactggcaccggccactgccgctaccattaccgatgatatgattctggacgagcgcagcaaggagctttttggtgaaggacaacgcttcttcgacatgatgcgtatgggcagaaccatcgaattcaacgacgattttcaagatattccggtgagtcaccgtggaaaaacaatcgaccgtactttcgagaagattgtgcttcctatttcgcaggatgagataaatgccaatccggcattggagaaccagcagaatccgggatattagtcattccctgctgtctattgtttgctactccttgtatatcagggaggtattttgccaacaagttgtcactgccttggcaaacttttgccacgcctatggcaaagttttgccaacgcggtggcaaagtcttgccaatgggaaggcaaaaccttgtcataggcgtggcaagaaaagcggaaaaaggtgcctttgatgaatttctttgataaaatgagatggtaataccttgatattccacaaaaatactatttattggttcgaaatttctattctttttttctgaatcggcttatctttgctttcgtagaaaccaataaaaagttataatactatgagaagatttttcctcatatcgtcattcttgacgttgtttgcaatcggaagctcggcgcaatggaagccggcaggtgataaaatcaaaacggactgggcatcccagatcaatcccgcgaatgtgttgcccgaatatcctcgtcccatcatggaacggagtgactggaagaacttgaacggactgtggaattatgccgttataaataaaggtgagcatcttccggcagagttcgaagggcagatacttgttccttttgccatcgaatcctccttgtccggagttggaaaaagaatcaatgaaaaccaggaactggtctaccagcgcagttttgaaattccttctgcctggaagggaaaacaagtgctgttgcactttggcgctgtcgactggaaaacggatgtatgggtgaatgatgtgaaagtaggcagccatacggggggatttactccgttctctttcgatattactgccgccctttctggcaaaggcaataatcagttggtcgtaaaagtttgggacccaacggataaaggacctcaaccccgtggaaagcaggtcagcaatccggaaggtatctggtacactcccgtaagcggtatctggcagacggtatggatggagccggttgccggaaaacatatcaagaacctccgtatcactcccgatattgaccgtaatctgttgacagtgaaggctgaattgaatagtgcatgtccttccgactttgtggaagtgaatgtgtatgacggcaatcaactggtagccaccggcaaaagtatcaatgcagagccggtggaggtgtccatgccccggaatgccaagttgtggagtccggattcccccttcctctatacgctgaaagtgactctgaaaagcggaggcaaggtagtggataaggtggacagctatgctgccatgcgtaagtactccacccgtcgtgacgcggatggcatcgtacgcctggaactaaataacgaggctttgttccagtttggaccgctggaccagggttggtggcccgacggactgtatacagctcccacagacgaggctttgctgtatgatgtacagaagacgaaagatttcggtttcaatatgattcgcaagcatatcaaggtggaaccggcacgttggtacacacattgtgaccgtttgggtatcatcgtatggcaggatatgccgagcggtgaccgtaatccggaatggcagaaccgccgctatttcgacggaacagaactgaaacgctccgccgaatccgaagcctattatcacaaggaatggaaggaaataatggattgtctctactcttatccgtgtatcggtacatgggtaccgttcaacgaagcctgggggcagttcaagacggtagagatagccgaatggacgaaacagtatgacccgacccgtctggtgaatccggcaagtggcggtaaccattatacttgcggtgacatgctcgacctccacaactatccccaaccggagatgtatctgtatgatgcacagcgtgccacggttttgggtgagtatggcggcatcggccttgtcttgaaagaccatatctgggaaccgaaccgcaactggggatatgttcagttcaactcttccaaagaagtgactgatgagtacgtgaaatatgccgatatgctgtatcagatgataaaaagaggtttctcggcagccgtctatacacagaccacggatgtggaggtggaagtgaacggtctgatgacttacgaccgcaaggtgataaagctggatgagaaacgcgtgaaagagataaatacacgtatctgcaattcacttaagaaataggggcatttacaatttaccatttacaaagtacaatttggctgcgctgtcatctgcatagttaaattgtactttgtaaatggtaaattgtacattaaaaatgttgttatgaaacgattgattataaagcttttccttagtctgtgcctatgggcggtattgccggtctgtgcgcaggatgctgttcattactatttcagaacgatggatatccggaacggtctttcgcagaacaccgtgtatcagattttgcaggataggaaaggctttatgtggttcggaaccaaggacggtctgaaccgttatgacggattgtctttccgtatttacaagaaagagaactccggtttaggaaagaacttcataactgcgctctacgaggaccgccggggaaatatctggattggtaccgatgggggagtctttatttacgacccggtactggattcctttaccgctttcgatgaggccagtgataacggcagtatcatcagggatttcgtcaccatgattggaagtgacgaggacgataatatctggatatcggtagaaaaccaggggttgttctgctataaaccggatgaagggaggctgctgaaccatctgcacgattcgggactgcccaatgtaacccgcttttggctgaatgggaatacgtgttggctggccttgtatgcggataatctttactatacgaaagctgactttgaaactcctctgcagcctttcaaggacgcggaaggaaatgagattttcaagaatgatattatcaactggcaggtcagcggaccccataattgtgtgtatatcgcttcgctgaacgggttgacagagataaaccagactaccggcaagacgcggaagctgctgaacacctatgtgagggctttgcagttcaaatctgacaacgagctgtgggtgggcgcagagtccggcttgtatatttacaatctgacgaatgacaagattacccatttgaccgttcccgaccaggatgattcgtatgcattgtcggacaatgccatttattcgctctgctgcgacaaggagaacggcatgtggatagggtcttatttcggtggagtgaactattgtccttatcagtggacttatttcgagaagttctatccgagagacaatctcaggcatttcggccgtcgtgtacgggaaatctgtgaaagtaatgatggcaccttgtggataggtaccgaagacaaaggcttgttcaattacaatccggaaaacggaaagatagagccttttgagcatccggccatttatcagaatgtccacggcctttgcctggacggggatgatttgtgggtgggtacgttctccggtggtctgaaccgggtgaatcttcggaccaggcaggtgaaacattatgccaagggtgagagtgagaattccatggtcgccaatgacgcctttaccatttgcaggaccactacgggagacgtgtggataggcaccacgtccggtctgttgaagtacaatcgctctacagatgactttacccggattcctcagctgaagaatatgtttacttataacattctggaggacttcaacggaaatctgtggtttgctactttctccaatggagtgttctgctacaatgtaagaagccagcagtggaggaattatctgtctaatgagaatgattcgacctctcttccctacaataaggtaatcagtatctacgaagacagcaggaagcgtctgtggttcatgacgctgggtgagggcttttgccgctacaatccggaaacggacaattttacccgttatgacatgtcgaaaggatttccgagcaacactatctacaagatggtcgaggataagcggggtaacttatggattacttccaattatggtctggtctgcttcaatcccgatacggagagcaaacatgtctataccacggcaaacgggctgctgagcaaccaatttaatttccagtccggttacattgacaagaagggacgcatctatttgggaagtatcaacggattcatagcctttgacccggaaacttttgtggagaacacttttctccctcccgtagtgattacagatttttatctgttcaacaaacggctttcggtggatagtccggattctcctttggagaagagcatcacctatgcggatgagatagagctggatgccgaccagaattctttctcttttcaggttgcagccctgagttaccaggcacccgaaatgaatggtcttgaatgtaagctggaaggctttgaccgcgactggtatacggtagggcggaattccatcatcaactattcaaaccttccttatggaagctatacattgcgtataaaaggttccaacagcgatggcaagtggaacgcgacggaacgtgtgctcgacatccatattcatcctcctttctatctctccacttgggcgtatgctgtttatacggtattggcgttatgttcactggctgctgtaattatctatttcagaaaacggacccggcagaagcatcagcaggctatggacaagtttgagcgggaaaaggaacgggagttgtatactgcgaagatagacttcttcacgaatgtggcgcatgagatacgtacaccgcttacactgataaagagtccgctcgagaatgtattggcttcccgttctgtttcggatgacatcagggatgatttggagaccatggaactgaacaccaaccgactgcttgatttggtgaaccagttgctggacttccggaagacggagacacaaggcttccaattgaattttgtggaatgtgacgtgtctgagctcttgcagaagacgtataagcgtttcaagcctttggcacgtgaaagggggctggcattgagtatagagactcccgaaagcttgtatgcttcggttgatagggaagggcttaccaagattatcagcaatctgctgaccaatgcgataaagtattcggagacctatatacgcatcaggctatattcggaaggtgaaagactgctgctttctgtatgcaatgacggccttgtcattccggtagagatgcgcgaggagattttcaagccgttcatccagtataaaaccggtaccttgcgctctgtacccggcaccggtatcgggcttgcacttgcccgttcattggccgaactccatgagggtacgttgtgcatggaagattcgatggagaacaactgtttcctgctgtcacttccgctgaagcacgagcagacggtggctatggagcataaagaaccggtaacgggcggggaatcctctgaggaaagtggtgcaggtactgccttggaacagcaccggtatactcttttggtggtggaagacagtctggaaatgcaggcatttgttgtgaaacagctctcttcggaatatcgtgtgctgactgccgtgaatggggtggaagctttgaaggtgttgaaggaacatactgtaaatcttgtcatttcagacattatgatgcccgagatgaatggattggagctgtgcgagcatctgaagtccgagcttgactatagccatataccgattatcctgcttacggcgaagacgacccttcaagccaagatagagggaatgaagctgggggctgacgtatatatagaaaagcctttctctgtggaatatctgaaagtgtgtgtagccaatctgctgaacaaccgtgagaagctacgggcttctttcgtcaattctccttttgtgcagacgggcagtatggcaatgacaaaggcagatgaatctttccttaagacattgaaggaagtggtagttgccaatatgcagaatccggatttctgtctggatgatatggcaagcctgctgaacatgagccgttcgagcctgaaccggaagataaagggcatattggatatgaccccgaatgactacatccgcctggagcggttgaagaaagcggcgcagcttttaaaggaaggagagtgcaaaatcaatgaggtttgctacatgaccggcttcaatactccttcctattttaccaagtgcttccaaaaacaatttggtattctgcccaaagacttcgtgaaatgatagcatggaatgcttgctaaatataacaatccaatcaaatgcccctgaggtgtctctcaggggcatttgattggatttataattgcatagattgaagcgatatttgcattaattttagctttatgcggatatatttgcatccgaaagccaacaatttataatactatgacccctatgcctatgacgtaacaaatcctaatcaatgttctatgattggcagaagtgactaatcactttctgcggtgtatttaaaaagcgggcgttagtttccgcatagttttaaaatctaattctataaaaaatgatcaagaaaatcttattcttattctttgttgtgtttgcagctaccgcttattcacaagatgtgaccataacgggaacggtgacggatgcaaatagtgagcctttggtgggcgtgaatgtattggtgaagggtactaccacgggtgccattaccgatattgacggtaatttctcagtgagtggaaaaaaaggaagtacactcgttttctcttatatcggtatgcttacgcaggaagttgtctataagggaactgccttgcgcgtggtgatgaaagatgattcgaaagcactggaagaagtggttgtcatcggttatcagaccgtgaagaagtccgacttgactggagcggttgccgttgttgataccaaggaaatgaagaaaagcgctgcaggaacactggtcagccagatgcagggtttggcaaccggtattaacgtacgcagtagcggtagggcgggcgaagatgcctctattgaaattcgcggtgtcggttctttgagtaataactctccgttgtgggtaattgatggtatgattacagatccgggagttgacttcaaccctgcagatgcagaatccatccagattctgaaggacgcttctgctgctgccatctacggttcgcgtgctgccaatggtgtgattatcgttactaccaagaagggtacgaaaggtcccatgaaggtgaatgtaagcgtaaaggaaacattggaatggagcccgaaatttgatttgatgaatgcggcagaatatatcaagtataatgatattgcctataatgaagctatcaaagatggcattgctactgtaaacagcactcagaaacactcacagtatgataccaactggcaggatgaagtgttgaagaccgcattggtgcaggactacaacgtatcactctccggtggcggtgactccggtagttattttgtatcagccggctactataacaatgacggcgtttcttatggaaatactttcgaccgttatagcttccgtgtcaatacacaaggtaaaaagggctggttctcttttggtgaaaacttggcttattcactcacaaacacagacccgaaccagaccaatacctacaatgactttttgcgtatgatgcctactattcctatctatgatgagaataatccgggtggatatggctatggtgatgctgccaaatacaatacttttggtgtgaacccgattgcccgtgaagatttggaataccgtcatttccgccagaatcgtttgaatggttctttatggttggaattcaagccattcgaattcctttcctataaattcaatggtggtattgatctttacttttatgagaattcatggttccgtggagaaggtaactggactcagaatcaggaacaccgtgatccggaaagccagaaggcgcgtgacaatacctacaacatgttgattgagcacacgttgaacttcaataaggattttggcaagcatcatgtggatgctgtagtcggtactacttaccagcaccatgaatgggaaggcttgtgggcttcccgtctgaacttcccgatgttgggtaacggtgattatctgactgtattgaatgccggacaaagcaaccagcagaattcaaacagtatcagtgagaatgcgatgatttcttatttgggacgtgcgaactacatttatgatgataaatactatctgactgccaccttccgtcgtgacggaacctcccgtctggctaaggaaaaccgttggggtaatttcccgtcattctccggtgcctggagaatttcaaaagaggaattctttgatgtgccttggattaatgatttgaagattagaggtaactggggccgtcttggtaactcttccattggcgattgggattatattggaactatcaatcagagtattgtaactgtattcggaggtgctattgttccgggttctactcaggtgaaacttgtgaatgcaggtcttgtttgggaaacgaaagaaacggtgaatgtaggttttgatgccagcttccttaaccagcgcttgactgtcagcgcagagtattacaactcaaagaccagtgatgtattggcagagactccgattgccatttctaccggtaaccaaggaggttctccatggaaaaatgctgccagcttgcgcaacaagggcttcgagtttacacttggttggaaagaccagatttcggactttaagtatagcgctttgctgaatgtgactactatggataacgaagtattgagcttgggccgtgatggtactaatagggattatattgattccggtcaggcaagaaccaaaccgggcagatctttggctgaattttatttgagaaagacagacggtattttcaagacacaagaacagattgataattatgtgacatctacgggtacccccattatgattgagggaaagcgtcctcaattgggagatgtcaagtatctcgatttgaatgatgatggagagattactgatgccgaccgtggttattgtggtagcccctgggccaagatgcaaatgtcattggtattcaatgcagaatggaagaacttcgatttcagtatgatgtggaatggtcagttcggcaataagatatacaacgtatcccgctggcaaggacgtctgtttgcagacaactccaactatatccgttttaaaaagggtgaagaaccttaccaggtaaatcctaactccaataccccgcgtatcatttacggtgatttccgcaactcccgtgatgccgaccgtttcctggagaatggctcttacttccgtatgaagaacatttccattggatataacttcagacaagattggttgaagaatttgggagtcgagaagctccgtctgtttgctaccggcagcaatttgattaccatcaccggatattccggcttggatcctgacttcaagggtgcgaattccgtttggaacagtggtacggacagctttgcatatcccaatacccgttcggtaatgtttggattggatttgaccttttaacttataaatcagcttataaattatgaaaaagatatattatggattaatgcttgcaggtgccttgacgttgtgcaccggatgcagttcgagtttattggatattgataatcccaatgaagtgaccaatgatacttattggaataagccggaagatgcgacagccggtgtgaatgcctgctacagttttctttataaggaaggtacttggatgcgttggctctctttccgctatgatttgacttcggacgaaggatggagttcttctccttggattgaattgggcgactggacacgtttcctttacaacaactataatttttatgaaggcaacaacatacattgggagcatttctatgtaggtattttccgttgtaatcaggtgttggctcatgttccttctattgaaatggacgagacgacgaaaaaccaggtactggcacaagcttctttcttgcgtgcattgtggtattttcaggtaaatctgttgtgggataaaggaactatgccgttggagcctaaagatgcttcctatataccggaagatgcttccgagcaggaaatatgggaccaggtagagaaagatttgacttttgccatgcagtatttgccggaatcttgggatgctgccaatctgggacgtgctaccaaaggtgctgccaaggcattgttgggcaaggcttatatgcaacaacataagtatgacaaggcaaaggaacagttgcaatggctgattgataaagagggctctttgtacggtcttattgccaaccgtgaggataacttcaccgacttggacgagaacaacaaggaaggcatctttgaaattcagttcgatgaccagaacaagggtggcacgggtaatgacgccagtatggcattcggtttccagcgtactcagttctatgctccgagtggtataggttggggagacggtaaggcacgccgctggctggtagacgagttcttgaaagagaagcgtgtggacggaaagaacgacttgcgtttgtacggtagcattttgtaccgtggattctcacaagacttccccgaccagccgaaaagttactatagatttgaaaatgccgattggaatgacggttggggaactgacccggaagactgctatatccgtaaatacaatacttcgtactatcgtagtgcagaagattattttgcccgtaacaactatcgtatcatgcgttacgcagatatactgatgaactatgcagagtgtcttgttgaaacgggaaccaatcctgccgatgctgctgtttatgtggacaaggtaagagaacgtgccggtctagccaagttggaagacagtcagtggaaagactgcttgagctctaaagatgcctttatcaagcgtctgcagatggaacgtacattggaactctgtttcgaaggttggcgttgggctgacttgaagcgttggggattacttgattcccaggctggaattgatgaactgaaagctcgtgacaaagactttgacaactttattgttggcaagcacagacgtctgcctattccaagagatgaggtggaaaacagcacagtaggtggtgttgcacatcttactcagaatcctaactattaataactaaagaaggctatgcctggaagcctgttctcatttaggatgcttccggcatagccttttctttcttaaatcttataccatatgcttgtctgtaaaaaactactattaccattcgcttttgcttgctgcggcagcttgtttgcgcagaacatccagaatccggtacttccgggagtggcggatgccggcgtaatgaaatataatggcaaatattatattggcggggtccgtacaaacggggatttctatgtatccgatgacctggttcattgggggaaacctatccatgtcgtatccatggacaatgactggaccagaggcagcggagccggagatgaccagattcatgccaatgacatgttctatctgaatggagattttcatttgtactggtcagtcaattattggggaaaggacaagcatgccgttcacattgtacatgcgcagagcaaagatgtcttgggcgcttatacagaaccggacaagaagacatggatggataaccgtatcgaccccaaagttttcagagatgatgacgggcaactatacatgtatatggtacgctttaccgatgggaataccatatggggacgtaaaatgaagaacccggcagaatttgccggcgaaccggtgtgccagttcgcctcattgccggatacatgggaaacgatggataacagagtagcggagggaccgtgggtcatgaagtatagaggccgctactatatgatgtataatgccaaccacacctctacagagtggggcaattatcagttgggagttgctgaggcagactctcctttaggttttcaaaatggtaataaatatagctatccggttgtaggctgcaatcagacacaactggaggagaagcaagtggatttattgcggtatggccgcacatatgagccgttgtttgcttatacggagagcaagccgggaagcgattggacaaaagtgacctacgatgactccggctgggcgaggggggagaccggcttttcgtcccgtgaagtgaaaggttccaccacccggcatctgggtaccttgtggaatacgccctccttatggttgcgaaagactttctctgccggtagcgaaaccggtaatctggcattgcgtgtcgctcacgacggagatacccggatttatctgaacggaacacttgtctacgagaagcaggggcgtgattattgtatcgtgaacctggacaagaagctgcgtgctgctttgaaggaaggcacgaatctgcttgccgtagaaacaaacaagggacgttcgcaattcttcgacgtttctctgttcgatatgaaagacggcattgccgacgatattctgatgactcccggtcagcccaatattttgagaggccccaacggatttgaatggtggctgatttatatggcaaacaagaacgatgagcatcgggggcaatatatcaaccgtgtccagttcttcgacaagacgttgtttgtggatggtatcaccggcccccgcacggcaggttatcatcccgaaccttcgatgcctacctttgcaggcaaaggcgagacagcttcgttcggtgtgttgaaggaggtacagccgtccgtggcttacttgttcgagacgggagtcaagaccgagggtggagccggcgtcattgcctggtggaaggatgcagataactgtgcctatgtaggtttggatgccgagaaccggagctggtacctgcgtacatttgtcggcggcaaagaaaataaggaatcctatgccctgcctgaagatttccattggggtgtgtaccatcatctgcgcattgagcgtaatggtggctgtctgaagatttggctggatgagattcccgcaccggggagacatgtctttgcagaggctgttccggcagaagaagcgggtgttcccggagtatttgatgagacaaagtctgccttgttcgaaggggctacctataccatcggcttcgatgatgtgcatttccagctttcggggaatgaggagttgttgaagggcgatttcttgaacgattatgaattcagcttccagttgtccggcttgtccggacaagacaaggcaggaagctatccggtttatgtggataaggataactatgtgaaggctcagttcgatggcatcacccgtatgcttgaggtgacagccgtgaagaaagggaaaactgcctggaagaaggaattcccgttgggatgcctgcaaacgctctatccggatgtgaagtataccgacttcattgagaaaggttatcgttttgccgcacctgcatggttggatacactttacctgaaccgtcacgaagcaggcaataaatccgaatttgtggatgacatgttcggcaagttcgacatagaatacctgaatggcggcgaatggcatccgatagaaaacaaagatagggggatagcagaacatcctgcatataattattgtacctttactccggtaaaggcagaaggcatccgcttcatcaacaaggaggcggaggatttggaacgccatatctataagataggtgtacatgaattgtggaaggaatcctataattttcgtgccgtgcgtcgtgcagacaagctgtatctgtttgtcgacggcagggagctgggagctttggatatacgctaccctgcatcccgcatcggattctgttcggagggcggctctccggtttatagtggtacgttgtattatcatgtagggcagaggcgcgattagacgcaatcgtgggatgtgccgttccgtatatatgtaatgaaagatgtatatagaagccggtgtttgtatttccttgtgaatcagtgtgatggactgggggtgattcagtatacgactgaatgtatttcagtatacgattgaataggattcagtatacgactgaatagggttcaatatacgggtgtaacggaacatcttcttgaaagtaaatatttatcatcataacaattgtttaagaaagaatcatgaaaaagaattttatatgtatgtatctgtttctgttggccacgctggcttcctgccagtcctgctcttcagactataaggatgtggacgatattgttgtcgaaggagttgaaacgccggtgcttttgggcgacccgttcatcatgttgcacgatggcacttactatgcctatggcacccatgcggatgaaggcatcgaagtctatacctccgatgatttgaagacttggaagtataagggcatggcgctccagaagaaggatgtctgggccgaccgctggttctgggcaccggaggtctacgaagtgaacgggaagttctatatgtattactcggcagacgagcatatctgtgtggcaacagcagactcacctgcaggaccatttacccaaagtaagaaggaaccgatgattgccgatgagaaatgcattgacaactctctgtttattgatgatgacggcacgccttatctcttctttgaccgtttcaacgacgggctcaacatctgggtggccgaattggagaaagacctcatgactatcaagaaggagaccatgcacccttgcatccacgtctctcaggcatgggaggaggtatggccccgtgtgaatgaaggcccgtttgtcattaagcgtaatgggctctactatatgacctattctgccaatagctatgaaagtcctttctacggcataggttgcgccacagctaccgatttgatgggtacttggaccaaatacgaggagaatcctttgctgcagaaacccggagaactggttggagtggggcacagtgccaccttcacagacaaggcaggcaagcttcgtatcgttttccatgcccataaggacaagagtagtatccacccacgtgccatgtacatcagtgacgtttctttcgagaaagtggacggtgtggaccgcatgagaatcagcaaggactatatgacgcccaaaatagtaaaataagagatggatatgaaaaagaattatatattgctactgttgctttgtctttgctttgcaggatgcaaggagaagacggttgtagaatcagactatctgccgattgccgacccttacgtaatgctttacgaaggcaagtattatgcttacggcactggaggtacggtagaaggagaaggctttgcctgcttctcttccgatgacttgaaaaactggacgcgtgaaggccaggcgttgtcggccgcagattcctacggtacgtggggattctgggcgccggaggtctactacatcgaatcgaaaaagaagttttatctgttctactccaccgaggagcatatctgcgtggcaacggcagatgttccccaaggcccgttccgtcaggaagtgaagcagccgatatgggatgagaagagtatcgatacctctctattcattgatgatgacggtacgccttacctttatttcgtgcgttttacagatggcaacgtcatctgggtggcagagatgaacgatgacctaaccggcatcaagcaggagacgctgacagagtgcattaaggtgggagagccttgggaactttcgcaggacaagcctgctaaggtggccgaaggtccttcaattttgaagaaagagggtgtctactacctggtttattcagccaatcactttgaaagcaagaactacggagtgggttacgcgacttcgaacagcccgatgggaccgtggaagaaatacgagggaaatccgattctgcaacatgccgacggcttgatgggtaccggtcatggagcacccttctgctgtaaggacggtagctggaaatacattttccatgcacattgggattccacgaaagtacagccgcgcacttcgtatatcaaggattttgccatttccgaccagggaacggtttctatcggtggctctcttatccgtccgcaggtattgggcagtacatcacccgaaaagtaaaatgaaagaatgaaaagaatacattgtatgaagaagtttcttgtattatcagtgttatgcagtctgatagcctgttcctcgtcatcggctacaaaagaggataaaccggaagaacaacagccgaagaatgtctatcgcaatccggtgatagattatagtttgccagacccttctgtcattgagggagatgatggatactactatttgtatgccaccgaggacatacgcaatctgccgattcaccgttccaagaacctggtggattgggagtatgtaggtactgcctttacggaccgtacgcggcctgattttgagccgaacggcggtttgtgggcgccggacatcaacaagataggtgataaatacgtgctctattattctatgtctgtttggggaggcgagttaacttgcggcatcggttgtgctactgccgataagcctgagggaccttttacggaccacggaaagatgttccgcagcaatgaaatcaatgtacagaactccatcgaccctttctatatagaggatggagggaagaaatatcttttctggggcagttttcgaggaatctatgcgattgaactgtctgatgacggactctctctgaaggacggcgccacaccgcagcaagtggcaggaaccgcttacgaaggtacctatattcacaagaaggacgggcattactacttctttgcttccataggaagttgttgtgagggattgaagagtacttacactactgttgtaggccgttcagataatcttttcggcccctatgtcaacaagaatggcggtagcatgatggataacaagcacgaagtgctgattcagaaaagcaattcctttgtgggtaccggtcataattcggagattgtgacggacaatgccggcaatgactggttcttctatcatgcggtgagcacaaagaagcctgaaggccgtgtattgatgttggataagattagctgggaagacggatggccgacggtagaaggctccgttgcatccacggaagcggagaaaccgaaattttgacaagtatgaagaaatctattttaatctccttgttggccttattgatgatgggctgtcaagtatcgggtggcagttccttgaaagtggaggaaaccactgttgaaatgcggaagaatcccgaaggagtagctgtatcggctccccgtttctcatggcaactggtaaccgacaagcaggatgtgatgcagactgcttatcagattgaagtggcggactcggaaaagggcttgcaggccggctccgggctggtatggaacagcggtcgtgtggagtctggccaatcggtgctagtgaagtacgcaggggcgtctttggagtcgggacagaaatattggtggcgtgtcactgtatggacaaataccggtgacaaggcgcaaagtagtatccaatattggtcaatggctttgctggacagttcggactggaaagccggctggattggactgaacgacagtacaaacttgaaactggacggtgagcggaccatccttccggcacgttatctgcggaaggagtttgatttgccgtcacagccgaagcgtgcagtcctttatgtttcgggagtaggctcttccgtatgctatatgaatggcgagaggattggaaacgatgtattcggtcctttgcctacctggtacgatgcttctgtatcttatctgacctatgatgtcacccccttgttgaagtccggtaccaatacgataggcgtggctctgggcaacggccgctatctttccatgcgcgccaatgggatggtaggttttggtttgccccgtctcatggcgcagttgaatatagagtacgacaatggtgagacggtgtcggtagccagcgatgactcctggaaagtgacgaactgcggtcctataaccgcaaacaacgaatttgacggtgaacattacgatgcccgcttggaattgggtaaatggacggaaaacggctatgatgattccggatggcagttggccgaacggatggaggctcccaaaggaaaacttgtggcacagctctctccgagtctgaaggtgatggaggagataaagccaatatccgttaaatcggtaggtgatggaagatatatcgtggatatggggcagaatatggtaggaatacagcaggtgaaactgcgtggcaagaaggacaagcccattactatgcgttttgccgaagtgctgaaggacaatggtacggaactgtatcttgacaacctgcgcagtgcccttgtcacggatatttatactcctgctgctgacggtgagtttgtttgggaaccgttgtttgtttaccatggtttccgttttatggaaatatccggtttggactatgaaccggcagcggatgatttcaccggtaaggtggtgtatgatgaaatggcaacgaacggtacgttcgagacttccgaggagttgattaacagacttcacaagaatgcctattggggaatccgtggaaactatcgcggtatgcctaccgactgcccccagcgtgatgaacgtcttggatggctgggcgaccgcactaccggtgcctatggtgaaagtttcattttcggcaatgccttgatgtataagaagtggctggtggatatagaagagtccatgaatgaaaatggaagtatctctgtggtatctccccgttactggaccatcttccatgatgacgtgacttggccggctgcctatttttacgtagccgacatgctttaccgccagtttggcgatgatagctccatcaaagagcgctatccgtccatgaagcgctgggtaaaccacatgacggagaccaaaatgaaggactatattctggtgaaggatgaatacggggattggtgcatgcctcccgagtcgccggagctgattcattcggaagaccctgcccggaagacgaacggcgaagtgctgagtacaacggtgttttacagcattctgcaactgatggagaagttcgcgcaaatgaacggacttccggcagatgccgaagagtatgccgcacttgctattaaaatcaaggacgcttataacaagaaattcttcaatcccgggactgcacagtatgacaacaatacggtgacggcgaacctgctttccctcagactgggtctggttcccgacggatatgaagataaagtatttgccaatgtcgtggagaagacggaaaaagactgtaagggacatgtcagtgccggtgtgcttggcatccagcatctgatgcgcggacttaccgagtacggtggactggaacttgcctataagatagtgaccaatgacacttatccctcatggggctacatgattaagaagggtgcaaccaccatttgggaattatggaatggtgacacggcaaatccggcgatgaattcaagaaaccatgtgatgcttttgggagatctgctgatatggttctatgaggatcttgccggtataaaaaatgctcccgcttccgtcgggttcaagcagattctgatggaaccggtattcccggaaaaactgaattatgtgaatgcttcgcatgtatcgccttatggcagaataggaagttcctggaaacgtgatggcaataagctggagtggaacgttgagattcctgccaatacaaccgctacggtcaagctgccgcttgacttccatgtacaggtagatgccggtcaggcggggattcattccgtggaggaggctgacggtaagctggtagtcgaattgggctccggcaagtatgtattcatgtctgaatgatatttttctaacaacaataaaacagatgtaactatgagactaaaaagattgtttttgggggtaatgcttttggcaggcattacgggtgcaggagcggcaaatgttgctccggaagacatctctgcctctatttccttaaaagtgccggggaatgatgccaagcaatatccgctggccttgcagaagatgcaggatggtatgtacagctgccgggcttcggaaacgttgccgttggacatcatccgccaggtggtggacaaggatggcaaacagcgcattaccgtcacactcaaggcgctggaaaatgtgtatttcaactacggggaacagataaagaccggttacaagcattcggactgccagttctacatgccgggcttctggtatcgccgcaacctgcgttcgccgaaggaagctccttctttccacacatcggacagttggctggtgcgtgaggaccgtttgagcactccgctgacggcagctttcaatccggcaagcggtacgtccatgtcggttatccgtattgacaagttcgacaaggaagctttgaccactcataaggagggagaggtaatcttgtccggcgagacttccatcggatataccggtttctgcaatgtggatggtgtgactgtcttggcatacggtttcccctataaggaagcaccgaagacatatatccgcaaattgacgctggctcctgccgttgaggctttccagttgctgcgtaagggcgatagcatctccatgacttgggaggtgtccgaaaggaatgctgccgatttctcggaatgcgtacagcgcacctgggagtattgttatgacactaaccgcccgaaaccggttgacacaccttacacggtagaccgcatgaaggaggtgatgagcaacttctttgtggaaagctatgtcagcaatacccccactcattattactccggtgtagagttggagactgctacttgtgccaataccgatgttgccgaagtgggctttgtgggacgtacgttgctgaacgctttcaatgctttggagtatggcaaacagcagaaccgccaagacctggtggacaatgccaaccatatctttgacacttatctccagaacggtttttcgcctgccggtttcttcaacgaagtggtgcactacaaccgcggcttcaaggaaactagacatagcatccgccgtcagtccgagggagtgtatgccatcttgaactatttgaactacgagaaacagcagaagcgtaaacaccccgaatgggagaaacgcatcaagggcatgctggacagcttcctcaagttgcagaacgaggacggcagcttcccgcgcaagttcaaggatgatttctctatcgtggatgccagcggtggtagcacgccttcggcaacattgcctttggtgatggcgtccaagtatttcaaggacaaacgttatctggcaagcgccaagcgtacggtagactatctggagaaggaactgatatccaaagccgattatttctcttctacgctggatgccaactgcgaggacaaggaagcctccttgtatgctgctacggctgcttattacctggctttggttaccaaaggagaagagcgtgcacactatgccggtttggcaaagaaagccgcttattttgctttgtcgtggtattatacttgggatgttccttttgccgaaggtcagatgctgggagatatcggcttgaaaacccgtggttggggaaatgtgtcggtagagaataaccatatcgatgtatttatcttcgaatttgccgatgtactgcattggctctccaaggagtacaacgagccgcgcttctctgactttgccgaggtgatttccacttccatgcgccagttactgccgtatgaaggacacatgtgcggcattgccaaagtaggctattacccggaagtggtgcagcataccaattgggattacggacgtaacggaaagggatattacaacaatatcttcgctccgggctggacggttgcttctttgtgggagttgttcactccgggacgtgcggagcagttcttgttgaaaaaatgatagtctaaacagtaaccaatattgtatttatgaataagatgatgactttgttggcaagcgtgatgctattggcatcggcttgcacgggcaaacaggcgagtgaaaagactgcttctggactggaacctgcgaacttccgtacggaagtggatggcaagcagacagacttgtttgttttggagaataagaatggtatggaagtttgtattacgaatttcggtggacgtattgtatcagtgatggtgccggacaaggatggcgttatgcgtgatgtggtgctgggcttcgattccattcaggactacatcaagttcccttcggatttcggcgctaccatcggacgttatgccaaccgcatcaaccagggtaagattacagtggatggggtagagtatcagctgccgcgcaacaattacggtcattgcctgcatggaggtcccaagggataccaatatcaagtgttcgatgcccgccagttgagtaatcaggttttagaactgacttatctgtcgaaagacggagaggagggcttcccgggtaacctgacctgcaaggtcactttctcgctgacagatgacgatgccatcgacattcgttacagtgccgaaacagaccgtaccactgttgtcaatatgacgaaccattcttactttaacctggacggtgacccctccaagtccaattcggattatctgctcactatcgatgcagatgcttatacccccgtggacagtaccttcatgactaccggtgagattgtttccgtagaaggtacggatatggatttccgcactcctactgctgttggcgcccgtatcgacaatgactttgagcagttgaagaacggcaagggctatgaccataactgggtactcaatacgaagggtgacatcacccgtccgtgtgccaccctcgaatctcccgtgacgggcattgtccttgatgtctataccaacgagccgggcattcagatttatgccggtaacttcctggatggcacactgaccggaaagaaaggtatcgtgtacggtcatcgtgcgtccgtctgtttggagacgcagaaatatcccgatacgcccaacaagccggaatggccttcggcgttgctgaagccgggagagaagtatgacagtcattgcatctatcgcttttcggtgaagaaataaatataggggatgtgtcatctgtgtgctatcaaccgttttgataccctcttattgtatggccttttttgtgaatctaaaatataatatacaatgagacactttagtgtttttttattggctactttattccctttgattttcatgggttgcaaaagtgaggaagactcttatcctcctattcattatggatacaatttagcatttgtcgatgaaaatggcaatgatttgattgagggaatgcaaaccggtcttggaagaaatggtaagcctgctttgagagagaaagattactcctataaattggtagaacccgattctaaagatgactttaccggaccggactgtatctatgtggaaagcagggacggactttttactttggcaatctttgatgcactatgggatggatataaatatgacaagaagcctgaagtattgaggcgtacgtttgtttgtccctatatctttggtgacggagaggaatattccattatttcccattggaagtacaatgatggttatggcagtgttgaacttattagagtaactatagatggtgtggatgcccgcatcgaatcaggagcagacaaatatcacccgttagttgtcgttgtgttggcaaagtaacttgtttttcttaaatactctgtcttggtaaaatcagcactttatcaagacagagtttttattctttggatttaccgcatcgccagcgccttattttccgcctcctccataatctcccgttctcccggccctttgtcattgatgccgcaaaggtggaggatgccgtggatgatgacccggtacagttcgcgttcgtagttgttatcggcgaactgttccgcattggtgcgtacggtatcaaggctgatgaagaggtcaccgctgagacggtttccttcgcaatagtcgaaggtaatgatatctgtataataatcatgttgcagatattggcggttcacttcgagtatcttctcgtccgagcagaagatgtaggcgatttcaccgactctttttccgtaagtggcggctacggattttatccattccgtggtttcacgcttcttgatggatggcatttccacgccgtctgtctgataactaatcattttatttacgatttaatgatttacgatgtacgattgaaattacgttcttgcgattaagctagttcttttaaaagaagaataagtaactgatgatgatggctgcaatgatgccggaaaaatcggcaatcagcccacacgtcacggcattcctcgttttggtgatacctacgctgccgaaatacacagcaaggatatagaacgtagtatccgaagcaccgcgtaccacgcagctcatacggctgacgaatgaatcgggaccatattgcttcatggtgtcaatcatcagtccgttggcaccgctgccgctcagtgacttcatcaaggcagtgggcagggcacctacaaaactggtatctacaccgaatagtcctactacataaccgataccgttcaccagtatatccatggcgccggaagtgcggaaaacggcgattccaacgagaaaagcaaccagataagggataatgcgtatggcagtggtaaagccttctttggctccttctataaaggcatcgtatacattgattttcttccatagcccccagaggatgaacagcaggatgatggagaacagcagtatgttggcaattaaagtggaatatacacccatttcatcacggctaatctgtgtgaacagataaatgagtgcggcaaagaaaagactgatgcagccaatcaggataagtatgggcttgttcagcaggttgatgcgttgtgcaatgctgacggcaatgacaccgacaatggtcgagatggcggtcgttatcagtgtggggataaagatgtccgtgggttgggcggcacccatctgcgagcgatacatcatgatgctgacggggataagtatcagtcccgaagtgttgagtacaaggaacattaccatcggattggtggcagtatcctttttcgggtttagttcctgaagttccttcatggctttcagccccattggggtagcggcattgtccagccccagcatgttggcagagagattcatgaatatggaacccatggcaggatgtcctttcggtatttcgggaaagagacggcagaataccggactcagccaacgggagagggcattgatcatgccgctgttttcgcctattttcatcacgccgagccagagggcgagtattcccgtcagtcccagggatatttcaaaagctgttttggaagaggagaaggtggagttgacgagttctgtgaatatctccacatcacccataaagatgagtttgcagagggccacgatgaatgcgatgacgaagaatgctacccagatgtaatttaaaaccatgtatcgttactttgtttctaatggattaatatttgttttcgttggcaagattccaggcgttgaggaaagctgctttggttatttctatcattttctcccagttcagccgatcggtgtggtccgaaggctggtgataatcgggatgtccgtctgtgtggtaccagatgatggggatgttgcacagggcaaaagaagcattgtcacttcctcccgtggggcggtcccaggcgcggtagtccggttgcaggcgcaagctgtagcgtgcaatgtcctgcttcagccagtcgccgaatacggggtgggcggcggtgtagaagtagacaacgtgttgaggctgctcgggcttattgttacggcctatcatgtcgaaattgagataacctttcacctggctgatgaaaggacagctttgtacaaagtattttgagccgagcaatcccttttcttccccatcccaaaaggcaaagatgaccgtgcgcagaggcttctgtccggtggcaagaaatgcacgggctatctgcaggacggcagagacaccggaggcattgtcgtctgcaccgttgtatatccggtcgtttgccagcgtctcgtccacacccagatggtcgaagtgggcacctacgatgacatattcatccggtcgttctcccgggatggttcccaatacattactcatctgcaggatgcggtggacgccttgtttaaggatggcgatggagtcgggatgcacttgccaccgtccccgttgttggcgttccttgttgtaagccttgaagggttggtaataattgtccttttccagcggggcaatgccggcttctttcaggcaggatgccagatagcgggcagccagtcgtgaaccgtgcatgcctgcttcgcgtccttgcagctcatcgtcggccagaaagccgacaatagccttggccgaagtgcggctgatgctttgcaaccccttttcttgtggagattgtgcatgtaaggatagtgcgaaagaaaggcagcagattgctcccaaaacagctttatacatgtcgtacggttttaaggattggacataccggttgcaaaattaaagataactttccatagtttctatataaatgttgtatttttgtccattggcagatgaattcaaatccgtgtaaatcaaatgagagaaggatgaaaaagaagaatgaagcagtggaaaccgtcttgtgcgaacgtgtgctttcggcagaagaagtggcgtgcatctcggtacagattcagcaggaattggaggcgtatatcgacccggtgaaaagggagtatcttccccgtttcttcaagaccggaaaggggcagtatggcgagggggataagtttctgggagtggtggtacccaacacccggcaggtggcaaagcagcacaagcacgaaccttttggggtaatggcaaccttgcttcagagtgaatggcacgagtgtcgcctttgtgccttgctgatgttggtggagcgattcaaaaagagcgatgaaaaggggaaaaaggagatttatgacttttacctttcgcaaacgggccgtatcaataattgggatttggtcgatttgtctgcccccggcattgtgggcgaatatttgaaagacaaacttcgtaaagacctctaccggctggcggatagtccgctgctttgggaccagcgcattgctgtggtatctacctatacacttatcaaaaatggtgatttcatcgatatattagccctttcggagcggctgctccatcataagcatgacttgatgcaaaaggcggtaggatggatgctccgggagatgggtaagcgggacaaggacttgctggtacaattcttggagaagtattgcaggacgatgccgcgaacgatgttgcgctatgccatagagaagtttccggaggaggagcgcaaggagtttatgaagcgctgatggggaatgaaaatcgttaaactgtattttgctcttcttgccaacaagttgacaagtttttgccatcttattggcaagactttgccaccgcgttggcaaacttttgccataggcatggcaaagttttgccaaaggtgaggcaaagagttggcaaaattagtctctgatggtcagtgcgttaccagaggtagccttctgcgtaactatcaaattctgtagccatgccggcatccagatgtctgaagacgttcagtacggattgttgctcttcggggagcagcaggcgttcgcctttgcgggcgcggtagtaggtgcgttggccgaagccggctatcaggttggcgatggcgattccccgcttgttgtagggtaggctgttcagcatgttcatgaagcctttggcgtaacgcgccttctgactggagcggtagaaggggcattcccctttgacggtggcaaggcgtttggggctgatgattttccagtaatccttttcggtaggcatgctctgcatggcgagctggcggaggcaggtggcagccttggggcattgcccgttgaggcataaggggtagtcgaaggggacttgggtaaaggatatttcttctttcataagtagcgtgttctatgcattgtgctttcagcaggggggagattcggcttgctgtcagtaaatggctggttattctgcacaaatgtaggaagaaagtgtgagcctgcaaatatatttcaagtatatatcttgctacttctatcgttttttctgtaatttgcctccgagcagcataatattccgttgtatggagcgtgccaggtatgtcatacgccctttacttatgtgaaaaaagaaaggggatgagtgctatctcaaaataaattcgttattttgcagtagacaaaaagctttggagtatgaagtcattgtatatcaagaactataagaacctaagagagctgtctattgattcgcttgctcgggtcaatttaatagtagggtgcaacaatgtaggtaaatctacgttgctggaagctgtttccatttatttggcaaacgggaatgacgaatggctgaaaacgattttggatttcagaggggaaatggtgaatgtagattccgctaaaggggatgtggatttcagccaagtattgtcggagcattacagctccttgttttccgggcgtaagatggatttcaggaatgccacggctatttccattggcgaacagagtgacctactgaatatcaaacttgtacatatagccgaggaacagaggggagggacaattgtacgttgggtctataatgatgacgatgctgattcgggcgaacacttatttcgttacataggtgatggtttgagtgtggtctcaggctcgaatgcccctatgctaatacctttctttcgacgtggctttccgggcaatgtaaaggacagagttccgtttgagtacgtattggcacaagactttcatcttagaaaaaatgtattgcttttcgaccgtatctctctatccgatagagaaggttatgttttggatgccctgcgcatcatcgaaccaagtattgaccggctgaacttcttgaatgagaatgaatattccaataggcgtgtcccttttgtcactttgaaagatacgggcgagcgtgttcgtttgagttcgatgggtgacggcattaaccggattcttactgtaattcttgcgttggtcaattgcaaaggtggcgtcttcttgctggatgagtttgaaacggggcttcactatacggtacagacccaattgtggagagttatcttcatgctttccgaaaaactgaatgtccaggtatttgccacttcgcatagtcacgattgtatcaatagttttatagctgtgaaccggggaggtcagataattcgcttggacaaccggggaggagagatcgttgctgtgaactatagcgatgacaaggagatggaatttatagcacaaaatggtgttgaaatacgataggatatgagtaaattaagcaagagcttgccctatcatttgttcgttgaagggaaaaatgaccttcatgtagtttcgtctttatgcggactacatcatgtgaatcagaatttcaatatcaaagtttgcgagagtgtagagaacgcaatcgggctgttcaggctgacacttactaatccatcggcatatcctcgtatcggtgttgtgctggatgctgatactgatgtggaaaaacgctggaggcaattggttgatattttgaaatccagtaataaatatgactgtgatggcttagatttgccttctgacggactggtcttgtatccgttgaatgactatgacgctgtagtaggtatttggattatgcccaataatcgttttgaggggatgttggaggattttgcattgaacatgattccggcagaagaccttttgattcggaaagttgaagtagtgctgtcagagttggaagcagaagggatacaacgctacaagcaagtgcatcgctccaaggcaaaaatacatacgttcttggcatggcaggatgaaccgggaaagcctatcggacaagctattactgctcgtatattgaatccggatgcagaagaagcaaaagcttttataggatggctgaataagttatatgatagatagtatggaacaagaagattttgatatacgcaaccagcagcccgtcaccagccgagaacgtgatttcgagaacgctctccgtccgttgaattttgaggatttcagcgggcaggacaaggtggtggacaatctgcgcatatttgtgaaagctgcccgcctgcgtggcgaggcgctggaccatgtgttgcttcacggccctcccggattgggaaaaacaacactcagcaatatcatagccaacgaactgggcgtaggtttcaagataacttccggtccggtactcgacaagccgggggatttggcgggagtgcttaccagcctggagcccaatgatgtacttttcatcgacgaaatacaccggttgagccccgtagtggaggaatatctgtactcagccatggaggactaccgcatagacatcatgatagacaaaggcccttctgcccgaagcatacagattgatttgaatcctttcacgctggtgggagctaccacgcgtagcggtctgttgacagctccgttgcgtgcccgtttcggtatcaacctgcatctggaatattacgatgatgatgtgttgagcggcattatccgtcgttcgtccggcatcctcgatgtgccttgctccgtaagggctgccaccgagattgcgagccgcagccgtggcacaccgcgtattgccaatgcattgctgcggcgtgtacgcgattttgcccaagtgaaaggttcggggagtatcgatacggaaattgcacagtttgccctcgaagccctgaatatcgacaaatacggtctggatgagatagataataagatactctgcaccatcattgacaagttcaaaggcggcccggtgggactgaccaccattgccaccgctttgggcgaagatgccggcacgatagaggaagtctatgaaccgttcttgataaaagagggtttcctgaaacgtaccccccgtgggcgtgaagtgacggagcttgcctacaagcatttggggcggagtctctatagtagccagcgtaccttgtttggcgacgagtgattcattaatcattaatcactaaccattaatcattaaaaagaagtggccggattaaaatcattggcaaaagaaactgccatttatgggctgagcagtattgtggggcgtttcctcaattacctgctggtgcccgtatataccatggcgatgtccgcacagagtggcggctatggcgtagtgacgaatgtatatgcgtgggtggccctcatgctggtattattgacgtgcggcatggaaaccggtttcttccgctttgccaataaaggggaggatgacccgatgcgtgtgtactccacgacattactcagtgtgagtatgggggcgcttactttccttgcattggggctgctgtttctcgaccctattgccggatggatggagtacagtgagcatccctggtacgtgggcatgatgatgattgtggtggcgatggatgctattcaaagcattcctttcgcttatttgcgctacaagaagcgtcccattaagtttgcggcactcaaactgctgttcatcttcctgaatatagcactgaatctggtctattatgtagggatgaaaggggatgacgtgggctatgccttccttttcaatctgatatgcacctctaccattatgctttgcatgattccggagttacgcgggtttgcttatgtgctggataaaaaactgttgaagcggatgcttgcttacagtctgccgttactggtacttggcttggcgggtatcttgaatcaggtggccgataagattatttttccttttgtctatccggatgaggcggaagctactgtgcagttgggcatttatggagctgccagcaaaattgctatggtgatggcgatgcttacacaagctttccgctatgcatacgagccttttgtcttcggaaagagccgggacaaagacaataagcaggtatatgcgcaggccatgaagtttttcatcatctttacactgctggcattcctggctgtcatgttctatctggatattttgcgctatatcatcggccctgattactggccgggattgcgggtagtgcctatcgtgatggctgccgaaatctttatgggtatctatttcaatctttccttctggtacaagctgattgacgaaacgcgttggggagcctacttctccctgataggttgcgcggtgctggtagtgatgaacatacttctgattccccgatacagttatatggcttgtgcctgggcaggattctgtggctatggtatcgccatgcttctgtcctatttcgtagggcagaagaagtatcccattcagtatgacctgaaggctatcggtagttatgtgctgcttgcggcagtactctatctggctgccgaatatgtcccgatagaaaatatctacctgcgtatggtgtaccgtaccgttttgttgctggtctttgtggcctatatcgtgcggcgtgatatgcctctcggcagcatacccgtcatcagctggttgataaagaaataaactactgaatagtaaatcgtcaaattgtaaatatcatggattctgacaacagaaataccttcgctatcaagacttttctgaaagactatcttgatttgcgtaaagacaaggacaatgaactggaaactgtagattccatccgtaagggagtggaattcaaaggagccaatctttggattctgatattcgccatattcatggcctcgttgggattgaatgtaaactccacagccgtgattatcggtgccatgctcatctcgccgctgatggggcctatcatgggcgtggggctttctgtggggttgaatgattttgaattgatgaagcggtctttgaagagcttcttgataactaccttgttcagtgtgaccactgctaccattttctttctggtgagtcccgttgccgaggggcagtcggaattgctggcacgtacgtcacccaccatttatgacgtattcatcgccttgatgggtggcttggcaggtgtgacggcgctctctaccaaagagaaaggaaatgtgattccgggtgttgccattgccacggctttgatgccgcctctctgtacggcaggctacgggctggcaacgggtaacttgatttatttcctcggtgcattctatctttatttcatcaattccgtgtttatcagtcttgccactttcctgggcgtgcgcgtgatgcacttccagcgcaaggagtttgtggataagaaccgggagaagaaagtacgtaaatatattgtcctgattgctatcctgaccatgtgtcccgctgtctatctgacggtaggtatcgtccaggataccttctttgagagtgctgccaaccgttttgtcaacgagcagctctcctttgagaatacgcaggtgctggacaagaaaatccatcacgagggcaagggccacgaaatacgtgtcgtgctgattgggcaggaggtgcccgaagcttccatcgccattgcccgcagcaagatgaaagactataagctggacaataccaagctgatagtcctccaaggtatgaacaatgaagcggtggatatttcttccatccgtgccatggtgatggaagacttctacaagaacagtgagcagcgtctggtggaacagaaacagaagattgccacactggagcagaatttggaaagatacaaaaccttcgatgaattgggcaagaagattatcccagaactgaaagtgctctacccgtcggtaaagaccgtatcaatatctcatgcgattgaactggcggtagattctgtacgggtggatactgtgacccttgccgtcttgaaattcggcaagcatccgggtgcgcacgagaaggaaaagattgcggagtggctcaaggcgcgtacgggtgccaagcaattgaggctgattactgaataatacaagaattgacggaatgaaaataagatttatactgatagctgtctgcttccttttttctctgccgggacaagcggatgaagggatgtggatgctgggaaatctgaacaagcagacacgccagaccatgaaagagttgggcttgcagatgtctgtcaacaagctatacaatacgaaacgcccgtctctgaaggatgcggtagtcagcttcggaggcttttgttccggagtggtggtgtccggggacgggctggtgtttaccaatcatcactgcggcttcagcagcatacagcaacactcgtctgtggagcacgactatctgaaagacggctttgtggcacgtaatcttagtgaagaactgcctaatccggaactttacgtccgcttcctcttgcaccagcaagacgtgacccgtcgggtacttggagcagtaaaaccggatatgaacgaatctgagcgtacaagtgtagtagattcggtgatgctggtcattggcgaagaggtttctcgtaaagactccacgctgataggcattgtggatgcttactatggaggcaatgaattctggctttccgtttatcgcgactacaatgatgtgcgtctggtatttgcacccccttcttcagtgggcaagttcggctgggacactgacaactgggtatggccacgccatacgggcgacttcgccgtattccgtatctatgccggcaaagacaaccgtcctgccgactactctcccgacaatgttccctaccatcccgaatacgtggctccgatatccctggacggctatcgtgagggttccttctgtatgacgatgggctatccgggcagtacggaacgctatctttcctcttttggcatcgaagagatgatgaccaccaccaaccaggctcagatagatgtccgtggtgtgaagcaggccatctggaagcgtgaaatggatagccgtgacagcatccgcatcaagtacgcttccaaatacgacgaaagttccaattattggaagaacagcataggagtgaaccgcaccatcaagaaactgcatgtgctggacaagaagcgtgccatggagaccgaactccgtcgctggatacagcagacaccggaggagcgggaacatctgctgcatcttttttccgacctggagctgaactacaagagccgccgtgatgcttatcgtgccagagcttactttgccgaatctttcctgaacggtccggaactggtgcagcttgctttgtccatcctcaacttcgactttgagggggaagagaaaacggtggttgccaatctgaaagctatcgttgagaaatatgccaatctggacttgggcattgacaaggaagtgtttacagcactgttgaaagaataccgctcccaagtggattccacctatctgcccgagctctaccagacgattgcgacagaatacggaggtaacgagcgtacctatgtggatagtctttatgcccgctcggagctgaccaccccccgtggattgaagcgttttctggagcaggacaccacctatcagatatataatgaccctgccatcaacttgggcatcgacctcatcacgaagctattcgagatgaatatgcaggtacagcaggcttccggtgaaatcgagcggaatgaacgtttgttcaactctgccgtgcgacgtatgtacgcatcccgtaacttctatcccgacgccaactccaccatgcgtttgagttttggcactgtctgcggttatgcccccttcgacggagcggaatatgattattataccaccgcgaaaggtattctggagaaagtcagagcccatgcaggcgatgtggattttgaagtgcagcctgagttgctatcccttctttcctccggtgatttcggtagatatgccgatgagaagggagaaatgaatgtctgctttatctccaataatgacattacgggaggcaattccggcagtgccatgttcaatgccaaaggagaacttctggggcttgccttcgatgggaactgggaagccatgagcagcgacatcctttatgagccgaagatgcagcgcaccatcggggtagatgtacgctacatactgtttatgattgagaagtatgggaaggcaggaaatctgattcaggaactgaagcttgccaatccttaacgtgtgccccctgcctatacttttatgggtgatattttctaaatcactccacggatacggtcatcgaatgccgagagtgctgcctttgccccttcgcccatggcaatgactatctgcttgtagggaacattcgatacatcccctgccgcatatacccccggaagtgtggtacggcagaaagcgtcaatcttaatctccccggtcggagtcgtttccagcttgttgcggaaaggagcgctgttggctgccaaaccgatttgcacgaagatgccgtctaacgggaagtcgcgttcctcgccggtaaggcggtccttgatgcggatagaagttactttttccccgtttccatcgacttttacggtctgtgacgaggtgaagatttccacattcggcaggctccgggctttctcttgcagcacttggtcggctttcagtgtatcggcaaattcgaataccgttaccttccggcagatgcctgccaggtcgatggcagcttcaatccccgagttacctccaccgataaccgccacatgcttgccttgatagaacggaccgtcgcaatgcggacagaatgccacgccgcgtcctatgtattccgcttcgccctccacattcagtttgcgccagcttgcccctgtggcaatgattaccgccggtgcatggaacacctcgccgcctacggtggagacacttttttccgttccctgcaactctactttctctatcttacgctcctcgaaaatctctatcggatagtgctctatatgtgtgcggagtgcgttggcaagttctgcaccagtagtctgcggcacggagataaggttttctatgcctaccgtctcttttacctgtccgcctatgcgctcggcaacaatcgccacccgtaggcccttgcgtgcagagtagatggctgcggaagctccggctggtccgccgcccaataccagcacgtcgaaatctctctctatcggcgcttcgtcctcttgcggagcactgccgaaggcttcttccagcttctgcaaaagctctcctaaagaaccgcgacctacgtgaagcagcttgccattagcgtagactgacggcacggcttgtatcttcagcgcatccacttcctcttgattaagcgccccgtccaccatctcgtgggtgacgtgcggattcagcaatgcgatgatgttcagtgcctgcaccacatccggacagttggtgcaagtaagcgatacatacgtttgcaggctgatgtcgccttgcaacgcccggatgcggcgacgaattgcttcgtccggcagatttttcccctttccatcggcattcagcacggcaagcaggagggaagtgaactcgtgtccgccggggatgccgcggaacttgatgccggtttccatatcgtctttcagcaatgtgaactccaacacggggttctctatctcactcatccggcaggagagcttgtcggaacagcttgccacatccttcaagaatccgataagctcttgtgcctgctcgtgccccggatgataggtgatgtgaaagacgtagcgggcttccaaatgctggaatacgctccgcacctggtctaatatagttgtttctaacatgattaatagggtgtttggggtgagaaaatagtcttttaatatgtttgatatagagtagttgcagaacttgtgaggaagtactccaatactccttcgaaagtactgcggtactcctttgaaagtactacagtacttctgtacaagtactgcggacgtcttaaaggaaagcggacgtctttctatggtgaaagcgcccgctcctcctattacttatcaaatctttcctacaaggtcgatgctcggcttcaaagtttccgctcctttcttccacttggcagggcagacttctccatcgtgtgtggcaacaaactgtgcagcttctaccttgcgcagcagctcgtcggcattgcgtccgatgttgttgtcctgtatctcggcaatcttgattttaccctcgggatttacgaggaatgtgccgcgatatgccatgccttcttcttcaatcatcacgccgaatgcgcggctcagcacgcctgtggggtcggcaagcatggggtacttaatcttgcggatgctttcggaagcatcgtgccatgccttgtgcacaaagtgcgagtctgtgcttacagaatatacttctacgcccattgcttggaattggtcatatttctctgcgatgtctaccagctcggtagggcatacgaaggtaaagtctgccggatagaagaagaaaatggcccatttaccttttacgtcttcgtgggatactgttttgaaacttccgttttggaaagcctgaaccttgaattcagggagttgtgagttgatgatcggttccataatttttctcttttaataggtttagttttttgttttaccaatgcgaagattgtgcagacagaatgtagaagccagtttgcttgatgatgctgaggtgcaaccgaccttcgctttttctgtttgcaaaaatatagcatttttccccgatagaacaaaaaatccgattgaaagattttatggagcgatagatgaaatctatacgactgcttgggttgctttcagtgagagcatttccttgggtacggaaagttttatctccttaaccagcacttcgagcagcgtgtggcggataaagttcttattggtcagcagcacgacctggcgggtggggcaggggatggcgaaggaacgtaccagctctttctgggcatcgcccagttgcagaacggccagttcggggatgaaggtcacgcctttgccgctttctaccatgcgcataaaggtctccatgctgcccaagtgataggcaagctggctggcacgtgccgacttcatctggcagaagcgcaccagctggtcacggaagcaatggccctcgtcgagcagccaaagctgttcgccgttcaggtcggaagtacggattacctcgttgttgaagagggcgtcttcgcgcgacacgtaggcaaagaactgttcatagaacaacggcgtctgctgcaactcttccatacctgccagactcgctacgatacctgcatctatttctcccgtctgcagggctttcttgatgtcgtttgttttcatttcgactacccggatgtcgaggtcggggtatttcttcatcagctgcggaaagaaacggggcaggaggtaaggagctacggtgggaagtatgcccagcttgaagatgccggtcagtgagtgtttttcttcttctataatattctttatacggttggcttgaaccaatatattctgtgcttgttctatgatgtggataccgacgggagtggggcataccggctgctggctgcggtcaaaaatccgggtgtccagttcctcttccagtttctgaatcatggcactgagggtgggctgtgtcacgcggcaatattcggctgctttggcaaagtggcggaactggttgacggcaaggatgtattccaattgttgtaaagtcatgatgaacaaggcatttgaaggttatgtatagagttcgtctatgcaaagatagaaattatctgtttgacaagccttgatttaccccttatctttgcaatacccaaaagaaaaatagtataaatatttaaaacaatagaattatgaaaactttagattacttgcatttgaatgaaaagaaagtggctggcgtagcatcagcattgcaccaattattggccgacttccaggtacattacaccaatctgcgcggtatgcactggaacatcaagggacacggcttctttgtgctgcacgagaagttcgagagtatgtatgacgataccgccgagaagattgacgagattgcagagcgcatcttgatgctgggtggcgtgcccgagaataagttcagtgaatacctgaaggttgccaacgtgaaggaagtgtccgacatctcttgcggcagtgaggctgtggaccatatcctcgagacttacggctacctgattggtgaagagagaaaggtaattgaactggcaaatgaagctggcgatgacgtgacggcagatttgatgaccggctacctgaaagagcaggagaaaatggtttggatgctcgttgcattcagtacgaaaagctgcacgaaataaaggataaagagtcgtgaaaaaggatagggtgataaaacggtagcggatgctgccggttttatcaccctatcctttttctatagtttatatcacttcttcttcggtgtccgtcttgcccacccttcttcactgaagtcgggctctgcatccttaaagtcattgttgccctggaagaactgtttccagtcatcctttttgccacgggctttggtgtaaccccgctcttcgcggctgggcttgcctttcttcttgtcgtttgcaggactttcggccttttcgctgcgtttgccggtggcatcgttccgtttgccgtcttccttgtagctgcgcttcttgctgtcaaactcttttttcccatagcttccggctgtacccggacgtttgcccctcggagcctccttaccctcgtctccggcaacctctacggatactttacggccgttccagctggcgcggttcagggccttcactacattggtggcttccttttcctccacttcgaagaaggagaacttctgcatcaggtcaattcgtcccagctctacacgtccacgtgtattgttgttcagcaggctgattaattcgttggggaagaagttgtccattttacccaggttgatgaacaagcgggtaaagccgggttctgctttgcggctgcttctacggtcgttgcggtcgcccctctcgccacttcttgcaccacgctcactaccggttgctgtctctatctcgtcacggccgcgatagtaatccaggaaacggttgaattcatgcgaaaccatgcgtttaatcaggtcctctttgctcagccagtccagcttgcggtagatgtcggtcataaagtcggcgatttcctcctcgttcactttcaccttttcaagatcgtctatcactttgagcagttgcttttcgcatatctgtttgccggtgggcatttcgcctgcaatgaatttcttgccgatgatgcgctcaatctcgcgcattttgcctttctctcgcaggttgatgatggcgatggaagtcccggttttgccggcacgtcccgtacggccgctgcggtgggtataactctcggtgtcatcgggcaatccgtagttgatgacgtgtgtcaggtcgtccacatcgaggccgcgtgcggcaacgtccgtggcaaccagcagttgtaggttgcggatgcggaacttctgcatcacggcgtcacgctgcgcctgactcagttcgccgtgcagcgagtcggcattatagccttcctgcatcaacttgtcagctatttcctgcgtttctttgcgggtacggcagaagatgatgccgtatatctgcggatagtagtccacaatacgtttcagggcagcatacttgtctttggcatgtacacagaaggctacgtgtttcacgttgctggtgctttcatttttgcgtccgatggtgatttccttggcatcgcgcaggtacttcttggagatgcgtgcgatttccgggctcatggtagcggagaacagcaaggtgttgcgctcctgcggcacatcggcgagaatggcgttgatgctgtctgtgaatcccatgttcagcatttcgtccgcttcgtccataaccacgttctgtatggtggcgagggacacggttttgcgttccatcaggtccagcagtcgtcccggtgtggctacgatgatgtgtacaccccgtttcagggcgcgtatctggctttcgatggacgagcctccatatacgggcaacactcgcaagccatcggtatatttagaataatcgttcaagtcgcctgctatctgcaaacaaagttcgcgggtggggcagagaataagtgattggggaattcggttgttgacgttaatcttctgtatgagcggcaggccgaacgctgcggtctttcctgttcctgtttgtgccagtgctactacatcattgttttctcctaaaaggtagggaattacttcctcttgtaccggcatgggctgctcgtaacccatttcttcgatggcgcggcgtatctccggcgacacaccgagctcttcaaatgtcttcattaaatcttctgtatatctttatctttatatttcgggcgcaaagatagtgcttttcaatggataattgataattgatggttgataattatgcaattacatgataaaatcgttttttattggctactcattatccattatccattgtcaattatccgttaaaagaatgtcttgcagtctctttctttcttcttttgtcagaccgatgcctctttgcaggtaggtgtcggtatctccataccttcgttccatttcttcgatggcggcattcaggaaatcctcgcgtgccgagaagagggtggtgatggcctcttgcgagcgtgccggaagctggtaggcgtatcgggaggccgccgggatgttgaagtagtcgttgctgaggcggtagtcttccatgatgatgtcttcgtccactccaagggaggcaagcacaagtgccgatacgatgcctgtgcgccctttgcccgacgagcaatggataacgacgggataattgttcttgtccagcagaatatcgaaaatccggcggtattctttggtgtagttgctgatgagctcgcggttcatctgctccacgattcggtagacagtatcgctcttgattttctgttcctgtacacctttcaggatatactccatgtcgccggtaggaatggggatatggatcactttgaatgcctgttgcaaagggctttgtctattcgcttcgacagatgaacgcaggtcgatgatagtccttatgcctatgttcttgagctctttgcgcgaacacggtttcagtttatctatttcggcagagcggtacagcatgccccaatgcactttcttttgggtgggataggaggaatagcctcccaggtctcggaagttctgtatgccggggatgttgatgttgcgggtggcaatctttacccggtatttgtcagcgaatacaagtgtgtagtagtatcgttgtgtagggtcggtagtgatgacagtcatcttcaggtcggagatgttggcgacggcaacgggaacatcttcggggatatggttgggattggtcgaagcatataccttcacatttcctttgatgagaggggccatttcccattttacaatgcagttgcccacgttgttttcttcgcatacaacggaaatgtgaggggcagtgccattgcaggaagggagcagcactgccaaaacaagcaagttcaataagttcttatacataattcgtaacctctctgatgtcgttaatcacaaatatatgtaatttacccacagaaggtaacagcaatgccaagcttttatatttcttttttgaactttaaaaaaactgctatagattctttcgtgcataggcaggttggtttacaatgttacatcagcgaaccgggaggtggtaatggggggagtttcccttggggcttttgtctccatgacagcatgatgtaattgagttgttttcccacttctccgggtttaaagtgtatttgttctttcagttttacttcgatttccctatatacatgcagtggtactctggcgtatgggctaaaggtcgtgaaattgaaattcacttccattactttccccgtatccggactgagtagcatggttattgtgaactcacgctttccgagttcatctgccatggctttggtaaaagcttcgtccacaatgaagtctgcttgtttactcatggagctattgtattcaattacttttttttcattccagctaccgatgtatatttttcctgtggctttatatacaatatctttgtatgtcaacttgttctctttgttataaagagtcacaaactggctaccgtcatctacgtcacattgatacgtataaccatctacctcgaaagtggtggtttttttataaatgactgttccttcaagcgattcttctgttctgataggtttatcctgtgctacacaagggtagatgtatcctataagcagtgtaataagcaatagtcttttcattcgtcacaatttttagttgttaattttgtatgttgcttacattagcgaaccgggaggaggtaatggggggagtttcccttggggcttttgcatccatgccagcataatgtagttgagttgttttccttcctctatgggtttaaaatgaatttgttctttcagttttacttcgatttccctatatacatgtagtggcactttggcgtatggctcaaaggtgaaaaaattgaaattcacttccattacttctcccgtatttggactgagcaacatggttatcataagttccgttttcccaatttcatctgccatggctttggtgaatgcttggtctactatgaaatctgcttgctgactcatgaatctgtcatattcaattacattgctactccagctgccaatatatgtcttccccgtgtctttatacacaatcttttcgtatgtcagtttgttttctttgttataaagagtcacaaactggctaccgtcatctacgtcgcattggtacgtataaccatctacctcgaaagtggtggtctttttataaatgactgttccttcaagtgattcttctgttctgataggtttgtcctgtgctacacaagggtagatgtatcctataagcagtgtaataagcaatagtcttttcattcgtcacaatttttagttgttaattttatgttgggaaaaatattggtgatatccgaatactctttaaatggataattgtcgtatccttcctgacggaaagcattaacgacattattagatatataggtttcaaagatatccaagaatgaagttgtaacatgaccttgctgatttacatatttagtcaatgaagttgttgctcttaggcgttggctttttgcatatttatcttgttttttgtccgtccactccgcgctcctttgtaagaacaggtattgcgcatagtgcgcttctatctctctgttcatcatagaacttttgaacgatgatataggctcttgtgtggtttggaaaacatggaacatttcatgcagaaggttgtttgcttccaattcttccaatccgatgtgcaaggtatgctcttcccaattgtaggaataccctttgccgaaatcgaattccagattgattttgttgtttttggctttctctttcagttggctgtataggtctcctcccaaacagtcttccatgattcgggctgtcatgttttcggtgattacccataaaagcgagtcttggtcggcctctttcttgaatatatttcctgccggagtgcccgatgaagagccggaacctcctgaacttcctcctccaatccacacatcgccgcttcctcctccttcactgttccagttgctattatttataagggcatcatctacccaataggaatgactaacgcagttggtatagctgtattccagctggtctttaggtccggtatatacatcccagcattgggtgacggttattaccgaacgggtctgggcatgaggcttgaatgtgagtccttgcgcattctcttcgccaaataccagatagcttaacaagtcgaatatgaacacttggtcgctttctcttatgagttcgtcatcacgcttcaatggaaggaatttcatccatccgtctttgatgtgcaacagccagatggcatcgatgcagtgtggcttgtcaaggcggtagaggggaacgaagatgcaggtctcttcttcttcggtcaattggtaggtgaagttccagagaggaatgccgtatttcaacaggaaaggagcggtgaaatgcttttcttcttctactctgcgtaatgcggaaatcacggctttcagggtagagtcggtgtaggcaaagaagttttccggcttgaataacgcttgccgggtcaacgggatgttgtttgccgggaatcggggttgatagaaagattcttctgtttcgcaagaggcgagcattcctaaaagaacgcacagtgcaaggtagatgttttgccatttctgcttaggaggggttggagagtgctgtctgtttccttttctattcatagcgcgaatgcttaaggtataaagaatagacaaataaagcaaaaaaaaagcagaaatgaaaggaaaaacaggagaattttgttaatccggaagctgtcctaccacagattgcatggattttcaggccgtgtaatctgtggtgaacacccttttgtaagggtgcctatggttggtatttccgtgcttctgcaaattcctttgaaacggagttattgaaactcttgcatacctcggcggcaaactcaatgccgcattggatgattttgtcccaagtggcctcgtccatggtatcgaggtcctcgtagcgtacattgtacttcagcagcccgaagatgatgcctgcattgaagttgtcgcccgcaccgatggtgctgaccgcttccaacggaggaatggagtattctttggaaattgtgccggtacgcaatgaaacctgctccgcgccggccgtgcagaggaagttgcggcagtagaacttcactttgtccttgtatatcttgtcggcctcctgcaagccccacatatagaagaaatcctcctgcgagccgcgtacaatgttggcgtattccagattctcgatgatggtgggagccagcttgatggcctcctctttatgggacgaacggaaattggggtcgtaatagatgatggcatgcatgtcgtgcgcgcgttccagcagttccaataccttgtcgcgcaatacggggtttaaggcataataagaccctattataacgatgtcgtcctcttgaatctgcggatattccacgtccaggcgttgtttgggataatctttgtagaagatgtattccgcatcgctccggttgttcaggaaagcgagtgatacgggggatttcccgtcggggaagacattgacatggtctgtgggaatattgttctcgcgcatgaagttgaggatgatattgcccacgtggtcgttgcccgtttcactgataaagcagatgggaacgccgatacgtcccagtgaaacgatgccgttgaataccgaaccgcccggaacggccgctgtgggctgtccgccacggaatatgatgtccagtatggtttctcctatacctattactttacgcataacgatcttgatttttctccgaggtaaccgccgtgatggcgtttggagtagtcttcaatagtgaatcctgtttctttcatggtctgtaccaccaagatgtcgccgatgacagtcatggcggtggtcgaagtcgtaggcgtcatgcccagtacacatacttcttgcggtttcccggtgctgaggcatacattggattcgtgtgccagggggctgtcggggtttccggtgatgacgataaacttcagctccgggttcaggttatgtgccagctgtgtcagctccacgatttcgcgagttttgcccgaattggagataagtagcagcaagtcgttctcctgaagaatgccgaggtcaccatgctgtgcttcgctggggtgcagaaaaacggaaggaatgccggtggagcagaaggtagtagcgatgttcatggctatttgtccggccttgcccatacccgaagttaccagtttcccttttttgcggtgcacttgttctacgatgagttctacagctctttcataagcgtccgtcactggaatgttcagtacggcttgtgcctctttctgcaaaagctcttgaatggatgcaatcatacttaatgtgctaatttgattaatgtgcttaaaattatagcaattgcaaatatctgcaattttctataaacggcaataagttttattgtatttttgtcgcctcaaatagtttgaaacgtcagaatgaagaacttaaaagaaaatttactgccaactttcaatcaatatatcctgcccaatggcatgcgcatcattcacgaaccctcagcctccaaagtggcttattgtggttttgccgtagatgcgggtacgcgcgacgagcttgaaaacgagcagggtatggcgcattttgtggagcaccttatatttaaaggtaccgccaagcgcaaggcatggcacattctgaaccgcatggagaatgtgggcggcgacctcaacgcttacaccaacaaggaagagacggtgatttactctgctttcctgaccgagcatttcggccgtgccttcgaacttctggtggatattgtattccactccacctttccgcaacgcgagatagagaaggagacagaggtgattatcgacgagatacagtcctacgaagacaatccttccgagctaatcttcgatgattttgaggacttgatattcagggggcatcccctgggacgcaacattcttggcaatcccgagcagttaaagcagtttcgcagtgaggatgctgccgcattcactgcccacttctaccatcccaacaatatggttttctttgttctgggtaatctgagtttcaagaaagttgtgcttatggcaaaaaaacttctggcggatataccggcaacaccggtgcattatggtcgtactccgcctcccctctatgtacccgagcatcttgtagtgcataaggatactcaccaggcacatgtcatgattggcagccggggatataatgcatacgatgacaagcgcaccgcactttacctgctgaacaatgtcttgggtggcccgggcatgaatagccgcctgaacgtctctctccgtgaacgtcgtgggctggtctataacgtagaatccaacttgacttcctataccgatacgggaactttctgcatctacttcggttgcgaccctgcagatttggactactgcacccgcctggtatataaggaattgaaacgcttgcgtgatgtccggatgacttcctcgcagcttgcggccgccaagaagcagcttatcgggcaaatcggtgtagcttcggataataatgagaacaatgcgctgggtatgggaaagactttcctgcattataataaatgcgaaacttccgaagccgtgttccatcgcattgaacagctcacttcggaagctctgttagaggtggcgaacgagatgtttgccgaggactatctttcgacgctcatttatcgctgaccgctttttttatttgaaaacctgcaacataggacgtcctatccatacttgtggctgtttcagcccgaagatgtgggcaatggtggaggcaacgtcatactgcatcatgctttcgtggaattcgccttctttcttaatgttctttccggagatgatgaagggagtctgcatttcctgcatggtcttgccgccatgtcctttttcaatgcctccgtggtcggcagtaacgacgaagattgtttctttcagcatgcctgcctctgtaacggcctggatgatgcggctcacataaccgtcgagttctttcagtttggcgtaatattcaggagtattgtgtccggcttgatggcctacatggtcggggttgtcaaagcaaatggcaagaagggtcggttgtttctccttgatatacttttctgccataccgcataaggcttcgggatgtttgttgtagtcgggcgcttgcgcatagtggcttaaggcaagagtgtctacaaggtatttgataccgtcccattcatacaggcagcctatttccgcttccggccgggcatcacgtagcagctggaagatggtaggaaatatgccgtgctggttcagtacgcgtgacggaagctcgggagtcttggagccccattgcgtatatccgtgcaattcaggacctgcccccataaacatgcttgcccagttgacggcgctggaggagggaagtacagtccgtttttctaatgtataagaaccgtctgccatcagttgcttgatgtgggggatgtctgctttgggaacactgtagctaccccagccgtcaagaccgatgaaaactacgtgttttgcttttcccttggcattgcagggaactgaaaagaggcatgccactgctagggcgatgaataatgtaaaagtcagtttcttcatgttttctttagttcttattgttaacatgaaacaaagttacgggaaacgtacctagttttagtacgatatcgtacataatccggccgattttatatcgtttcgttcttttccaaccgttgcatgctgaattcacagccgcaatactgctggttgtagaagtcatactctttcagcagttggttgcgccgctcctggagcccgcctttccgccaattctgttcccagaagagggtatccggatagagcgcggcggcacggcgtccggcttcattgatttgctccaggcttttccagcgcgaagaggcgagggtagtggtgaatacggagaaaccatgctcggaggcgtagcgggctgtctctgtcaggcgcagtgtgaagcactttaggcatcggctgccacgttccggctcgttttccagtccttttatagtgtgcagccagtgtgcatagtcgtagtccgcgtcgatgaaatcgagttttttggaggttacgaagcggatagcctcctctttccttatctcatattccgcctgcggatagatgttgggattgcagtagaatacggtggggcgtatgccgttctccagcatgcactcgatgatggcagaggagcaaggtgcgcagcacgaatgcagcagcaccttgtcttcaccgttgggtgtctgaactttcaacattatactttcagtttaatcttgcctttcaccagcaggccggtcagccccacaatgacaagcgagaacatgagggacttgagcagccccggtacaccgcttcccaatgcctcgggatagtgcagatgcagcagttgctggacagcataccagatgtaagggataatatagcaggtcagcgttgccgtacctgcaggtttgatgatatcgaaccagttggttttgcctttcacgtccgtcagccagtagaagaaaccgaacagcgggaagaacatggcgaggcaatagaacagccatgtcggtgtggcttgtattttggatataatccagaacgggtgtgagacgagggcaaggacaagcattcctacgccgagggcacaaagcatgccgatgaatcgtcccggccgttcccggtcggcatagcgctgcatgagcagggaggtcaatacgccggacataccgaaggcatgcagtgtccagtcactcgggataaagggaagcaggataatccggctgccgtactctcccggtatcaggtctgaatggctgattacggcaagcaatacgaccacgaaccaggcaatggcattcttccgcaggctttcccgggtgaacagatagatgcctgcacataccgcatacgtccagccgataagtccgaggatgccccaccagcttatctggaacggtttcccgttcatgtccttgtagatgacgaggaaggcgagcagcagcacgcctgctgttttcattgcggtgaaaagggtctttttcgttccttccgctttgggatataccccccaggtgaggaagaagccgatgaccatcaagatggaaaaccattgatgtgagaggccgccttcgatgcctccgctgttcagtgaaaacagtcccatggcaatcagtgccactgtccgccagaagatatgggccacgacttgcagggtgttgtctccctttttgtaccggttttgtatggcaaaggatacggacatgcccatgcagaaaaggaaagcagggaagatggtgtcggagaatcccatcatgtcttcgtccatcctggcatgcatcagccagtggggcacgtttttcagtccgggaatgtcgttgacaaagagcatgaggaacatggtgagtgcgcggaatacgtctaccgcggcaatccgttggagtgttaagcttttcatgatagataatttgtttgggggttttgaacgcaaatataggaaactattctttccgatgctactgctttgcaggatttcttgctatatttgcatgaactttatggtcatggaaaggagattgttcattttttgttttcttgccgtcgtggtatggcaaagtgtggctttggctgccggcacgccctcttttactgcgctgacgtcctctttggatgaggctatcgaggcgcaccggcactatgtcgccgtgcgtgaaggacgcattgcccggctgaagcgccaagtgttggataccgataccgccaatatctctttttttcgatggaatggggaaatttataaggagtataaggcatatatctgcgattcggccatccattatcttcgtgtcaatctggattgggcagagcgctatggccggcaggatgcagcactcgaaacaaggctggagcttgcccacttgatggcttcggcaggcatgtacgaggaagccgccgaactcttgaggcagacggacaaagcctcccttccctcccatctgctgccggactattacaatgcctgtcataaactttacacagaactgagtttctatacgctggacgattctttcaagaagcattatcaggctttggctacccattatgacgattctttgatgcaggtacttctgccttcatcccccctctatctggaacgaagagagacgcgggaggccgctgcaggccatccggacgaagccttgagcatcaatgatacgcgtctggcacatgccaagcccaatactcccgaatatgcgctggtgacctatcagcgctcattgctctaccgccggctcgggaaccgggaggaggagaagcgctatctggctttgtctgcactgaccgatattcgcctgagcatcacagaccatgcctcactctggaacctggcggaacttctttatgaggaaggggatatggagcatgcctaccgttacatccgtttctcgtgggacgaaaccaaccgatacaacgcccgtagccgcagcctccagactgccggcatcctttcactgatagacctcacttatcaggccatgcgtgagaagcagaatgaccggctccggctgtacctctggctcatcagcgctttgattgtgctgttggtggtggcagtgggctttatctaccggcagatgcagcgactctctgccgcacggaacaagctggagcatgccaacgagcaactgcaactctcaaacaacatcaaggaggagtatgtgggccgtttcatgaatctctgctccgtttatatcaaccggctggatacctaccggcggatggtcaacaagaaaatctctgccgggcagatggaagagctgctgaagatggtgcgttcccgcgaggtgctggacgccggactgaaggaactctatgataactttgatactgccttcctgcaccttttccccgattttgtcgatgaattcaatgacttgctgcagcccgaagaacgcatcgtgctccgtaaaggcgagttgctgaatacggaactccgcattttcgccctgattcgtctgggcatcgacgacagttcgcagattgcagaattcctccgttattccgtaaacaccatctataattaccgtgccaaggtgaagaacaaggcccgcatttcgcgcgaggacttcgagatgcggctgatgcagatacgctgacaatacgtcaaactggctttttgaatccactttctgcctttctcttcttctgattatatttcagattattagttgtttgtttgttcatgcttcttcactccttccacctattcccgattcgccggtacgaggtgttcttatctttcctaactttggggaagcaaaagcgaatatcgcaactaatactataaccaaaattattgccatgaaacatttattagcgacaagcatttccatcgccttgctgtctttgggccttgcgggatgcggtgagaaacaagcgacaaaagaagtaacttcggatgcattcgtaaccattcagggtcaggacttgataaagcccgacggtaccaaactcttcatcatgggtaccaacctgggcaactggctgaatccggaaggatacatgttcaagttcaacaagaccaattccggccgtttcatcaatgagatgttctgccagttggtgggaccggactttacggccgacttctggaaagcattcaaggacaattatgtaacgcgcgaggacatccgcttcatcaaggagcagggtgccaacaccatccgcctgcctttccactacaagctgtttaccgacgaggactatatggggctgactgccgaccaagacggctttgcccgcgtggacagcctggtagagtggtgccgcgaatcggacttgtacctcatcctcgacatgcacgacgctcccggcggacagacgggcgacaatatcgacgacagctacggctatccctggctgttcgacagcgaagtcagccagcaactctactgtgacatctggcgccggatagccgaccgctacaagaacgaaccggtcatcctcggttacgaactcttcaacgagcccattgccccttacttcgagaacatggaggaactcaacggcaagctggaagatgtatataagaaaggtgtagccgccatccgcgaggtggacagcaaccacatcatcctgctgggcggtgcgcaatggaacggtaatttcaagcctttcaaggactccaagttcgacgacaagataatgtacacttgccaccgttacggaggcgaacctacccaagctgccatccagacgattatcaacttccgcgacagtgtgaacctgcccatgtacatgggtgagataggccacaatacggacgaatggcaggccgctttctgccagacgatgcgcgagaacaacatcggctataccttctggccctacaagaagatggacggttcttctttcgtcggcatcactccgccggagaactgggcaaacatcgtgtatttctccgaagcaccgcgtgccacgtacaaggaaatccgtgaggcacgtcccgcgcaggccatgtcccgcaaggcgatgatggactttatcgaggcatgcaaactgaagaattgtgtggttcaggagggttatatccggtcattgggaatgaagtagcgggtgctgcctcgctgcaaacagtacgtatcaagtcccagaggatgagatgccgggacttagcatgaaagaggtagggactgagctgtacacaccataggactgagtatccaaaacatccggatgttttagggtaaaacatggggatgtattgggataaaacatccgggtgttttggggtaaaacatggggatgttttggacaacaacatccggatgttatgggtactcactatacgggtgtaaggacttcagttcctatgtaggtagggctaagtcatattcccttgtatgttggggattatcaatggtacggactgattatgattgcttacttatataacaacttaattatacaacaatgaaaaaagtattattcggtttggttctggccgctgtcgcgctgcctcttctggcgcagcagaagcccgtctatctggacgcaagcaaacctattgaagaaagagtggaagacgccttgagccgtctgaccctggaagagaaagtgaagttgactcatgcgcaaagcaagttcagcagtgcgggtgtgccccgtctgggcattcccgatgtatggacggacgacggcccccacggcatacgtcccgatgtgttgtgggacgagtgggaacaagccggatgcaccaacgactcctgcgtggctttccctgccctgacctgtctggcggcaacctggaaccccgaaatgtctctcctttacggacagagcatcggtgaagaggcgcgctaccgcaacaagtccgtcctgctgggccccggtgtcaatatctaccgcacaccgctcaacggacgcaacttcgagtatatgggtgaggacccttatctggccggaaagatggtgtcgccctatatccggggcgtgcagcagaacggcgtggccgcctgcgtgaaacacttcgccttgaacaaccacgaagtgaaccgccacaccaccaacgtcatcgtggacgaccgtgctctttatgaaatctatctgcctgctttcaagatggccgtgcaggaaggcggagcgtggagcatcatgggtgcctacaacctatacaaaggccaacatctttgtcacaaccaatacacattgaacgatatattgaagggcgaatggggattcgacggcgtagtcatttccgactggggcggcacgcacgatacccggcaagccatcaccaacgggctggatatggaattcggcagttggaccaacgggctctcgaacggtgccagcaacgcatacgataactattatctggcaaatccctatctgaacctcatccgcgaaggtaaggtaggtaccacggaactggacgacaaggtacgccgcattctgcgccttatcttccgtacggtgatgaaccccgaccgtccgtggggaagcatgctctctccggaacattacgaggctgcccgccgcatcggtgaggagggcatcgtactgttgcagaacaagggcaatgtgctcccgatagacctgaaccgggctaaaaagattcttgtagtgggcgagaatgccatcaagatgatgaccgtaggcggtggtagttcttccctgaaggtacagcgcgaactctctccgttggacggcatcaagcagcgtgtggccggcaaggccgaggtggtctatgcccgtggctacgtgggcgatgcaagcggtgaatacaacggggtggtgaccggacagaatctgaaggatgaccgtactcccgaagagctgatagctgaagccgtgaaagaggcccgggatgccgattatgtcatcttcatcggcggcttgaacaagagcaacggccaggactgcgaggactccgaccgtaagggtctgggcttgtcctacggtcaggatgccgttatctccgcactggccgaggcgaacaagaatctgattgtcgtcaacatctccggcaacgccattgccatgccgtgggtgaacgaggtgcctgccatcgtgcaggactggtatctgggttccgaagccggcagttcccttgccgccatcctcatgggtgatgtcaatcccagcggcaagcttccgttcaccttccccgtgaagctggaggactgcccggcccacagcttgggcgaatataccggcaaacggagcaaggacatcatcgacatcaagtataatgaaagcatcttcgtgggctaccgttgggccgataagcagaagaaggtgaaaccgttgttccccttcggccacggtttgagctataccactttcgaatatggcaagccgacggccgacagcaagaccatgcaggccgacggtacgctgaccgtgaaggtttctgtaaagaataccggagcgcgcgaagggcaggaagttgtccaactgtacatcagtgacaagaagtcctctctgcctcgtcccgtcaaggaactgaaaggtttccaaaaggtgaaactggctccgggcgaaacaaaggaagtcacatttaccattgataaggaggctcttagcttcttcgatgacacccagcacgcttgggtggccgagccgggcaagttcgaggctgtcatagcagcttcggcagccgatgtgaagggaacggttccttttgaattgaaatgatgtaggaaaataaagtttccttttaggttattatcaaagatagtgtagatggagggtgtggccgtgaggttgcaccctttctttgtactctttacaagccaatatgttttcttatatttctgagtttcttcgggttggctaaggaagatgcagatatgctggatgttagagttaaagcagtgatgttttgtagtaatgggtgagtttttaccgccgtgtttgggcagattttcatcttttatatttatttttacagaaatgatcgggacaatggttcttgtcctgatgggatgtggtagtgctgtctttgccggaagtgcggcgggggcggttagtgcaggtgtcggaacgctgggagtggcttttgctttcggcttgtccgttgtggcgatggcatacgctatcggaggaatctcgggctgtcatattaatcctgccattaccctgggcgttctgttgtccggcaggatgagcgggaaagatgcagccatgtatatggtgtttcaggttatcggggcggttatcggttctgccattctttatgcattggtgtctacgggcgctcatggtggtcctacggctaccggttccaatgggtttgctgacggaatgatgttgcaggcattcattgcagaggctgtgttcacgtttatctttgtgctggttgtcttaggttctacggattccgagaagggggcgggtaatcttgcaggattggccattggtcttacgttggtattagtgcacattgtttgtattcctgttacgggaacttctgtcaatcctgcccgtagcatcggtccagcactgttccagggtggcgaggctctctctcagttgtggctgttcattgtagctccgtttgtgggtgctgcgctgagtgccgttgtatggaaagtgcttgctgcaaaagaaggtaaataaatgtcggcagacagtgccttaagaagaggcggctgatggcagaaaacttataaagggaagccctccgtccgaaactttgaagtttcggacggagggcttcctgttctttccttatgcttgctatatcttgtgccttattcgtacagcgatttggctatacccatttccagtccacgaagctctgccagtccgcgcagacggccgatacaggaatagccgggattggttttcttcttcaagtcgtctaccatctggtgtccgtggtcgggtcgcatcgggatagagacaccacggcgttgttgcagttcaaggaaggctttcatcacgtgatacatgtccacgtctccttccaggtggttggcttcgtagaaattgccttcggcgtcgcgttgtgtactgcgcagatggacaaagttgatgcggtcggcaaattgctgcatgatgactgcacaatcgttggcgctgcttacaccgagcgaaccggtgcagaggcaaagaccgttgctcttgttgggaacagcgtcaatcagtgcctggaaatcggcagcacagctcatgatgcgtggcaggccgaggatggagcacggtgggtcgtccggatggataacgagcatgacacctgcttcgtcggctaccggagtgatttcttgcaggaaatagatcaggttggcacgcaggcgttccagagtgatgcccttgtagcggtccagttcctgttggaactgttccagggtgaagctttcttctgagccgggaagtccggcaatcatgttgcgtacaagcagttgtttgtctgcctctgtcatctgttcgaagcgggcacgggctttggccttttcttcatcggtgtattcgccttctgcaccgggacgacgtagcaggaagaggtcgaaggcgatgaaagcggcacgttcaaagcggagggcacgactgccgtcgggtagttcgtaggcgaggtcggtacgtgtccagtccagtacgggcataaagttgtaggtgacaatgtgaatgccgcatttgcccaggttacgcaagctctctttatagttgtcgatatacttctggaagtctccggtttgggtcttgatatgttcgtgtacgggtacactttctactacagaccagcgcagaccgacggcttcaatcatttctttccgtttcttgatttcctctactgtccatatttccccgtttggaatatgatgcaaggcgtttacaatgccggtagccccggcttgtttgatgtcccaaaggcttaccgggtcgttgggaccgtaccagcgccaggtttgttcacaaagaatcatgttatttattgtttgatgatttgcaatttactatttacatggcgaatgcgttgaaccctccgtccactacagccaccgtaccggtgacaaagctggaagcatcgctgatgaggtattggatggttccgcaaagctcttctgcacggcccatacgtccgaagggagtttggcgaatcacatcttgcccacgttccgtgtagcttccatccgggttcgtcagcagggcacggttctgctctgtgaggaaaaatccgggtgcgatggcatttacacgaataccttcaccaaacttcttggcaacttccgtagccatgaaggctgtgaaattggagataccggcttttgcggcagcatatccggctacacgcgtcatggggcggaaagcagccatgctggagaagttgacaatagcgcctgtcttctgttccaccatcggtttgaggaagacttgtgtaggcagtacggtaccggtcaggtttaattcaagcacccgttggaactcttctatcttcaaatcgaagaaagtgcccgtgggcgcgatggtggcacccggcatatttccgccggctgcattcagcagggcatctatgcggccataggctttcaggatgtcagccaagttctgttccagcagttcacggttcatcacgtcggttgtcaggaacatggcttctccaccgtttgccttgatttcgttgacgatggcgtttcctacctctgctttgcgacctaagattaccactttcgctccttcttccgccagatgaagagcgatagctttccccaatactcccgttccgccggttattactactactttgtctttgatgttgaataagttcttcataatgttatgtattagtttataaaatgaatctttttcgcaaagttagggattaaatcattttcagtgcttaaatagagtgctaaaatacttatcttactggccggaaacggaaattagtgcggtttttaagattcgtttgctatcagatgcactcaccacgacgggtgcgtgctgcttgtttacgcggatacttgcccgcccgttagcagcttgtatgcggcgtgagccttgcgcggtgccttggttgcggagtaacgcttcactgtctgtgcagccgaattctatgaactggcaggcatccaggcaacgtatgccgttttcgtctatcagttcagcctgcacaagtatggtttccgcatcctgggcggtctgcgtcagaagtattcttgacggtttgccccaggttcgggtttgatactcctgctgaatttcatcgtcgaggcgcagcttgccgtcataccctgtggcggtaatcttgttgtttccttctcgtaatggcacattccagcgcagccctgctgccggaaagtcctggctgttgcgcttcttccgtccttgcgacacaccgttgacaaacaactccacttcggggcagttggaatagaccagaatttccttgggctcgcccggcttgccccagcgcaccggccaggagtgtccgtagatgtgcagcatcggtttgctgctccaataggattgaaagacgtaatagctctctttcggggtgccgtctcgttgcaccacccccttctgattgacgtaagggatgggattgtccgggcgcagcggagtggagaagtccttgaaagtccagaagaggctccccgtaagccggggcatggtctcttgttctttcaggtgccagtcgaagaggcggatgatataactttcgctccagtcgccgttgcggtctgcggcttcgatgtcgaagttatctattccttttctgcccgtctccttgttcacttccatatggcgcccggcatggctgtcgcctccccattcggcatggaggaaacgggtggtggcgtttattccggccgtctccatctcgcggtagttgcggaagcggcggccataccagcccgcccagatggtgggggagtaaacgtccacaatgtctttgcagaactcgcagcggcgaatggctgtggagcgcgtcgggtcgaggcgatgggcaaggtcgtgcagctcgcccataaaggcgcgtatgctgtctttttcgaacgtttggaaatcgcccggccagtcgttctcattgcccagcccccacaggatgacggaaggatggttgcgatgttgctcaatcatattggtgagcatccggcgcgcctggttcttgtagctctctccgcccagaccgccgcggcaccagggtatttcttcccagacgagaagtcccagctcgtcgcagagccgcagaatgatgccggactgctgatagtgccccaggcggataaagttggcacccatctcttttatttgttgcatttcggtgcgcatcatctcttcggtcaaggcagcgcctactccggcatggtcttcatggcggtgagtgccgcgcagcagcagccgttcgccgttcaggtagaaaggccctttctcttcgaagcggaaatggcggaagccgaagtgctgggtggtgcgcagggtatctccgttgtcgataagttctgccacgcaggtgtagagagcgggagagtgggggctccacagctgcgggcgtttcagggagatttggtacgaggatatttccgtaagctcggatgatatggaattaacctccttgccttcgggtgagaagacgcggagagagaactcttttgccttcttctccttgccggatagtccgccgaaagcaatgtctatcgagatactgccttgcttccctttctcatcggttgttgcttctatccgtatctgctcaaaatggacggcaggcgtatagacgaggttgacatatcggtagagtccgccgtagaggttgaagtcggacatatcggaaggaatcatctccgtgtcgcggctgttgtcgcagcgaatggcaataggaatctttccgccgaaacgctcccggcagagcggcgtgcgacggaatgcttccacggcttcggtgatgtctgccttccactcgtcgtaaccacccacgtgcgaagcgattcgggtggtatagacatatacctctgtcttctgtcccgcgccttcaaactccaggcaggtgcgtccgttggtatagggattctctatgttgagcatggtgcgataccagccggggccttgataatagttcacatcagggtcaacggcgtcttccgcattgaagcagtggggcagggtgactttctgccagaggggaacggtttcgggctttcctgctccggtaatagggcgcatcacttcccaaatgcttcccatatcctggcggataaactcccaatgctccgtaagacgttgcttgcggtcggtaggaatcagtgcgtgtgcctgcaacaacaggctgctgaacaatagactaagtaggattcggggtgctttcatggtatgttataaaaatgatacatatatacgtcctgcggggtatatatataaaagttgttaggtattaaggataaagttctgaggtatagggagaaaagttcttttctcttaagacaattctctgttcgcagcttgcggataaacattcgcagtgcgcggataagcgttcgcaagccccggatacatatccgcagcttgcgaataaactttatttcatgtccagcgcctctttccttgccaacgcttccagatagaagtaatcggcatagttcagcggcacgtctatttcgcttcctcccggatgatgtcccgtggaatgcagcagcaggaagccgtagtgagtgcccggttctgcccggtaatgcttgttgaggctatcgacaatcttgtcggcaacggcgcgatactgtttacccttctccggagctacgtaggtgcagagttcatataaacccgaagcgatgagtgcggcggcagaagcgtcgcgcggcacgtcggggttgatgttctcgggggtgcagtctttaatgacatccatcttcatatcccagtagggcacgccgtctgccggcatattgggcaggttgaggaagaagtcggcaatgccttccgattgtttcagataggcggggtctttggtgaaacggtaacacatggcaaagccgtacatcccccaggcttgtccgcggctccagaaggagtcgtccgagtttccctggtgtgtacacttcaggcggacttcacctgtttccgggtggtagtccactacgtgataagaggagtagtccggacggaaatgattcttcagtgtagtgttggcatggttcacggccacattccagtaaatggaatcgcccgtcagctgcgtggcacggaacagcatttccaggttcatcatattgtcgatgatgaccggatatttccatcggtcgcggttgtggtcccacgagcggatgcttttcaccttcgggctgtagcgggtaatcaaagtcttggcactttgcagcaccacatccttgtaagagcgttcacccgtcagttcatacgcctttccaaagctgtcgtacatcataaagccgaggtcgtgcgtgcccttgtgccacttggcttcttcaataggccaggtccacgagatggcagcccggcgccaatcgtcatcatgcgtataggcatatacctgccacaacgagccggggaagaaacccgagcaccaatcgtggggatgtatcatagccagcgaaccgtctttatggatgctgcgcggcatgacgcgacgccgggcagcattcttctcctctttctttgctttgtcggcgcactgcatggcaaattccagttgtttgcaggcaaaggcataggcgttatccacttcggagggttgcacatagagcaagttgaagcggtctttccactgaatgactctgtgggctttggatagtctcagatagtctttgcgtgcagggttgagcaagccggcacgatataggtctttacagaattcctgttgtttgtagtcccattcgctaatctgttggtaaggccattcctttacatccttccctgtatattgcgccaggaaatccattgcccggtagaagttgcgtccgtcgggagaggtggcattatcaatcctgattcctattttctctgccatgcagaagatatcgagtagatgggtcagattgtattgggaataaccgaaggcaagcgtgcggcgcaattcatgcggctgccgtccgtccggttctatctgggtgaagatgcgcttggcaggaacggcgttgataacttcccgggctactttaaggttgccggtgtagagggcaatggctatcacctgcgcatcgtaggccgtactgtggttgttggcctggcgggattcttcttgtccctgcgggctggtcaatatccagttcagcaacttgccgaaccatgcttgcagctgcttggaatctttggccgtaaaagacttcgattgctccaacaacttcacggcatccagcatctctacaaaggagtaactatccagcacgccgtagcaacggcctttgccgccgttgtgtccgggtatcatctgcgcatactccaggttgggattcatgcgtgtatccttgtcgaagaaccatacgcggataagctccgttgccttttgggcatacttctcttctccgctgaagtaccaggccagtgccagcgtggtgacgcggctggcggttgctcccaggcggttgcggtcgagcttgttcaattcggggttcgattcgccgtcgcggctcacgtaaggcagtccgtcgggctttgtggggtccggccaataatagcgggcctggctcatgtagtcgtgcttgttgccactggcaggcaccttctctttcatcatcacggaaagaggctgtacatccaatagtttatcggcctccgcttgcaatgcctggtaggcggttgcgtagaaaggttcatggatggactgttttacgttggcaaggtgcgtggcatcccagatggattgtgcttgtgtgcaaggcgccagaagcaataaagcaagcacccattgtactacttttagtttcatggttttctattttattgattaataaatgtttctgagtttgataccgttcaggaagcaagtaccgcttgttgaatggaaacgtatatcgatgtattctttgtcgttcgtaatgtagtatttctttcgcaaagcacggaagtacccgctttctttgcagggagagaggctctcttccaccacttccccgtttatggaaatgccgaatgtgctttcccggttctcttgttgcccgttccggtccagttggtaggcaatgcccgcattccggcggaagatatcggtaaagagaagctctatttcatatacaccttggggagcatcgaagcgataaccttctatctcattccggagggtttggaacaaggggccgtctgccgtgttttggatttcggtttgtgcagttccctccttaccgccgatgtatccccaactgcctgcggcataaggctggtcgggtagccaggtcagttggctttcgtccgaggtgaagaagcattggcttcctacattaacggccagttccaaccctttcaggttgtttgcatccaggcatgccggtatgggagtgaagtttattctcagcccgtcttgcactgtctttccttgatagtttccttgtgcgaataggaaaggatttctgttagaaaatggaacttcgaaggtggccgtgtagttctctgttttctgctttcccaatgaaataccgtcgataaacagctctacctcagaaaggttggtgtatatcttgaccggcagatatacgggagcattgccttgctgcacgccggcacggtctgtccagtcgcggctggcaatatgtagcaccggaatgtccttgcgccaagctgcctgatagtagtgatatacatctttcggggtacggtcggcataaaccagccctttattgttgatgcgtggcatggattcgtctcgcagggcagaagagaagtcgataaagttccagtgcgtgccgccgcagatataaggtgtatcttccaataccggcaaatagtgttcgaggtacttctgctggtattcgatgctgaagtcaaaagcacgcggatgcagcgaatgtaatcgcttgtccgaacctgcaccatattcgcttacaatcatcgggtgagtgggatggttttggtgttgttgtgccaggaacttctcaaagcccgtgaggtcacccccataccatccctggtataagttccagcctacaatatcggtgattttgcttaatccggtttcgttgtagctgttgctgccgtggaatgccatggtgcttatgcgggtgctatcttcttctttcagtacccgttccagcctgttggccagtgccagtgtgcgttccagtaccggcttcagttccgcttcggttttgtacttccgttgggttacgagcaatatttcgttcatatatccccaggtgatgatagaagggtggttgtagtgctggcgaatcatttcccgcaagtttcgttcgcagttatctccataacccggcgtattgggcacaatgtctataatgggaatctcttcccatgccagcatacccagcttgtcgcacatctccagcagggcatcgtcttgcggatagtgggagatgcggataaaattggctcccatctctttcatcagcaggaagtctctccggtgcatctcgtctgtcagcgcgggacctatgggcttctggtcttgatggcgacagataccgcgcagtttatagggctttccgttgaggaagaaaccctcatctccgtcgaaccggaaccagcggaaagcggtgtaatgattgctttggtccagcaaggttttggtcttacggttgcgcagggttgtttctacgcggtagaggcggggcgtttcaggagtccacaattcaggtttcaacaccggggttgcctcgttgctgaaagcgtaggtttctccggcttttagctgtatattcttcttgagtgtttgtagcagggtgccgtcaggacggtagatagtgtgcgtcagttccagtgttgctttttccttcgcatcgttctttacttcaccgcggatggaaatgatgcctcgttcttcagacacttgcggcgtgctgataaacagcccgtccgagctgtggttcgtcaggttgaagtgttggttgggaaccgccgtaagccaaacatcccggtagatacctccaaagaaagtgaagtctccggagatgggagcaatatcctggcgggcattatccacgcatatggccagcgtgttgggtgtgtcgaaagagaggaacggcgtgatgttgaatgagcaggcggtatatcctccggcatgctcacctacgtttttgccattgatatagatggtggctgctttgctggcagcatccagtctcaggataatctgtttctctttccagccctgaggcaaggtcagttgtcggcgataccaaccggtgccgcggtagtaatccttttcggtataagcatcggtattccaggtatggggcagatggatggatgtccatttgctgtcgtcaaaggcgctgtcggctgctgcggtgcattctcctttgaggaacttccagctgtcgttgatggtttgggtttggcgttgggcgtggacagggggcaggacaaataaggatataataacggcagccatccaatggcaggccttttgcaggagtgtatttttctctctttccatggtgatatgttataaatgatattactgccaaaactactaaaaaagaggcggatgtaaaaaaaacaagtagttatccgcctctttaacttaaacctgaatcgcaaccttagttacaaacttaaaaatctaacctatgaaaatatcactttgtcatgattgataatcctaatctcttattatgataatcctattgttaaagctctatttgatagagcgaagaaagagctgtgatatagagcttgtttcctgatatcagtagagacgtgggacgttccggcacctctaacgtacctatggattcacctgacggggagaatatggaaatgtctccgttggctacatatacgttgcctttagagtccgtaactacgctccggtcgcctccgtcggcaaatatgcgacagttttgcaagaagccttgggcatctacatccgcatggattacgcgttggtgatattcatccaatgtatagactgttttgcccggtactgccttaaccagagatgaacaacggaataaatcttcgtaattcggaatgatggttacaccgtcgggagcaacaaaacattgttccggctttcttccgttgtaatactcgctttgagtgatggttctattacccggataataaatttgttgcggtgcagcaaattgcttcatatccactaacggtaaaacttggaaactttcatccggattatcgggacgtattgcgtaaagcttaggaacataattgaagccccacagccctcccgaacctttccagccgaatagaggacggttgccgttacgggtatcgtcattattatagccgggttgggagatgtatttggtaacgacaatcaagttgtcttgtgtatcgcatgccagtgctactgcgttccaggggaaatcggcaatagaagttacctgcccgcttcgggcatccaatttatagatgcggcgcatgcgatgctcgcagaaatatatatttccccggctgtcttgtgccagtccgtcaatgaactcaaatccggtgactacaagttcggcttttcctttttcctggctcaatgggtatttacggttttccttgccggtcaatgaaaggcgtgccagttcccaacggcgtgcttcccggtgggtattgacatcgtaaaggctggcattggaagtgaactttacgcgggcatgtgcatagttgtgaacattcagaaactcaatatccttgcaattccaggtgcgtatagccgacggataggatttcaacatgcgcgatacgcgataggaatagaaattggcaaaagtcaggttcttgcagtctatcaggtccaaaggttgcgtatcgatgccttctgcttccacttcaaactggaagtcgtagattttccagttggcaacattgcggaagatggcttcattgcgtaaatgatgctctaaagacattccgtaaatacgtcccggggtatctgtatgactgatgtacagtcctgccgaactatattcgttggctgtccatatatcccggaatgagcctcctcctccgtttgtaatccataggctccaatgctggttgtcccaggcacgggtaatgaggtcgtgagtttccggagtgatggacataggtttctccaaaggattgaccgcactttgtccgttgtggaagaaacgggctttatcgtgcccgctgaatttgacatcatacatataggagccttcgcctgccatccatttgcaattgacagcccggtaattgtaggcatcggcattcaggaagataccgcatacgatgttctttccaccttggggagtagtcaactgtgcttgcggggcaccgaagccgctgaatgcgagattgccgcccaaggttaataagatagtagtgccggggtgcaggcctatcagattcgtgttttgtttcagagtcaacggctcttttacaatgtaccatccttggggaatatagatattggcatacttttctactgcttcctggaaaatgtgtgtgtcatcactgaaaccgtctcctttggcacccaaatcgcggatgtttacccattgctccgtagcgggcagcatcggggtatcgccggcatccaaaggagtaatgtttttaataggttctgtttctacccggcgcactatttgaggagtgtcttccagactgtcggcattaaaaccgaaaatgaaacgggttacccggtatgtttttcctttaccggatacttgtttgtttgtaaagcgttccaaagcaaacataggaacatttttacattggatatttctaaggttgatttgtgttgctgcatttcctgcatctgtcagaataaccccggtgtggtgtacatcttcgaaaatgcaatcttccataaatagcctgtcgggagcattctctttaatttctatggctacgggtacattttttgcccgcatacgaacgatggtcaatcctccttcattagtgaggatggcactcctacgctgtccttcaaaataggagttaagtaacataataggccatccgggagctgacttgtctgtgtcaattccatactctcctccgtaaatggctatattctccaaatggtttccggcatcgacaatacccgcacggccttttcccacatgaatggttacgttggaaatagagcagtgctgtgcaaaatgtgcgcgaatggcagaggcattgggatttccgtcttcaatacgaatatctacgttcatcattgaactgtagaaagtccctgcattggcatcgcctatacggcctcccggacggtagccgccgccgataaaccaaaaaaggtatttcccttttgcagtttcccgggtaacttcttgaaaaccgggtgcttgcttggcaaggacaaaaaccgggcgtttgccgccataaccaatgatacgaacacctgaggggatgtaaatcgtcttgctgagtttatacactccttcggggataaagaggataccgcaaccattttctttctgtttggttcggttcaatgcttcttgcaaagcatcggaaacatccatacgcccgtcagttttcacattaaaattctcgggagtgaaatatatagctgcctcatccaccggtcggtcggtaaagaccgaccggggattttgagcagatattcctactgagaggataatcatgagaagaagagtcaatgtttttattcggttcatgttgtgtaaggggttagattacaaaggataacgtttgatacttactgtcatcttaccgctaccgtcaacgctgttcacgtagatgtatgcagcccatttaccgtcggcagtcttcataaatgcactatcgtcctttttcaggttcagtacatagttcatggctccgcctaaatccagcgtctcgaagtctatatcgtccacgtaaacagccggattgcttcctttcaactgggcatcatgcacattggcacgttgttccatgggggtgctgttggtggcacccgaggggacaataccactgatggcgatgaatttcgggtccgttgcaggagatacgaaagagtgtgcatagtcaaaatcattcagtttggcctggtagttatagatgaaatcaatcttgccggacaagttcagagcgtttacttcctctttggtataagccttcatgtcttcgatagagaagtagcaggcaccttcgttctccaattcgataagacgtttcatgtccatcttggagattttgtaattaggggttttgtaagacactcggtcgcctgtactggaaacggcagtaaaggtaatgctgaatgttttgccttttgcatcttcgggcactacgaagttatagcgtagtgtggcggcaatgaggtctgtctgggtggttccgatggcaatggtcgggttgatgtaatgcgcatcgactttctccatcaggttggctgtagaaatgctaccgtcggtagatgcgtctttaacggtttggataggcacatcttcaccggcaccataatgtacaccgttaacatccattccggtctgtgctgtgaaccaggagtgcagctcaaatcccgtaccggttgctccggtaatggaggcaactgcttcagccttatttattcttccattagtggttcccatggcataggcaaactctattttttctccggctatggcaggagaaaccgtcttctttatcatgtcatttttaatggcagattcatcgtcatcgctacatgcgaagcaagagagagcgatgaagggcagcattgcatatttcaatagtttcataacaatattctgtttcttagaagtttatactgatcgattattctccttgcaaagtgatagtgaccgtataggtcttcttcacttgacgattaccggaaattacagtgtactggcggggttggctgaaatcagtccacactcccatagtcggagttacgatacaatctttggcagtaccacattctggcttcagtttcttgatgttggtaccaaatttagctatccccgtaatggtgttgttttcgtcatcgatggtaacaccgcttatcaatacgtccctatcatccggtcctctcaatatgagggaagagatgtaacattcttcactgtcagtaaccagcaaaccattatcatctaccggataatcattgcatgattgggacaaaagacatactatgacaagagtcaatattttatataggtttttcatacgattctttttgtatttaatgaactttatggtaattgcttatctccacggagtattctgagtcagattcgggttgcggtttctttcgttttctggaatctggtagatataattcttttggaaattgagttcgggtgcattcttgaattcatcacgtatgcgtgtgccatttgtatcatacaaggttaaaccgtcactgtttgcctctccccatatgtcatggatttttctccagcggcgaatatcgaatggacgcataccttcagtggccagttccacaatacgttcttgctcaatggcattgaagaatgcttcggaattggcatacttgtcgggtgttaaagccggcaggttgccacggctgcgaatcttattcagcaaggctacacattcgctggtaggaccggacgtttcgttgacagcttcggcatacatcagatacacatcggccaaacgcatcagatagaaatcctgcggaccatctgtacgctcccaaccggcttcctggcgtatccatttacggaagatataaccggtttgattgctggcatcattattgatgaaaccgttggcctcatttctttcaccgaacatccaggtatattcgtcacccattgtcaggccgtccgttgtaattttcttgtaagactcaccatcccacatgatggtcgatttcatacgccagtcacgattctcatagctggcacggttacgcgctccattagggagtgtagcatctttagacaagataagctcatcacagaaatcaccggtgacagttgattggtaacggtttgccaagcggacagtaggcataatccagcattgtgcattaccggtggtacgggtaccgaagtcgcgcaacaaactttcaccctggccgagagaaggaccgccataagtaatggagaagatgatttccgaacaattttcattataatattggaacagctctctatagttgggtttgtcttcagtgccgggattaccatcaccaaagattgtcaggccataattgttgattactttgctgaagtctgaagcagcggcggcataataggtttgggctacactgctgctcggctcgaagccttccagttcgggccatccgtttttgttccaacaagcatagtacaattctatttttgctttaaagcccagtgcggcaacttgcgtggcacgtccgtacttatcaccatagcttacgggaagcttttcagatgcattctgtaagtcggtgattagttcaggaatgatggtagcaataggggtgcgtaccaatgagcatgcttcatcattgccgctgagtacgtggcgatagtaaggaacatcaccccagttttgaaccaaacggaaataggccaatgcacgcaggaagtaattctcggcattgatagcctccaaagatgctttggttacggcattctgttctgcttgaatcatttgctctacatactgaatggtgtagttggcacggttgataacccggtatgcattgttccacatactggaaaatccgctgcccggcgttccgggtccccatgaagaaatatcaccgatactcttaccgcgagtattttggaattcgccatgcccgtcgtagtagtaatcagttgcaaacaaagtccgcactgcgttgtaaacaccgtaggtagaggacaaggcatcatctgtacttgtccaaaagaggtccgaagatacttctgttgtagcaggacggttcagcaggtcatctatacaagaagatgttaaaccgaccagtccggctaatgctatatacttaatatatttcatattctttcttatttgttgagttatcagaattctatattcaaaccgattgagtaggttttaaccaatgggtataggtcgtttccatgaggcttttcagggtcgatacctttccagggagttaaagtgaagaggttctcaccggataagtagatacgtgcacggttgaaaccgattctctgcatataacgttcgggaacggtataaccaacctgtaagttcttcaaacggaaatagttggtattataagcccagtatgtactttcttcacggttcttgttaccgccgctaccattcagcagacggggtagggaggcaccacgattgtctaacgaccaagaatcactccaatggaattgttggaatgcataacggttatccggtatcttggtattgttcaaatcatccaaccatacatcagaacgtccgtagttaccctggaacaaagcctggatatcaaaaccctggtaggctccggtcaaagtaataccgaattgtcccatcggggtatcgcggtatttgtcggtgtatgctttcttatcaaggtcactgattttaccgtcaccattcaagtctttgaggataatgtcacccggtgcgttgtaggcatctccttgatagggtgcattgtagagttgattccagctttgcaccaaacccggataagcttcatatatatagaggaagtggtaaggcatgtcgagcataatccacccacggttcagatagtcaccccatttctccagcttatttacgttataagaagcgtttacattgacgctgtattcgaatttgcgaatactggactgccagttcagattcacttcaataccgcggttacgcaggtcggccacattgatattcggtgccgaataaccggttaataacgaagatatgctggaaccacgaatcataccggtggtgaaacggtcgtaccagtcgagttccgcagtcagtcggttgttgaagaatcctaagtccaaacctatattgatgacacgggtttcttcccaagaaaggtcttggttaatcatcttattggcactgaatccggttgcaagaccgttgtttccaacaatataattggtagttcccattgtttctttttgttcgtaacgtcctactccggagttattacccagagaaccgtaagaagcacggaacttggcattactgattgctttcttcaacggggcgaagaaggcttcttccgaaacacgccaacctacagcagctgatgggaagaaaccccattgatgtcctttggcaaagcgggaagaaccgtcggaacggaagttgaattcaaacaagtatttatcaaataatgtatagttgacgcggcctatgaaagaacgcaaaccttcggattcggatttaccgtcgttggtctgtacttccttggaagctgcatccagttcttcaaggctgttgtgcaaacggttcttacgtcctgcacccatgttgcgttggaaccagtattcttcggctgcattgaacatggcggaaatatgatgccctttgaagatttccttttcataagtgatacgtccttggaacaaagtcttatgaccttcgttattggaattgctgatgatatcacctgtatccggcatggtgcgggctatactgttggtctggaagttcatctggttcaccacattctggatgcttttgctgaactggttataatagcgcaaagcgtaactgacgttcaacttcaaatccttaagcggttcccattccaagtaagcgtttccattaaattctttgcgggaagtatttgtgcgataagcttcgtattcggcaacagcattaccggcagaagcagattctccataagccatggcaccgccgtattcacctgtttcaggatgcttgttcaaaataccggagatgacatattttaaacctgcagtttccaaacctgcgccgcgaggtgtctggcgctctgaccagctaccatctgttctgatacctatttttacgttatcacgaaccttataatccacgttcaaacgcatgttataacggctgtagtcattgtggatttgcagaccttcctggtccatgatgccgagtgaagtatagaaatttatcttatcgttgccgccggaggctgaaaccgtatggttcatgatggcaccggtacggaacatttcgtcatattggtcggtgttcggaaaaagaataggatctaccaagcccatggccatccattgctctaccgtaccctgctggaaactggtcgatttgttacctgtggcagcagagcgcatctgcatggtcagtgcacggctatagtcggctaaatagtcgtaaaactctacggggcttgataaggcataagaaccattataagtcactttggatttggcttctttagaaccgcctttggtggtaatcaagataacaccgttggctgcacgcgaaccgtaaacggctgacgaagctgcatcttttaagactgagatgctttcaatatcgttcatattaatacgattgatatctacatccggcatcccgtccactacaatcaatgggtcagaattgttgatggaacccaaaccgcgtactttcagcgaagcaccgtctccacctgcaaaaccggttgtttggctcactaccaatcccggcaccaaacccgagagactggaagatacgtttgtgatggaacggctggcaatcttttcatcgacttttactgctgcaacagaaccggtcaggtttactttcttctgagttccataacccactacaacgacctcatccagtgtttgagagtcttccgagagggttactactacattggttctacctttcaagggtacttcttgagtaatgtatccgatgaaagatactacaagagttgcattagatgaggcttcaatgttaaaatgtccgtcgatgtctgtgattgtgccgccggtgctgtcttttacttttatattagcaccgataaccgcctctcctgtgttatcttttactgtaccggtaattctggcattttgtgccgtgacacttccgataccaataaagagtaataggaataccaaaaaatgtttcatattagacttaattttgaatgaataaattaaaggttaattttcatgtgaagatgataaccttcatcttctttctctctacagaaaacagttgagctgcttcctataaagaaagtgtattctcataggtgttacttcataggcgtcctttcttttttaaagttattaatgaggtcttgttgtgagctatttatatgcttcggttaattctttataccatttttgcaaaacaaagaatgctttctttttctgtcctttgtcagaaaccagtcctttacggttgaagtcgtcttgaatctcgggtacatggcggcgcggtgagcggaaatctttcaatatccacggagtagtgccggcaagtcccggaatacgtttcaacatgttcacgtggcggatatacaaatcttcctgatactcctccgtgaagcgttctttgggtgagccgtggtgcccgtacaaagcaccgcctccgagttcactgatgaataccggtttctgagtatcgaatgtccagttcacgcggtcacatttctcagagtcgccatcgtaccagcccacatactcgttgaagctgatgatatccaatagctctcccaacgggtcgtttaccgtcagaacacccggctgtacttcttccttctccatagctgcgccaattaggcggacgctatcgaggcttcttgctttgtttgccagattagagaggaacgtgagacgcgtcttgctgtgcggagtttcgttggcaatagaccagatgatgatgttacaacggttcttgtcgcgggcaatcatgtcgcacaattgttgctccgcattttggtaagtatccttgttctcccagtgaatcgtccaatacacgggaatttcggaccatacaaggaagcccatacgttcggcctcgcgcaccatctcttcattatggggataatgggccaggcgaacaaagttgcatcccagttcctttgcccaactcagcaatgtgtgggcatggtcttttgagtaagcacgaccactgtaatagggagtttcttcgtggatgctgatacccctgcagaagatttccttgtcattcagcaatatcttgatgccctccgtgcgaatcgtgcggaaacctatctcatcagaaaccttatccgtttcggaagccaggttcacggcatataatttcggattctccggagtccagagtataggtttgctttttattaggaatgaagcatacccgttggcatcggtcgtgacttctttctttactttcagttcgggaatatccagtgttatcttctgttccttgtcagaaccttccagttgcacccagccctcaatcatgttcttgtcatcctttgccaactgtacgtaatagtcgcgtatataggttgcaggcatttctatcagagtgacgggacgggttattccaccgaagttccaccaatctgcattgaccgtgggcacagcttcgggcaggcgtttgttgtccaccttgaccacgaggctgttcgtgccttctttcaggaggttggtaatttcaaagttgaaaggagtaaacccgccgatgtgccttcccagacgtttgccgttcagccacacgatagcctcgtaattaacagctccgaagtttaggaaaaggcgcttgcccggctgcaaggagtattcaaaatgtttgcggtaccatacggttccttcataataatacaattgcggacgctgtgtgttccagtctccgggaacaaacagcagtttatccgtttcaaagtcgtattcctgcaacttggtcttgtcggaataagtcttgtcctgggcataacctccgtcatagggtttcagacggtaatcgtagtagccgttttcaaaaggatctacaattgttttccactgcccgtcgagggatgtcgtctggcgtgcgctgacattcattatctgaggtgcttgctgggcgaaagccaataccggcatcagcatcaaaagaaaagtcagactgttcttcaagagtgttttcatactactatattttgatttaaaattaagaagaacgatttccatgcattcttctgtagagtaatgacaaatatacaggtatgaggcattcgtattccgaaatcggctacatcataattacatcaaatgccggttttgactacatcattactttctcacgaatgttgtaaggtgttggttataagtacgttttctttcaagtatgcttcttctgaataaatctgttaaagatgatgtggtggaatactactttagagtaaaggagttatctttgcttcataaacgcaaatgttgaccgctatgaaaagcaagtcctattttatacttacccttttgttattgctgtcggtgcagttgaatgcaggatggcaacgcccggtaacgaactatacccgccatacttataaggcaggtaatcaaaactggatgttacagcaacacgataacggttggatgtatgtggccaatagtaacggtttactcgaatttgacggtgcaagctggaatctttaccctatacgtaatgcaaaggcgcgggccatgagaatagggaatgacggacggatttatatcggtggaatcgggtggttcggttatttcactccaaacaggctgggcggattggactatacatgcctttcggataatttgcccccgaattcaatagttggcgtgatatggaacatattgcaggataaagagagaatctatttccaatcagaccgtagtttgttctactgggaaaataataagttggaatacttggagtatccgggtgagatttatacgtcggccattttatataataagttctatatcggtgcggccgagggagttctggtgatggatggaaagaagttcagtttggtgccgggttcggagatgctgggcagggtatcgggactattaccctatagtggcaagattctgatagccacccgttacaacggcctttttatctatgatggcgagacggtgcagaagttcaatagtgttgcagatagctttatgcagcacaatcgtgtgttttgtgctgctcttaaccagtctttgctggcacttggctctgtgcaggatggggtttgtttgcttgatttggaaaaggatgaaatgaatgtgatttccattaatagtggattgcagaacaaaacagtgctcagtatgtctttcgatgcgctgaacaacctttggttggggctggataatggcattgactgtgtacatttgagttcgcccgtttcttctctatatggtaataaaccggtcattgggtccggatattcttctatcgtttatcagggtaagttgtatctggcttccaatcaaggcctttatacaacactaccatccactgaactgaacaaagagataccgatgacttttgttcccggaaccggtggacagatgtggtctttcctaaactatgacggtaagctgttctgtgcttcggacaacggtgtctttgtgatagacggcgataagatggagcatttggatggtataaaaggtgtcaggagccttgtccctttgaacggtcgcccggatgtgctgattgcgggtacttatggtaaatatagtgggttgcatttactgaaaaaagtggccgggcgttggcagcctgctttccggcttaagaatttcacttatgctgcaaaaagcctaatggctgaaagttcgggtaatgcgttatgggtgacaaataaggacagaggtgtctgccgcttgattctgtcggatgatttgcaggaagtggtaagtttgaaaaagtataaccatagcgctttcccttccggttatgatatatttctgacgcaggtaaacagtgaaacagttgcagtgtcacattacgggttgtggcgctacaatcaagccacggatagtctggaagaatatcatgagttggaaaatatgttggacgggaaagccgcttacagttatctcaccatggatatggcccataatatatggtacgtttcaggtgaagctctcaagttgttgcgctacgatgctgtgaagaatacctattcaaaattgcctcatgacacattcttgaagggctctttgatagagaactatgagcatgtaaatgtatatgacgggcaagctgtggtgggaacggaagaaggtttttccctggtacgcttttcatcgacggctgtgggtaaggaaaagctatctctacagatacgccgtgtatatctcacaggacgacgcgactcattgatttacgggcgtagctatcattacacagattctcttgtcactattccctataaacacaactccctccgcatagagtataatgtgaacagtaacgatgcatcccaatcggctcttttttcctatcgcttgagcgaggggagcgaaaggggagaatggaacgagtacagtgagaatactattaaagaatttacgggtctgcatgaaggtaagtatgtgtttagcgtaaaattgatgaccgataaagaccaggagttggtaatgacttcgttctcatttgaaatcttgcccccttggtatcgcacctggtggagctacttgatatatgcagtcgctgtgggtttactactatattatatagcctatcgcatagctgtcagccggaagcatctgttgatgcaaaaagagctggagctctacaggcagaaacaagaattcaagaaagagagtgaattgaaagaccagaagattgactcactgaaagaggagaacttgcaggcagagttaagccataaatcagaagaactaatccgtactaccttgaatattgtgcgcaagaatgagatgctgatgggtatcaagaaagaagtattaggcatttcccattccatcagtgaagaaaacttggtttccctccggcgtaaaacacttcggttactgggacagattgaaacgaatattgagcacgatgacgacttgcaggctttccaaagcacctttgactctgtgtaccacgacttcttcagaaaactcgaagaggcatatcccgaattgaacaacaaggataaactgctctgtgcatatatcaagatgaacctgctctccaaagagatagctcccttgctgaacatctctctgcgcggagtggaaatcagccgttatcgccttcggaaaaagctgggcctggaagaaggggagaacctggcggagttcttgcagaggttcaataagtgatgcgaagcaggggttgaatactccccgaatcccctaaaggggaggtggatacttcgtacctctgtgttcaatcccgctacgaaatgagcacaatgatattttgatttgttgtaatttatcaaggttttgactgtgctttttgtaacttcttgattatcaatattattctggtgtgctgcattcactatacgactgaattaggttcagtatgctactgtttcttgaatctgtgttgtttgtaaataatgcagattgctattcggctcttttcccggttcataacggggcagaaatgaagtaaatgatataccgcaaggcgcttgttgccttgtcaacttgtcccctcgtgatactaacatttatctcaaacccgtttagaaatgaactaattcaacccctaattcccataagtaacctacaacatcaacaaactctccggccccatattgaacagcaaatctacaatgctcaggttaggcagaaagccgtgcttctcctgaaagacctggtaatagggtttgggagagaactccgggtcttccagtcggaagtctttcttcggatggatgcgttcgcggaaatccgcttcattcggagtgaattcagtccggtattcggtggtgcgtgccatatcgggctgtatgtctatcagagaacagataagatggcaaagtttttcgttgaaatcgactaaaaactcatacttcttttcatagaaagggcggaagtcgtctttataatattcaaagaaaggagtgtggttgtaggcagattcaagcgcattccagtgcagatgctgccagttaccgtggtcggagatacggatatcgcgcatcgggcattttaggctatccggctttacggtagggatggaaagtgccaactcgccgtccggtgcggcaatggtgcagcggttgcggtaagtctgcttcatatagtggtcatgctgttcgatgaatactttatcgtatgccagcaatttggtataatattctatgggagccaaataggcggaagaaagaaaaactgttttcatcagtatatttacgattagatgatttgcgatttacgattgaagctactgttcattgtttgtattttcatttttattctttcatttgtttgtcattccactcttttccatatcctgccccatcggtaaccgctgaaaggtcctgttcccttttctttggaggaccagatgatagatgccttgcctatgatgtggtcttcggggacgaaaccgaaaaggcgagagtccgaaagattgatggcattgttggcacctacccagtagtagtctttggtaaaatggcagtgctgcacgggcttgccttccacataaagggtgtcgttcttgatttcggcctgtttcttttcgtgaagtaccagggtatttcgcaacaaagtcttgttccacggatatacgcgtatggctttgcctttgctggggattatcagaggtttcagcatctccatggagtcttccttgacaatcggttctatccagcaattcccgttcatggcttgttccagcaagtagtgttcataacggctgaaactgcgtatattctttattgagtcctgccccaatagtttgttgggagcgatggaaaggatggaaagcaatgaatccaactgtcgttcccgttgcctggggtaagaataaaggaacttctggtcgggtgcattcttttcggaaggaatcactgaaaaaagcgaatctatcagcaaggtatctccgggagtaccgatgcaacggctgataaagacttcccgtcggtcaatcacgggttctgaaagattggcaggattgttgaatacaagaatatcctctttttgcaccggactgtccgcccagcgatgatatccccataacttcataaaaggaagccgtagaccgtagctccacttgtttacaagaatacattcaccccggtacagtgagttctccataccggaagaagggataagataggaagttgtcacacaaccccggagcagcactacgacgagtactactccaaccattgcaattgccatcttccatcctttcatcctgtcgttcgaaattaaagaattaaagagtaaaagaaggaaaggcttgaggtcgtttccccacctccctctttaattctttaactcttaattcttaattctttaattcttaattctttaactcttaattcttaattctttaactctttaattcatttaatgccgtccacccacttgaatatccggttccagcgtatcttgccgtcaaaccagttgcggtctttgtccagtgacagccatactacaatcggttttcctacgacatggtcttccggcacaaagccccagtaacgggagtcggcggacttgtcgcggttgtcgcccatcatccagtagtagtccatattgaaggtataggagtcggtcttttcaccgttgatgtagatgccgtcttccttgacttccagtttgttgccctcataggcgacgatgcagcgttcgtagatgggcaggttgtcctcggtcagcttgatggtggcgcctttggcaggaatccatatcggaccgtagttgttgcggtcccatttggtgtaaaggttcagcggatacatctgtcccgagaactctcccggctcgatgataatcttgctgatgagtttcttgttgcccgtaagggtctcgtacatctttttggtgagcggaagatgatagaccggtgccagcctgccctgggcatcccggcggtccagtcccatttcaatcagattctcttcccagcccagaccgtcggtcatcagtgtctggtcctctttgctgatgcccagttcacggaacatatcatcggtgatataaggtcccgttgtctgtacaaagtagttgaattgcatttctgtagggttctcaatggctttgccgtcgatgtatacttgtcctttcttgatttgcaacgtatcgccgggcaggcctacgcaacgttttacatagttttcacgacggtcaacggggcgtatgacaatgtcaccgtacattctaggattggaacggatgaggttacgtccggcattgtagtacaaatcatagacggtacgttgctgcttgcgtgtcaggctgtccatattcaccttgttgggatacgcgcgttttccttcttcgtaagcaagggtatagaagtctgtctgctggaagttggtggctaccgtgtcgcctgccgggaagttgaacaccacaatatcgttcagtttcactttgccgaagcccggcacacgtttgtattcccattgaggccattcgatgtacgacttggtgttgaataccggtagtgtatgttgtgccagcggcatggaaagcggcgtattcggtacgcgcgggccatagctcatcttgctgacataaaggaaatcgcctaccaacaaggatttctccagtgaggaagacggtatctggtaattctggaacacatagatatttacgaagtagacggctaccagcgcaaatacgatggcatccacccaactcatgatgctgcgtacggcaggattctccgatttcttccagaacccccagggtatcttcttactgatgtagatgtcaaaaatgaagggtagtacaatcagtcccagccagctttttacccaaaccagaaaggcaaggtagagcagggtgactatactgaatttaatccattgggtgcgtgttgcttttctcatgatgttttagtcttttaaaaatggaaacaagtcactcattcccaaagcaccttcgtgcttggcggtatattcggcagcaaggacagctcccaaggcaaatcccctgcgattcttggcatcgtgggtgatagtgatgctgtcggcttcggagtcgtagcggatgctgtggatgcccggtacttctccttcgcggatagaacttatgggtagctcattggctgcacattccgtagagcccgaaacggttccgtcgggagcctggaaagttccttctatccatttgtccttacggtcgagattctccagaataccttcggcaagcgtgatggccgttccgctcggagcgtccatcttgtggatgtggtgcgtttcgctcattgtcacatcataggcagggaattggttcattatctttgcgaggtacttgttgacggcagagaatatgcttactcccagactgaagttggacgaccagaacagtgtcttgccgccttcggtacaaagtctcttcacttcgtctccatgttccgccatccagcccgtactgccggataccagtttgaccccggcgcggaatgccttcatatagttattgtatgcaaccatggggttggtgaactctatggcaacgtcggcgctcttgaaggctgccgattcaaagtcttcctgattgtcgacatcgatgatgcttacaatttcgtgtccgcggccaagggctattttctcgatttccttgcccatttttccgtagccgattaatgcgattttcattgtttctatctgtttttatttagtttatcaacaaactataggtcgcaaagataatctttttcttacatttgtgctcaacattaacgtcttgttaacatggaacaactactgcattatgtttggaagcacaaaatatttcctttgtcattgctccagacaacctccggccggccggtagaagtgatagatcccggtttgccgaacatgaatgcaggccccgatttttttaatgccaaactgaaaatagacggtacgctctgggtgggcaacgtcgaagtgcatacgcaggcatcagactggctgctccataggcacgaccgtgacaaggcgtatgataccgtcatcctgcacgtggtgggcgaatcgaattgtgatgtgtaccgcacgaacggtgagctggttccccagatggtgctcacttgccccgacactgtccgcttgcgctatgaagagcttcggcagacagagatttatcctccctgctattccatccttgcctccctcccaaagctgaccgtccattcctggctgtccgctttgcaggtagagcgttttgagcagaaagcatgcgtcatatcccagcggctcgaacgctgcaatcatcattgggaagatgttttcttcattactcttgctcgtaacttcggcttcgggctgaatggggatgctttcgaggcatgggcaaaccgccttccattccgcgccgtagacaagcatcgggacagtctgtttcaagtggaggctttcttcctggggcaggcaggcctgctggaggaggtctcggcagaggcagatgattattatttgatacttcagaaagagttccgctacctgcaacacaagttcgagctgccagctcccatgtctgttgagcagtggcggtttctgcgtcttcgtcccgataactttccacatgtacgcctcgcccagcttgcctgtctgtatcacaaggagcagtcgctcttctcgcgtgttatggaggctgaaacgctggaggcggtgaagaagatactggctgccaagacttccgcgtattgggaggagcacttcaatttcagaaaggtttcaccccggagggaaaagcgggtaggggacggtgccttgaatctgattgccatcaatacggtcatcccgtttctttatgcttatggcctgcacaaggccgatgacgttttgtgtgaccgtgccacccgtttccttgaatccttgaaggccgaaaacaatcacgtaacccgactttgggatggtgtcggtttgccggtgtccaccgctgccgattcgcaggctctgcttcaacttcaaaaggaatattgtgacaagaaagactgcttgcgttgccggtttggttacgagtatctgaaacatagatgataataattatcgccccatagccttagcattttattacttttatattatctttgcgcattgaaaaataatccgagtatatgaaggctatccgctttgttttttgtctgtttgcggcactcatgctgacgactctcaatggtctggctgccgaagaggaggatttcaagacatttctccagaaattcacgtccagtgcttcattccagtattcccgaatcaagtttcctttgaagtctcccatcgccctcttgaaggatgacggtgagacggaacagacttttcccttcacccgcgagaagtgggcattgctagacgaagaaacgctgaaggaaggacgtactaccgaagaggagggaggtacctatatttctcacttcactgtcaatgagcctgcccataaagagttcgaagcaggctatgatgaatcagaaccttcccttcgtgtggtctttgaactgacggatggcaagtggtatgtcaccgactgctataacgactggtacaacttcgatctccctatcaatgaactggaagaaactattcaggcggtacaagaggaaaacaaggctttcgaagaacttcatccttgatgaagtgggggcagaaatccgcctcaatcattattttatccttcttctgtacgatttatgcccctctttttccaaaaagaggggtttctttgtaccgtactaatacattgaaatatgcggttacaacttcttttgatgcaacttctcttatgtgtcctccccggtatggagatgggcgcttcctgccggcttaccgcctgggtcgtggaggattcttccggaaaagtggaaattacatgtatcggcgatacgatggatattgtatctccggacgggctgtccctttggtataaggaacggttgacgggaaactatgagattacctaccgggtacaagtggtggttgagaatggtagctacgaccgtctcagcgacttgaattgtttttggggggccgatgacccccggcatccggatgacttctttgcccgcagtgcatggcgcaacggcgagttcaagaattacaatacgctggacctttactatgtgggctacggcggtaatgataatggaactacgcgtttccgtgaataccatggagagtattatggagtggacgatgcaaagattaaacccatcttgaaagagtataccgatgccgcccaccttttgaagcccaaccattggtatgaagttaaaatccgtgtggagaatggagccaccacttatgccatggatggtgaagagcttttcagcttaccggttgccgatggcaaaggagacggctatttcgccttacggttgtggcagaaccacgtacgttttgcagatttccaagtagcaaatatcgataaccttaaataaacagacatgatgcaattcagtaaatggaaaataggagcggtagcgctcgtttgcatgttgctgccgggcagtgtacatgcacaaatcgtgaagaatgagcgcttgctttcttttgaggagaagcaggttccggcgtttgtcactacggcagctggttcgcagttgggcattagcgacgaacattatagggacggcgaccacagtttgagctggactttcgagccgggtgccgcactgtctatcaaaaaagacttgaaatttgagaagaaagacccgacggggaaagacacctatctttcggctttcatcgtatgggtgtacaatgagcaggcccaggacaagcagattctgtttgagttcctgaaggatggcaaggtatgcacctcttttccttttggcatcaactttaccggttggcgcggagcatgggtatgttatgaacgcgatatgcaaggtaccccggaagaagggatggacgaaatccgaattgtagcccccgacgtgaaggggaaactctttttcgaccatctgattactgccagcaaggtggatgcccgccagcagactgccgacttgcaggtaccgtttgtaaataagggaaccaccaaccactggctggttatctacgaacactccttgtggaaaccggacatccctctggcagacgtgaccgaggcgcagaagcaggatatacggattatggagaaacgtttccgcggcatgctctacacgccttccgcactttcggacaaggagatgcagtccatccgtaagaagtatgatttttatcggattacctacaagagcggcaaggtagcaggacgtcctatctatttcgtacgtcactccgaggcatacgaacgtatggtacccgattgggacaaagatatgttctccagactggggatagagataagcgactatttcaacctgatgaaacgcgtcgccatcgcctacaacaatgcggaggatgcgtcgctgaaacacgagttgaagcagaagttcatcgccatgtacgataacgccaccgaccagggtattgcctacggcagttgctgggggaatatccaccattacggatatagtatgcgcggtctgtttgtggcttatttcttgatgaaggacgtgttgcgtgaggtaggtaagctggaagaggcggtacgtacgctcaactggtatgccatcaccaatgaggtatatcccgaacctgccgtcaacggtattgatatagatacgttcaacaccaagttgcaaggccgcatagccagcattctgattatggaggatacaccggagaaactgcaatacctgcgttccttctcccgttggctggacaaaggctgtcttcctgcgccgggattggccggttctttcaagccggacggtgcctgcttccatcattgcaacaattatcctgcttatgcagtgggcggtctggacggtgccactaatatgatttacttgctgagtggtaccgagttccgcctgtccgagcaggcacacgagacggtgaagaaagtgcttctcaccatgcgtttctattgcaacctgaagcaatggtctctctccatgtccggacgccatcccaacgggggaggaagtctgatacctatccaatatgccacgatggccattgccggtacgccggatggcaagcagaagtatgaccccgaaatggccgctgcctatttgcgcctggttgcctatacagaagctccggacaagaatgcgcccgactatctgccgaaggcttccactcgccacgaattggagatgaagaagttgcttgaagcccaaggcttccgtccggaacccgacccgcaaggcaatctggctttgggttacggttgtgtatccgtacagcgtcgcagcaactgggctgccgtagtacgcggacattcccgttacctctgggctgccgagcactatctccccgccaatttctatggccgttatctggcacatggcagcatgcagattcttaccggaaaaaccgatgaaatggttacttttgccaccagtggctggcaggaggccggtttcgactggaatcgtattccgggtgtcacgagcattcatttgcctttcgaccagctgcgtgcccgggtattgaatgtcgataccttctccggcatggaggagatgctctattccgacgaagcttttgccggcggtttgtcccaagcacatctgaacggtaacttcggtatggtgctgcatgaacatgataagtataacggttctcaccgtgcccgcaagtcgttccatttcttcgacggcaccattgtatgcctcggtacggacatcgaaaacctaaataccgaatatccaacggaaaccaccgtgttccagcttgccgccaccactcccgaaacccgccggtactgggagtcctgtcagagtgacgggcagacttatatagatcccaacggcgtaggttattacatttccaaagcctcccgccctgatgcccgctacgagaagaacttcccgcaagtgaccgtgggcgagcgtagcaccaagcccacttccggcgactgggtgtccttgacattacagcatggcaaagccccgaaaggcgcttcctacgaatatgccgtgctaccccacacggatgccgccgctttggaggcattcgccaagaaacccacttacaagattctccaacaagaccgcaacgcccacattgtgcgttctccggcagacggtcttacttcttacgtcttgtttgagactccgcaagctctgcccgacggcggattgttgcagaaagccgatacatcgtgccttgtcatgatacgcgaatataaggacaagcttctgctgactgtttcccagcccgacttggccttgtatcgtggtccgagtgacgaggctttcgataaagacggaaaacgtattgagcgcagtatctattcacgcccgtggactgacaatgagagtcaggagattcccgtaaccgttactttgaagggacagtggaaggttgccgagacgccctattgcaaggtgttgtcggcagacaagaatcagactgtgctgcgctttacttgccgggatgctgcaagcttagaggtagagctaaagaggtagggagagtataggttagacattgatactgaatacccacaacacccggatgttttaccccataacatccgggtgttgtgctataaaacatggggatgttttggggtaatacatccccatgttttgggtgaatacatccgggtgttgtgggtattcggtataggagtcttagcctttctctcctatagagaaagatactggaaacggttgtttaatatgttccgagcagattgcttactgctgactgatagtttgccagtttgctggtcttatgaatggtctttctcgctttgcggtctccgtccggcaataggtactcccagaaacttttcattttcattaatagctgtgcctcaccgccttgcagtagctcttgataggcgttgaagacctcggtgtgtagttgtcccacttttttcgccatttcatcggaagaaatcggggttccttgcttgtattccagcgccagggcaggattggcgagtagcccgcggccgatgacgatacctgccaatcgggggaaccgtgtggtgatagaacggatatcattcgcggtatgcaggtctccgttgtagaacagagggtgggtgcactctttgtagaaagcttcaaatccctccaggtctacctctcctttgtattgctgcttgcccagacgcgggtgcaggatgatgtgtgcgagggggagttcgttgaacagcggtagcagggcaagacactcctctgcctgctcccagcccagacgcagcttcacggagaaacggatgtcgggatgtcggtcgatggcttcggagagcagcgccttcacttcttcgggatagggcagcatgccgcagccattgtggcgccgggccagcatcggaaaaggacaacccagattgatgtccgcttcctggtatcctttttcgatgaaaagggacattatgtgctccagcttgtccgcatccggagcaatgagctgggggatgaggtgcaggtccgggttgttgtccggctcaatgtcacgggcatctttccgccggatttctccgtgctccatgcgtacgaaaggagagtaataggtctctatgccgccgaatatgcgtgcatgcgcccgccggtagacggcatcggtgtagccttgcagcggggcgaagtggatgggtaatatgttctcgttcatggctgcaaagatacacatttttacttccgatctttgatgggaatcaccatattccaagaacgggatgcattttcgaatcctccgggcccgtccatcgtggcaaagaagatgtaggcaggctttccgtcctcgaagaggatgaaggggcgttccagttgtccttgcttctccacgctgccgtcttcccactccacagtgagcgagtaggctttcgggtctttgtccaccgtccattggatgccgtctttggaatgtgccatgacgcctccgccccgttcgccagtaaacttggctacatggtctttgaagatggcatgataaccgtttgcatctttccagaggaaagggtcttccgcttcgccctgaccgtctacttcaaagatgggacagtcattgttcagcactcgataagggccttctatggtaggagcataagccattccgaggctcatggccgagtgcaggtaaccgttcgtgtaatgtcgccccttgaatatcatcatcaccgaaccgtcttcttgaatgataggcgagggatttgaggtcagaaaactgtagaaagtattgggcttggtcttcaagatgggctcgtccaagcgtttccacggaccgtagggcgagtcggcaacggccagtcccacgcgtttgttggcgcgggcaacggtacaccaggggcttttcagggtgagttgttcgtaagtagggtcggcaaaggggtgggtggaacccatatagataaggtagtatttcccgttctgcctcaaaatgcgtggattgtgtgtggagcgtccgtcccagtattgcgcaccacgggcagggagggccacttcgctgaaccgataaggtccctgcggtatctcggatacggcatgtacaatctccgaggctaccatccatcccggatggaacggcaagcttttgggaaagcgggaaacgaacatatggtacttgccgtcatctcctttcactaccgaacttccccaggcccaatagccttcgcactcgaaagctggtgtacgtggagctttgtccaagtgatgaaacagtgggttttccgacttctgtttcagttctaccagattgtccagcttctgggcagaagacgttatagctatgaaagcggcaaagagaaaaagcagatgatgtcttttcatggggagtgttgttaataaggttattatgatgaaacaaagatagccaatctttttatgcctgttgccgcactcagccagttccgtacgaacactgcatctgttttgtatgattgccgtcatttcttccctctgcctttcattatatttgctgaaaatataatcggacattatacaataaccaatacgattctaatatgcagagaaaccttattctgaccattctcggcctttgcttggccgcaaccgcttttccgcaggagaaggaaacgcagtttgctttcaataattatcaccgttactacaacgaagcccggcagcggggggatgcagagaaggagaagtccatcaaggctttccgcgcttcctttgcgcagcatccttaccgttatcattccctggacacccggttgagtgcgcaggagtgtctggcacaactcactgccgacggtatcttttctggtttaagggagcaggaagagcaattccgcaaagagaatgcctttcagaagccttactccaacccgcaggccgaaataggcttgttcgtggcggatgccttcaaccgtatctggaaagtagcggatgcctatcgtaaaggtgaactgacagaagagcaggccttgtccggtaaagtgctgaaggcaatcttgcattacggcggtatcgaggcaggacgccccaatgacggtccccgtttccatgcatcttgctttgccatacctacggcagcggtcaatacttatttctgctatctgaaacagatggacgatgctgaaggtgggaaaggcggcacattgctgcaagaggcgtgcgatatgttgaaaaccattgccttacaagcttggacccaacctctccgccacgacgaaaccgatgagaatgtagtttccatttcccgtttccgcaaccatgtgtggtgggtgggcggcaatgcattggcctatcgttccctattgcccgtggccgccatgtaccgttccattcctatgatagacttgctggcggaagtttgccagcgcggtatcagtatgacctcccaaactacgtattccgatgctttctggactgagggattcactgccgacggagcaggttggggacatggaaagcaatgcctgatttggggttatcccattgacgggacttccaatgcacttaaaatgctgaatatgctgaaaggctctccctgggccaagaatctgggccgggataatgtgcaggcacttcttaatttcctgcgtggtggtgcctggtattattataagggatatcgccttccttgcctggaccgtggctcgtatgtatataatcccacagagctttccatcccttatgccggaatgctggataaccttatcggcaactggatggactctttcacccccgaagagcagcgggaactgttgcaattgcagcaagaggtgaagaagaatcgcatcatgatggaggagtatgctccgggcatctattccggtacccgttggttcttcaacaacgacgacttgataaagaagacccccgactatcatatcacgattaatatggcctctgtccgttgtgacggactggagagtgccgccagttttgctgatgcctacaatttctatccgacggatggaatgacgttgttccagcgcagcggcgatgagtatttccggattatgggcggttgggatgtcaccgcttccccgggtgtgactgcacgcgaaggcatggacaaactggttcccgtagagaattggcgtggttattgcagcaggagtaattttgctgccggtgctacggatggcgggagtaatgccgttgcaggatatatcttcgaaaagatgaacgcttctgcgaaagagggtgtgaacgacaaggggaacagtgagggcttgaacgaggttctttatggcttcaaggcatataagtcttatttcattctgggagattacatggtagctttgggtgcgggcgtaaccaataagcgtcctgaactggatggggagattcgtaccaccatcgaccagacggcttggacggatgaagttttctcgatgaaaaggggaaaaatggagcttgtcgcttccggcactcactcgcttttgtcggcagatggtactcccctctggctggtgcagaaaggtaagtttgcctatcggatacttcctgagtatacccgtgaagcatttgttacttgcgagactcgtcccacagattgggtgaagcggaacaaggtgaatgaaaagaaacaaggcttgccctcagaagccagaatcctccgtctgtgggcaaatcatggacagcgtccggttgatgatacctatggctatgtggtttatgcaggccggcagataccatcggatgaactgccgttccgggtattgcagaacgataccctggtgcaggcggtctgctctatggatggaaaggtggtggaagccgtcttgtatcccggcaataaaggtttgcaggcagaaggtttgtctctttccgcttctgccccgtgtgcggtgctgataagggaagaagcaggggagattgtggtttctgtcaccgatgcttgcatgaatgcggctctgaaagggattcggattgttctcaatggaagggaaatcaaagtacctatgccgcagaggatgttttgtggaaaaccgggggtaatacgtgtggatagaatgacaaatcaatgatatagattcttttattgattactttctgggcctatatcggtctactcactacttttgtttctacacaaaagtttcaaaatgaataatatctgtcgcgatgtcaggctctaatggtatattgggaatagtgtgatatagttgcttttgacgttcaagaccattccttatttggttggatgtctttggggcagtattcattgtattgataaataaaagggaggaacctcacggcccctccctttcgtacatatcaaattgattaaggtctatttgatttcttgataaataaggttagaagttttgtgttattctgtttctattaataaccggcattattggtccattgtgttaactcaatctgttggtaggggattgggaaataataatggttgtttctttggaaaagtgaaccatcccaagtctcggctcttacttcacttaccttctcgagacggactagttcgaaccaacgcttcatttcggcaaagaattcccatcctcgctcattggacactgcagtggtgaaagcggtggggtcggtagtggtagtcagttggctgtctgcatatccggcacgtttctgtatttcctgaatagcctggatagcttgcgtattcacgctgttggttgcacgagtggaggcttcggcatacatcagcaggacttcggcataacgatagatgcaggtgataccgttggcaagctggctactacccggtgcgccattatcatagttgtaatatttcgagatagcaggtaacttgtcaccgctctctttgtaagtgacatggccacttttagtgttccattccgtcatgtagttccaggctttccgttcatcgtctggatagttcaagtagaaggcttcgttaccgtaataatcggcccaaccggcggggataaaatcggctggataataggacttcccatagttactggctgtttttagctttgcattatggtggatggcaaacatcacttcattggcttgttctttgttggcttctttccacaattcagcatagctctcggtcagatacagtccagagttgtctatgatatttttggctgttgtagctgccaggctataatattcttgtcctttttttaaaggccagcctgccatagtcatgtaggcgtcggcgaggcaggcttcagctgcccatttagagggagtggagctaaaaccgctacggctcttggtcggtaacagttctactgccttttttaaacttggaataatagcttggtcatagatgtcggctacagctgttctcggcatattagtggcagcgtcttcttccgtcagaatcagaggtaaatcaccatacatgcgtaccagataaaaataagacaatccacggaggaagtaggcttcacctaatacttcttcatattgtttggctaaggtagcgtcttcaggaagcaccgctttgttgatgagtttgttggcgttgttgattacagtaaagaataattcccatgtagtcttgtagtctgcattgttggctgtgatattgggggtcagtcggtagtaattagccagttcattgttggcttttgctgcacgatatgtaatgtcatctgcgcatacattgatgcgttgcaagcggcagttgaatccgtagttaccattccataaatcgttgtaaagccctgttgtagcttgttgcaggctggtcaaatccatacgtgcaatatattcttcttctgtaatgaaggattgtggctcttgagtcaggtccacacaagaggttgtgaggaacatactacttgtaattactatatatgctaattttttcatatcgttcttttgtttaataaagttaatcattagaatgcaaagtttaaaccaatgaggtagttacggctgttaggatatgcaccccagtctacaccttgtaccaatggactacccatggtagcttcaggatccagtccagaatagctggtaatgtggaacgggttttgaatagaagcatatacgcgcaggttgctgatgcctaatgctttacaagccaattctggtaatgtgtaacccaaggtaatacttttcatcttgataaaacttccgttctcaacaaatcgcgtggagaagaaatctttgttttcggttcctccattggtaaaacctggtacattcgtattagtatgggtaggtgtccaacggtccaagaagtcacgcattggggttacaccagctacctgttgacttccgatgagaccgaagcctatctgtttggtcgcattatagatgtcgaatccgtggaagcctactacgaagaatgaaaagtcgaagttcttgtaattgaaactattgttccaaccccagttgaatgtcggttgtccgcaaccgataatgccttggtcctcagtgttaatctttccgtctttgttgacatctatatatttagaattacctgcaacaactccatatactttaccgttggtctcaccagtggcgttcccgttggcatcaatgaatggagcgtttacttcatcttcctgccagataccgtcaaaggtatatccccagaatgtccctaatttttcaccttcaatcatttggaataattggttctggtagttaccagcttgctgttggcggtggttgggagttggtatactggcataagtacctttgttgtgtgccaaagtaaggtctgtgtgccagttgaaatctttattggtaaaagggtctgcactaatagtaaattcaacaccagtatttttaatttcaccagaattcataagtaatgacgagtatcccatgtgggtaggttgtgccagttccagtagaatgtctttggatactttgttgtaccaatcggctgttaagcgaacgcgaccattgagaataccaaagtcaataccgacattgacctggtcgttacgttcccattttaggtaaggagcggcgggacggtctactttataggaagtgctgccatcgctgtttcttacgggtgacattttggagtaaatacgataagcttctactgattgattacctacggagccataacctaaacgaagttttagttggtcgatgaaactgttctctttcaagaagttttcttgtttcaaatcccaagccaaagcggcggaagggaagtaacaccatttgtctttcaatcgtgaagagccgtcggcgcgtatggaagccgtaatcatatagcgattcatgaatacataattgacacgtaacatgcctgacatcaatgtattgatgatgcgatctgaaccgatagcggcaagattagcgtcagaccatgccaagttgttaataccaatacggtcgatataatccagattataggcagtacttgtgtggttgtaattattatcgtaggattgttcgaatacagctgttgcattgatacggtgatttttattgaactccttgacataactcagtgtattggtgttcagccaggaagtattccagtaactgcgcgattgtccttgggtcattttgttcttgtagttgtaatagctatcttcgttttctactgaagtgttcagtcggttgtcgaataggacacctaattgtgaacggaatgttagtccatccaatatattgaactgtacgtatccctgaagacgattattaatggtcttgttggagttgtttgattcccaaatgtatcccataggattgtaggttggactgccatcaaagaaggcgttgttatattctccgttctcctttttaggagagattgtgctagggaagtacatggcttgttgaatcaaaccatcgtattgtgtgatacggggagctgtattattgcgatagtgtccataaatattcagtccggctgtcaaccattttttgattttagtatccatcttcaagcgccaactgtagatttgactgtctgattctttaatgatacctttgtcatcttgataacggagtgatgctaagaaagtggttttctcgccaccaccggctatagagagttcatagttctgggtaactgcagtgcggaaaatttctcttgagtaatcgaaacctgctgttccgttcttgaaagcttctagctctgctgcactgtaatagtggttgtcttcataaccaaatttttctttaccgaattcgttcaccaaattggcatattcgtatggagagaggttgtcagcatacttagctactgtcttgatattagcaaaagcattaaaagatacagtcaatttatctttgtcaggatttttagtagtaaccaagaggacaccgtttgcaccgcgagaaccgtaaacagctgttgcagatgcgtctttcaatacttcgatagattgaatatcggaaggattcaacgactgaagggaaccaccgatgaaaccgtcgataacaaccaaaggaccggtttctgctgtgatagagttgataccacgtacacggatggtattgtcttcagtaggattaccggaaccagagagaactgatacaccggccatacgtccctgcaatgcatcggatacattaccggtcggggtattcttcaatgcatctgctgcttttacagaagcaactgcaccggtcaggtcactcttacgttgaacgccgtaacccactacgacaacttcctgcagcaattggctgtcttctgccagttttacgtcgattttggtctttccgcctacggcaatcttttgtgtctgatatccgatataggagaatacgagagttgcgtttgccggaacattgggaagggtgtagtttccgtcaatgtctgtgatacatccgttacttgttccttccacctggatagaagcaccaatcaccggacctaagttgtcagtcactgtacctgttactgtgagattctgtgcattggcctgcgtggcaaataggacagaaagcaacataatacctaatgctttaaagaagctggatttctgtttcataaatattaatttaattagttattaataaaggttgtttctttgttttgtactcacttcagagttgaatcacatcgcaaatgtaggggatggaatatacaaatgcattagttaatagttcgcaaaaagtacgaattcgtacaaaacttgcgaactataccactcttgtacttttattccctttcactttggttctttgcttccttcacctcttccagtagggcagagagcgtttttaccttgtccggatgggcttctgccacattgtctttttcggacggatcaatggaaagattgtacagttggggctgcggggcgttgcccatttctatttttgtccaatactccagtgccggcttgtcgctgggctctatgtatttccagtctccttggataatggagagtgtattgtccagattctgttgtacaatatagtcacatccggcagtatcggttcccaggaagttgttgagctggtcgcggctgtcgggagcgatgcctgcttccagcggatggttcagcagggcggcgaatgaagcgtatacatcaatcatggagaagggggcttgttgtttgccgggtttgatgccattgggccagcgtacaatgaagggaatgcgggtaccggcatcgaaagcgctgtacttcccaccgcggtagtgcttcatgggagtatggccgttcagcagttcgcgtgcctggtcctgatagccgtcgtctatgacgggaccgttgtcactgcagaatacaaaaatggtgttgtcggcaatgccgaggctgtccaaagtgtgcatgatttcacccacggtccagtccagctggaggatgacgtcgccacgtacgcccaaaccactcttgccggcgaaacgcggatgtggcacgcggggaacatgtacatcttgcgtacccatataaaggaagaaaggttcgtctttatgggctgtgatgaagttcttagctttgtctgtaatcacgtcggcaatgtcttcgtctgtccaaagggcagatttgccgccggtcatccagccgatgcgggggatgccgttgatgatggtgttattgtgcccctggctgggtttcatcttgacgagttcggggttttcgagaccggtgggccagtcaccgaccttgtggtcgtagctcacagtgatagggtcgttggggtcgagacccactacatgtccgttctctacaaagacgcagggaacgcggtcgacggtagcggggatgatgtattcatagtcaaagccgatgtcttgggtgttcggtttgatggagtggttgaagtctgtaccgcctttagggcccaggccgaggtgccacttgcccactgctgcagtggcgtagccttcttccttgaacatatcggccatagtgacgcaggcggtatcgatgatgagttcggaattgcccggagcaatgccggtattcttctgtcgccagggatacatgcctgtcagcaggccgaagcgggaaggggtgctggtggaagaagtggcataagcgttggtaaactgcatgccttgtccggcaaggcggtcgatgttgggagtgcttactttggtggcaccgtaacaactcaggtcgccgatgcccaggtcatcagcaatcagatatactacattgggcttctgcggagagtgctccgaagtcttgtctttagattggcttccgcatcccgctatcagggctgcaccgggaagcagagaccacaagggggaaaaatgcttcatagttctttgactttagattgtaattctgaggtcaaaggtaagaggttttgtggaatcgggtgtataaggaagtacaagggaggggagaaaaagtacaaaccgtgtcatgcgatggcttgatgtacaatattaagatgtctcttcactgtcttccgtactttcctctcctccattctctcctttgcggtaggccagcgggctgacgtggtaaatgtccttgaagcatttggagaaatagcgtgaagaactgaaacctatccggtccgaaatttcggtgatattcagttccggattgttgcgcagcatcagggcacccttcttcaggcggatagtcaggataaagtcgttcggagtttgcccggtgatagccttcagcttggtgaacagattggtgcgtgccattgccatttcacgtgcaaagacgttgacgttgaattccgtatcgtccagatgtttctcaatgactgtcatggcgcggtccagaatctccttgtctatgggattggtggcaagcatctgtgcgaaagcctgtggttgcttgctgaacttctcctgcagaagaatacgcgagtttaccagattgttgcagcgcgaaatcagcagattggtgttgaacggtttggtgatgtaatcgtccgcaccgatgcgcagtccctcgatgttctgttcgatggcagtccgtgcagtgagcagcaccacggggatatggcaggtgttgaagtcactttttatctgtttgcacagttccgttcccgacatgttgggcattactacatcgctgactacgatattgggcatttcgctgcgcaccagtgcgagtccttccgctccgtcggccgcagtcagcacttcgtagaagggcttgaagatacctgccagcatgtcgcggatggagtcgttgtcttccactatcaggatttttgcatccgggagtcgtttgatgggagcactctcttccagctccgccttgagcagggcatcgttttccggtttgggaatttctatttgttgcacactgtctgcattcttgtttatttgctcttcgtcaaactgtgcgttccccaattgcaggtttacgatgaagctgctacctttgcccagttcgctttccacacggatggtgccgtgatggagctccacgatacccttcgtcaatgccaggccgatacccgtacccgtcttgcttgcatctgtagagtccatttggtctatctggtagaagcggtcgaatatcttgtccacttcccgggcatctatgccgctgccggtatcggtcacgcggatgacggcattgctgccttcggtcttgatgctgagggtgatgctgtcttccgccttggtatgcttgacggcgttggacagcaggttgtttatcactttctgcatctgtttttggtcataccatacttcgaggctgtctgtttccttctcgaagtagaggctgatttgtttggcgctggcatattccaggaaaagcagatagttttcgtataggaagttcacgatgttgtgcggacttacctttatcttcatgtgcccttgttcctgcttgcggaagtcgagcagctcggtgatgagttcccgtagctgtatgctgttcttgtagatgcccagtaccttgttatatatggcaggcgtgaagttctggagttgcatcagcgtttccacttgggccacgatgagtgtcagcggggtgcggaattcatgggaaatgttggtgaagaaacgtagctttgactggttcagggcctctacgtcacggatgtgcttctgttcgtacttcagtgattcacgcaacttgattctggacttgtaggtacgcaccagataccagagcaggattcccgtcactatcaggtagataagataggcaaggggagtcttgtagtagggaggcaacacgtgtatggtcaggtggacttgcggacaaaggctctcgtcttttccgttgggctttataatcaagttataggttccggcgtttaggttggtataggtgatgttgtgcagtccacgggcactgttccagtcgttggagaagccttccagcttatagatgatgtcgtctttgttggcggctacatagtttgaagtggcgaactctatgctgaacatggactggtcagcgttgagcgtaatctcgggggtgcagtacaaggcttgctgcaggataccggtctcatctcccacttgtatttccgttccgttcacaatgaggcgggagaggatgattttgtagggttttggtgtgaagttcaactccatttcgtggaaagaaatcattccctgcgtgcctcccaggaatatttctccgtcacgggtcacgcaaagggcattctcattgacggcagtcattgggaaaccgttttcggcactgtagttcaggaatgccttttgccggtagtcgaagatggagaagccttcgttggtgatgagcagcagtttgccgctggtaggggattcctgcgtctcgtagatgcagtcgctggaaaggccgttcttcgcttggtcaaagttctcgaagtcgttgctggcagggcggtataagtccagtccgctgcccgaagtggcgaaccacagattgcctttgctgtcttgggtaatgttgtttacattgttgttgctgatgctgtgtgggtcggcagtatcatggcggtagttggtcagtttgccggtatcgaaacggtagctgaacacaccttcgcccgtggctgcaatccagagcgtaccgttactgtcgaaagtgacatctgccaccatcttgatttttttgccttctttgctgtcctggaacagttgttggcatttcccgttggcagggtcgaagaggcagattccgttttgggtggctatcaccaggtggtcttggtaaggcgcgatatcgcggatgatgtcggaaggcaaggtctccggattacctgcttccatgcggtagtgtgtgaatcgccccgagcgtatgtccagtctgttcagtccgcccagatgggttcctatccagatgatgtctttggaggcatcataatagagagccttgatgttgttatgggaaatactgttgggaccgatttccgggcggaaccatttgaactcacgggtacggcggttgtaatagttcagtccgcccccttcggtgccaatccacagattgccgtccttgtcttcgatggtgcggcctacaaccggattgctcagccccttcttttcgatgggcgaatacatatagcggctgtatatctcgtactcggggttgaagtagttgacgccgccaaagtaggtccccagccacagcgttccttggttgtcctttacgatgcaccagatggaagagtgtgtcagtccgtcgctctgggcatcactggcagtgtggttctggaagagtcccgtacttttgtcataccggttcaatccgttgaatgtcccaatccagatgtttcccagattgtcttcacagcaggctcgcacgaagttggaagagatgctgtaagggttctttgcgtcgtattcaaagatttcgatggttccgtcggtctttacatggtgcagcccttcttcccagctgccaatccataactcgccttcgctgtcttggtatatgctggtgatgttgcctttcaggatggggtgggtcagctcgttcttgtccagttgcaggcggtatgctccgttggtggtcgttccaatccacatttgtccattgtccagatgcatacagcagatttccagactttttccgggaagctggtaatagaggtcaaagttcccggtctgctcgttatagcggtagatttcattctgttttccgatgaaaagggcctctttgtaatatatgctgtgtacatttccttgcagcagggtggtgaatctttgggtggcaagattgaactcggctactccttccgtacagagcaggtagatttttccgttacggttgccggccatgcgcagcacggtgttgcagaaaaggctgtaagggtcgttcttctgcagcttgtaagtttgtatgtcttctccgtcataacggttcaagccttctcgggttccaatccataagacaccgttttcatcgatgtaaaggctgttcacggagaattgtgacagaccgtcgtcggttgtcagatggttgaaggtgatgttctgcgcctgcagggttgcagcaatcatgcttactgaaacaagaagcagccggatgataaacgttcgcacttttcgggtagtttttaaggtttcagttacaaatataggtatattttgtacaagacttcttatttattaggcagtttttgcggttatgtttggataaatgtataattttggaagcgcgccgaacgatacttgtcttttgatagatggcaatcggcgtatctttgtaaacaaattaattcatttattatcatgaaagaccttttatctattgtatctcattttcaaatgcagggtacggttcgtgaaatcaagcctttaggctcaggcctgattaacgatacgtacaaagtgaccaccgttgaggccgatgcgccggactatgttctgcaacgtatcaatcatgccattttccagaatgtagagatgttacagtctaatatcgaggctgtgaccgggcatatccgtaagaagctggaagagaaaggagaggccgatgtcgagcgtaaagtgcttcatttcatccccacggccgaagggaaaacctattggtatgacggtgagaactactggcgtatcatgacttttattccccgtgccaagacttacgagacggtgaaccccgaatattcctattatgcgggaactgccttcggtaatttccaggctatgcttgccgacattccagatacattgggcgagacaattcccgatttccacaacatggagttccgcctgaagcaactccgtgacgctgtggctgccgatgctgcgggacgtgtgcaggaggtgcggtattttctggatgagatagaaaaacgcgctgatgaaatgtgtaaggcagaacgtctgtaccgtgaaggcaaactgcccaaacgggtatgccactgtgatacgaaagtaaacaacatgatgttcgacgaagacggtacggtgctttgtgtcatcgacctggatacggtgatgcccagcttcatcttctccgattatggcgatttccttcgctcaggtgccaacacggggttggaagacgacaagaatctggataatgtgaacttcaatatggaaatattccaggcatttaccaagggttatctggaatcgggcaaatccttcttgttgccgatagagattgagaatctgccttatgcggctgccttgttcccatacatgcagtgcgtacgcttcctggcagattatatcaacggtgatacttattataaaatccagtatccggagcacaatcttgtgcgtaccaaggctcagttcaaactgttgcagagcgtggaggagcatacaccggagatgaaaaaattcattgactcatgtatctgaaaaagtttttaatgacgatagcggcagctctttgcatgttgccgctatctgcaattaatccccaaaatagtaaaatgaaagaattgaatgtaaagaaagtaagtgcggccaatataccggtagagtcggttccggctcttctggatgaagagaaggtggcgtttcagcccgtaaacacagtgaattgggctgcttttccttatactcccgatgtggaattccgcatagcgcatacggaagatgccattctgctgcatttcaaggtaagggaagcgagtgtacgcgcagttgcaggccacgataacggtccggtttgggaagatgcgtgtgtagagttcttctctgtgcctgccgatgacggagtgtactacaatatggagtgtaattgtgccgggactctgcttattggggcaggtgccggacgtggaaaccgccagcatgccccgcaagaggtgctcgataaagtacagcgttgggcttctttgggacgtgaggctttcgacgaaagagtaggtgagtgtgcctgggaagtggccctggtcatcccttattccgctttcttcctgcatgacatcacttcgttggatggaaagacgctccgtgccaatttttataaatgcggtgacaagctccagactccccatttcctttcctggaatccgataggtctggagaagccgaacttccattgcccggagttcttcggtaccctgcatttcgagtagtagtagaacaaaaagttactcaacttgccctcaccactatcaccgcttttctgaaactccctattcatcgccctttcaagggtgagtgagagcaaataaaaagggtgagggcaaattctaccctcacccttccgggcgtacccggttgcttcctgctctttccccgtcttttataggacaagacgggccattgtctacagaaacagtataataaatcccctttatatacttaatccgttagttcacaacactgaacagtttgttccagcattagagaacactttgtttcagtatagaaaaacactttgttttcatataatggaacgaactgttttgttaagggaaacaaagtgttttctataaggaaacaaaatgtttagttaaaggaaacagtttgttttacttagcatactgcctggaatgaatatacatcaaaaaatagtaaaagacaatgcaggaactattgtagaggaatatagaaaaaggcacgaactacgcagacttacggaaaagaatttatccatccgtattgtctgcgtgattcgtgcccgaagaagggtgtttacttcacgattcctttggaattcttgatgaagttgatgatattgtgtatctcgtcactcatcggtacttggtcttcaatcttctgcaaggcatcctgcacgctgaagtttccctggtataccagacggtaggcatttacgatatggcgcaatacacgttcggtcacctggtgtttgtgttgaagcacagcagcgttgataccgtggtattctgccggattaccgttcatgatgatatagggcggcacatcttttgatatgcggcagccagcttgaatcagtacccaacttccaatgtggcagtattggtgcagaatgacattgctgctcagaatggtacaatcgtctatctgacattctccggctacggtagtcttgatacccagtacacaatggttgcctatctgcacgtcgtggcagaggtgtacaccatccatcaggtagttttcattgccgatgcgggtagcgcttcctgcatgggtagcacggctgataaccacgttctcgcggatgtcgttattatcaccgataatcagcatactgctctctcccgtatagtggaagtcttgcggttcggcacccagaacggcattgtgatgtaccttgttcccttttcccatgcgggtaccgtgcagaatttttgcacccgacataataatacagtcatcaccgatttccacgttcccttcgataaatgcaaagggctggatggttacattcttgccgatttttgcggcagaatctacataagctaacggacttatcatagtaattagcgattaatgattaatgattagtgataaatggttagtgattaggatttactatttcattaatcgctaatcactaatcacttatcgctcattttattctcttcctcctccaagcgcttgatacaggctgataaccgcctgcatgctgctgaaggtgtcggatacttctgcaagctgtgcgctgaggtaagactgctcggcagacaagacttccagataggtcgacgtgcctaagttaaacaattcttttgtatctgaggcagcttggcgggcagaatttacttgaatagtgcgtgaaacagctttgtccttctccatttgatacagatgcagggcgttgctcacttcatttccggcattcagcagggcggtttggaactgaatcttagcctgctcctcttgtgccttggcttgtttcagacgggcaatgttggcaccgcgatagaacaagggttgcgtcagcgaaccgatgacggaagccagcagtttgcccgggttgacgatacctgcaccggagttattggtccagcctcccgaaccgctcaatgtaatctgcgggtagaaagcggcacgggcgctattggtgttatagtagttggcagccagtgacatctcggcagctttcacgtccggacggttggatagcaactgcaaggggatacctactgaaaattccgtaggcagctgttgctcttccagcacaccgcgtgcgatgctctgtgccggttggtgcaacatcaggcagagggcgttttcggtttcgcgtatgctctggcgtatgtcgggcagtgatgccatgacttgagcgtaggcagtgcggctctgctctacggcagcagaagtggttccgtagatgcctgcatctttcatggcttgcacggtctccaggttctttttcagaatctcgacggtgccttcggtgatttgcagttggcggtccagcatcagcagggtgtagtacatgttggctacgccggcgatgacttgcgtctgaacggcttgttcgtagaattgcgtctgcttcaagctaacctttgcttgtcgcttcgggttcagcagttgaccgaagaggtcgacttgccagcttgcggtgacgggcagggagtagatttgtgtagcctttcccttgtcccagctgctgacggttccttgcggagacaaggcaagcgtcggagcataggcaagacgggcagacatcagtgcggcttgtgcttgtttcacgttcaaggcggcactgcgcaggtcaccgttgttggtgagtgcttgctcgataagtgtctgcagctgcgggtctgtgaacacttctctccaaggcagattaccgaagttggccgtatctgcggctaatgtatcgttcacggacgccgtgtcgcgatacagtccggcagttgttatgtcttcgggtctgtcgtatgatttgtagatgtggcaactgctcaataaagcagttgcgcacatcaggcatattattttcttcataatcgctaatcgttaatcactattttgtatattgttcaatctccggttctgcatccgagttgtccacatcttcccattccatcggcttgaatttctcctgcaagtactggaatgccacgaacagtgcgggcactatgaagatttgcagaatcataccgattaacataccgccgatggcagacgtacccagcgtacggttaccgttggcacccgcaccggaagcaaacatcagcgggagcagaccgacaatcattgccaacgacgtcatcaagataggacgcagacgggctgcggcacccaatacggctgcccaggtgatactcatacccattctgcggcgttcgagggcaaactctacaatcaagatggcattcttggccaacagacccatcaacatgatgagggcaatctgcatatagatgtcattggacatcgtacccagaatcattttcagtgccgggatgctgcccaatgcgcctataccgcctacaaagaggaagctacccagcagaccgaacggcacggacagcaatacggataaaggcaggatgtagctttcgtactgggcactcagcaacagataaacgaatacgaagcacaatatgaagatgagtcccgtagtgctgccactcgtttcggcctcttcacgcgccatacctcccaactcataaccgaaaccggcaggcaggttttcctgcgccacttcggcaatggcttgcagagcctgaccggaagtgtagcctgatgcgggagccaccatcaccttcatggaggtgtagaggttgaaacggctgatgacgtcaggaccatatactttcttgatggagatgaactgcgtgataggtgccatctcgttgccgttgcgcaccttgatgctttgcagtgtttccatattcttggtagcatcaggttcggcttgtaccattacgcggtacatcttaccgaagctgttgaagttggaagcatacaaaccaccgtaatatccctgcaaggtagtcaagatgtcattggggctgatgcctgctttcttacaagcggcagcgtcaatgtccagctggtattgcgggaagtgagggttgaaggatgtcttggcggagttgatttccggacgcgcttccagggcagcagtatagttgttcaccacgtcgaagaagtggttcaaatcaccacccgtcttgtcctgcatgttcaactcgatgtcgcttgaagccgagtaacccggaatcataggcggcgcgaagaacaatacctgcgcttccttgataatcttttgggcacgcatgtacaaagtggcgtacacaatcgtggagttctgcatcgtggaacgttcttcccagttcttcagcttgatgatgagtgaaccgtaggaggggccttgaccgcccaagaagctataacctgagataacggtacgtgactgtacggcagggtctgcagcaaccaagctgtccacacggttcaaaatctcttgtgcgcgttcttgtgaagtgcccggaggcagtgtcacagcgcccatgatggtaccggtgtcttcgttgggcaccataccggtcggggttatctgcatgaatacgcccaacagtacaatagagccgataaccagtcctgccgatatccagcgtttctggatgaagaacagcacttgtttcttatacttgcccaagataccgttgtatgagtcattgaaggattgtttgaacttgtcggtagtcatacctgccaacgccagcacactgatgataatcatcaagctacacagaatggggtgttcgctgaagctgaacagaccgaaaatcatgcccaggatagctaccgtcacgaagagcagtgtaatgccgggacgcatcaaccggcctatagagtcggcataacgtgcaatcataatcttgcgggcttccttggcggcaacgcctacacgctctttcagactttcgtgtccgccgttgtgaggtttcaggaagatggcacacagcgcaggactcagggtcagggcgttcagagccgagaaaccgatggcaatcgccatggtcaaaccgaactgacggtagaaagtacctgccgtacctcccatgaagctcacgggaacgaatacggacatcatcaccaacgtaatggagacgatggcaccacccagttcactcatggcgtcgatggaagctgtacgggccgatttgtagccctggtccagcttggcatggacgccctcgacgacgacgatggcatcatcgaccacaatcgcaatggcaagcaccatggccgaaagggtcagcaagttgatactgaagccaatcagtttcaatacgaagaaggtggcaatcaacgccacgggaatggcgatggcgggaatcaacgtggagcgcatatcctgcaggaagatatacactacgatgaacaccaggataaaggcctcgatcaatgtcttgattacctcatgtatggaagcgaagaggaagtcgttggcactctgtgcaatgtttatctttaagccggtgggcagtttgctggaatagtcgtccagtagggcctcgatatccgagatggtctgcgtggcattactgcctgccatctggaaaatgatacaactcacggctttatgtccgtttaccatattgttgaatccgtatgacagacggcccagttccacatttgctacatccttcagacggagtatttcaccgttctccaaggccttgatgacaatgttctcgaactccgtagtctgttgcagacgtcctttgtagcgcagggtatactggtaggtttggttaccgcgctcacccaactggccgggagccgcttcgatgttctgttcgctcaaggcggcaaccacatcgttggggataagtttgtattgggccattacatcaggtttcagccagatacgcatggagtagtcttgtcccaataccatggcatcgcccacaccgttgacacgtttcacctcagggataaggttgatgttggcgtagttttccaggaactcgatgttgtactggtctttttcatcatagatggagaataccatcaacatggaagtctggcgtttacgggtggttacaccgattttggtaacttcggcaggcagcaagccttgcgccatggaaacgcggttctgtacgttcaccgctgccatatcggggtcggtaccttgcttgaagtagatggagatgtcgcccgaaccgctgttggtggcgctcgaactcatatacatcatattttccacaccgttaatctggtcctccagcggagcgataacggagttaagcaccgtttgggcattggcaccttggtaagtcgcacttaccgatacggtgggaggtgcaatgtccgggtattgggtgataggcaaggtagccagaccaataactcctaagattactatcaggatggaaattaccgttgatagtaccggacggttaataaatctatctaatttcatttcatgaacaattaaggaattaaaaattgaagaatttttttatttttcattctttcattgaaacgcagtctgaatattgccttctttctggtcttttagggccttctggtattcggcttccttttcagcaggcgtgatgggcgtgatggactgtccgtccttcaggttctgtaccccttcgataacgattttttcgcctgctttcaaaccttccgtcacgtaataatacttgccgtcgtctaagctgaacactttaacttcggtatttttcagcgtgttgtccggttgcagtacgaatacgaactgcttgtcctggatttcggtagtggcagactgtggaatcatgatgacatcatgcagcgggttggggaataccacattgccggtgcttccactacgcagcacgttgtgcttgttggggaagagggcacgcatggttaccgaaccggtagtctggtcaatgactccgctgattgtctccacgcggccactgtcggcatacatggttccgtcgatgagctgcaactgtacattcggcatcttttccagaatttccttggtgctaccgccttcacgaatctgtgacaagagttggcgttcggtcatggagaagtaggcgtacatttcggagatgtcggcaacggtagtcagcgggctggctacggaaggactaaccaggctacctacgcggtagggaatgctacctactacaccgtcactggggctggttacactggtgtatgacaaattgttcttggcattgaccaattgggcattggcttgtgctagttgtgcctttgtctgtgccagctggttttcggccatttgcaaatcgtagtcactgatgatgtttttcttgttcagttcacgtttgttgtttacagtcagttcttgtgtgtttacggcagctttggctgtttcaacagcagctttggccgaatttacggctgcttgatactgtacggggtcgatgctgaacaacacttgtcctttgcgcactgttgcgccttcatccacgtgcaattttgtgatgaacccactcaccatcgggcggatttctacatcttgtttacccttgatagtagcagggtagctgtttgtcaagttggcagtggtggtctttgcctcaatcactgcaaattcgggagctttacccgttcctttgtcgccttgtccgcaactgctgagcagtgccaggcaacatgccaataatactaatctactcttcatactcttttttgttctctgtataattttatattcttctttttttcgattcttgaaaggcgttttcgtgtgcaattcatgatttagaaataaggcaggaaaaagaaaactgaatactcctattcagttttcgtctgcaaaaatattcttttcttagtatataaggtgtgaaacacttccttttttaactatgtttcatacatagatgagaacgaaaggacattttttgattaaaatactgtaaagcataccgctaattggcagataacctttatttttgcagcatgttagaacgtaaacgccatactaaaatgaagccgcttttccgcaggttgttggggggtgttgccatagctgccgcactgtattcttgtgccagtgtgggccgtattgaaggaggaccttatgatgagactcctccgcgttttatttccggtactcccacgcccggcgcactccatcacaataaaaataaactttccattgagttcgatgaatttatcaagcttgacaagccgaatgagaagattgtaatatcccctccgcaggtgcagcagcccgaaattaagtctaatgggaagaaggtggtcatcactctgcaggatacattgaaacccaatactacttatacattcgattttggtgatgccatccaggataataatgaggggaatcccttggagaatttcttctattctttctctacgggcgaccgtctcgactctatggctgtggccggtacagtactgaatgcggccaatcttgaaccggtgaaaggaatgctggtcggtctgcatgccaatctggccgactccgcttttaccaaacttccttttgagcgggtggggcgtacggatagtcgcggacgcttctctatccgtggagtggctcccggcaagtatcgcatttatgccttgcaggatgccgaccagaattttgcctattcccagccgacggaagtgatagcttttaatgactctatcatcattccttccatggaagagcgcatgcgccaggatacgacctggatagactcgctgacagtagatacgattgtagaacgtcaatatacccactaccttccggatgatgttctgctgcgtgctttcaaggagctttccttctcgcaacgttttttgaaggccgaacggttgactccggagaagttttcgctctatttcactgctccggcagacacgttgcctttattgaaaggattgaactttaatgaggaagatgcgtttgttatagaacagcctaccggccggaacgatacgattcattattggataaaggattctctgctctataagcaggattccctgaaaatgagtatcacctatttgtatacggatagcctgaaacgattggtaccccgtaccgatactttgaatgtgctggcgaagttgacatacgacaagcagcagaaacagaagcaggaagcgaaggaaaaggaacagaaagagcgtgagaagaaaaagaagaagttgaaggaaggtgaggtggaagagcccgagccgacggaattcctggctgtagatgtgtatgccccttctgcaatcgatgtatatgattatcttactctgtcgtttacggagccggtggcaagcatagataccaccgctttccatctgaaactgaaagtggactcgttgtggcaggatatcccgttcgactttatgcgcgactctttggacttgaagcgttataatctgtttgccgaatgggcacccggcgaaagctatacatttgaagtggattctgctgccatacgcgggttgtacgggttgttctccgacaagataaagaaggacttcaaggccaagaagctggaagagtacgggcagatattctttaatgtgcatggagcggactctctggcttttgtggaactactggacggtcaggacaaagtgctgcgcacggtgccggtggtggatgggaaagccgatttctatttcctcaatccgggcaaatatggagcgcggctgataaatgatacgaatgggaatggcgtctgggatacgggaaactatgccgagaagcgccagcctgaaatggtttactattatccgatggttctggagcttaaagcgaactttgatttgacccaggaatgggatattaaggccaagtccctggataggcagaagccggacgaactaaaaaaacaaaaaccagatgaagacaagaaaaagcaaaacaggaacaaaaataaccgcagtggcaatagcagccgcaacagtggtagaggccatagctattaggcggaagcaattgttcattctattaatggtgggagcggtctgtttgggaacctcccagtctgttcaggcccaatgtactgcaaagaatgaagctttccagtcgggcgagcatgtcatgtacgatttatatttcaattggaagttcatttggaagaaggtgggtctggcaagcctcactaccaatgccacgacttaccattccgagcctgcatttcgctttaacttgctttgtgtaggcagtaaaaagaccgattttttcttcaagatgcgtgatacgttgacttgttatgtcagcgataggttggagccgctctacttccgtaaagcggcagaggagggaagccgccatacggtggacgaggcttggttctcctactcggacggactggcgaatgtaaagcagagacgcacctggtacaatcccgtgcgtgaggctcaggagatggaatacagtgatagtcgctgtatcttcgatatgttgagcattttggcgcaggcgcgctcttatgaccctaaagactacaaggtagggcagaagatactctttcccatggccacgggacgcagggtggaagagcagacgttgatttaccgcggcaaggaggaggtcaaggcgaataacgacaccgtttaccgctgcttggtattctctttcgtagagtacaagaaaggtaaggagaaggaggtcatcaccttcttcgtatccgatgataagaaccaccttcccattcgcttggacatgtatttgaatttcggttcggccaaggcattcttcaagagtgtccggggcaaccgctatccgatgacgtctgtggtaaggaaaaagtgatgttatccccttttctaaatacactggattcgaaagtggcaatcagttttccctcctggttggtgacgtcgatctggtaatatccggtggtgcggccgatgtagcgttcgcgtgcttcggcatacagtacatcgcccggtccgctgctgcgcaggaaggtgatattggacgaaagagagaaggccaatgttccgtgggagttggctgctgctgccagtgccaggtcggcaagggtgaagatggcacccccttgcgtacggcctcccgcattgagatgctctgccgtgataaccaggcgtgccttgctgtatccttcctttatttctatcagttctacacctgcattcgtggcgaagcggtcgttcttaaaaaactcttgtgcggtcatggggagtaatgattaatgtttagtgattaatgattaatgggtggaaaatatgtgcttccggacgcaaaagtaacgattttagccattaattgaattatttaggcgggtcaaatctgtacacttgctctacttttgcagcaggaaaaatcataaactcttaataaataaatcccttattatgaaaacagtcctcactacattgggaatctccctccttgtattggcaggttgcgcagggcaaaagcaggctgaaagcaactttatccaagaaaacattgataatgctgtggctcaggagacaattcagacagacattatcgaaaaatccggtaaaatccttaatccccgtaccattgataaggatgggaacattgtctatgtacctatcgacgattggtgttccggcttcttccccggtaatatctggcatatgtacgagttgaccggtgaccagaagtggctgccgctggcagagaagtataccgaggatttggattcggtacaataccttacctggcaccatgatgtgggctttatgattggcagcagctacctgaacggataccgttttgcgggtaaggaggagtacaagccggtcatcatacagacagccaaatcattgtctacccgtttccgccctgcagcaggcgtacttcagtcatgggatgcagacaaggggtggcaggctgaacgtggctggaaatgtcccgttatcattgataatatgatgaacctcgaactgctgttcgaagcttccaagctgtccggcgactccactttctataacatagcccggaagcacgccgatacgactatggctaaccatttccgtgaggacaacagctgctatcatgtggtggattatgaccccgaaaccggtgaagtccgtaagagacagactgcacaaggctatgccgacgagtctgcttgggcacgtggacaagcgtgggccttgtacggctataccatgtgctatcgctatacacacgatgccaaatacctggaacaggctgaaaaggtctacaactttatcttcaacaacaagaatcttccggaagacttggttccctactgggatttcgatgctcccaatatcccgaatgaacctcgcgatgcttcggcagctgcctgcacggcgtccgccctttacgagctgagtacttatctgccggataagggatacaaggaaaccgccgaccggattatggaaagcctcgcttctccttcctaccgtgccaaggtgggtaccaacggcaacttcatcctgatgcactctgtgggcagtattcctcacggtgcggagattgatgtaccgctgaattatgccgactattacttcctggaaggattgatgcgtaaaagagacttggaaaaatgaaaactcaattaaatattttgttaggtggtttaggtttgttcgccttgcagggctgtaaagccccgcaggcggaacaatccgtccagccgaatgtcatttacgtttttcccgaccaataccgtaatcaggcgatggagttctggggccaggaaggttttcgcgagaaagtgaactttcggaatgacccggtgcataccccacgcttgaatgattttgcccgggagtcggtggtattgacatctgccatgagcaactgcccgttgagcagtccccaccgtggttctctgttgacgggaatgtatcctaataagagtggtattccattgaattgcaattcgagccgtcccatcagctccctgcgtgaggatgctgtgtgtgtgagtgatgttttctgcaatgccggatatgactgtgcctactttggcaaactgcatgccgactttcctacccccaacgaccccgaacgtcccggacagtatgtggaagaccgtgtacctgcatgggatgcctatacgccgaaagaacgtcgtcatgggttcaattactggtattcttacggtacctttgacgaacacaagaatccgcattactgggatacggaaggccgtcgccacgacccgcgcgagtggtcaccgttacacgaatcgggcaaggtggtgtcttatctgaagaacgaggggaatgtacgcgacccgaagaaacctttcttcattatggtaggcatgaatcctccccatagtccgtaccgttctttggacgactgtatggaggaagatttcaatctctataaaaaccagcctctggacagcttgctcgtccgtccgaatgccgactccaagatgctcaaggcagagagtgcacgctactactttgcttctgtgacgggtgtcgaccgtgctttcggtcagatacttgatgccttgaaggaactcgggctggacaagaataccattgtcgtgtttgcctccgaccatggagagaccatgtgtagccagcatacggaagacccgaagaattccccgtactccgagtccatgaacgttcctttcttggtgcgttttcccgataagattaagcctcgcgtggacgacttgatgctttcctcgccggacatcatgcctaccttgttggggcttgccggtcttgccgactccattccggccgaggtgcaggggcgcaactatgcaccgcttttcttcgatgaaaaggcggatattgtacgtcccaccggcgctctctacatccagaacctggacggtgagaaggatgcggaaggcatggtccgttcctacttcccttcgtcgcgcggctttaaatcggcgcgctacacgctggcgctctacattgaccgcgaaaaccataagctggtcaaaagtttgttgtttgacgatgaaaaggacccgtatcagatgaataacctttctttggaagaaaaccaagaagtcgtaaaagacctttgcgcagagatgggcaaagtgttgaaagagattgatgatccttggtataaggaaggtatcttgaaggatatgataccttattgattggaaatgggttatagataatcctccataaattgcttgaacgttttttgcgacccgcttcgactgatagtgaactatttgtcggagcgggttgtttgattcagagtggaataaattaccaatacgtattaagtaaatgatggagatgaagtatagactatgggcttgtttgttgtttttgccgatggtcctttgggcgtccgggcgtccgaaagtggctgtcgtactcagtgggggtggcgccaaagggacggcgcatatcggtgctctgaaagtaattgaagaagcgggtatccctatagattatgtggtgggcactagtatgggggccattgtgggcggtttgtattctatcggatataccccacagcaattggacagtatggtgaatgcccagaactggaaattcttgctctcggatgcccccaatcctaaggatgtgttgctggatgaccggttgaagtcggagcgctatgtactctccattccgttttctttgaaatctgccgctgtttcggatgcgggtatcataaaagggaagaacctggcacgtttgttctccacattgacagaaggttaccaggattctgtggattttagccgtctgcctattccgtttgcctgcgtgtcggaaaatctggtgaatggcagcgaagtagtgttccatgagggaatactggctactgccatgcgttccagcatgtccattcccggtgtgtttgctccggtagacctggatggaatggtgttggtggacggtggaatggtgaataactatccggtagatgtggcgcttgccatgggggccgactacattatcggggtggatgtgcagagtccgctgcttaaggcttccgagctgaaatcggtgaaagacatcttcgggcaaatcatcaatctgcaaggagagaagaaataccgtgagaatctgcgtaataccgacgtattgataaaggtggatgtcaccggctattcggctgcaagtttcaccaaagaggccatcgacactttgatggtgcggggagagcgtgctgccatggacagttgggacggactgcttgccctgaaacggaagctgggacttgcagaagattatcagcctcgccgtccgggacctttccgcttgcctggcgcggctgttgatagggagattcccgttgattcccaaatagccgtccctgctgtacgggagaacaagttgaatgtcggttttcgttttgatacggaagaactggcggcgttgcaggcaaatacggacttctatttcggccggcagcgggagtcgctggtcagcctcaccgcccgtctgggcaagcgtacactggcacgacttggatatggttatcaatgggacggtggatggcaggcaggacttgcctatcagttcgactataaagatatgaatatttataatgaaggcaaacgggcgctggatttgacttttacacatcagctggtccgtatgggggcggcgaaggactggaacaatatccaggtcagtctgggcattgactttgattactaccactatcatgatttgctgtcgctcgacccgttagcttcggcactgtttgaaaattcgtccttattcagttactttgccggacttgtgttcaacaacttgaatgagaggagcgcccctacaaaaggtatgtcgtgggcggtatcctatcatctctatacggataacttcttccagtataaggacaacaatcctatttctgttttcgatgcccgttggcagggatgtttctctccctcgagtaagttcactgtcactccttcgttttatggacgcgtattgtccggaagcggtaattatccttttgccatcattaatatggtggggggaaccataccggggcgctatatgccacagcagataccgtttacgggcatcaaccgtgcggaactgtcacaagccgcattgctggttgcagggctgaacctcagacagcgtatcttgaaaaaccagtatatatcagtgatgggcagttatgggcgaaactccgggaggtttcatcagattcttgactcttccgaatcggttgatatggcaggggtaggcatcggctatatgtacaagagttttctgggaccagtggagatacaattgaattggtccaaccagacgaagaaagtagggtggtatgccgggttcggattcgtattctaacagggatgtatcaaaatacacaatcaccataggattatacagattttatttttcagttaaaagaacagaagaacaagagaaaaatatgttcttttgttcttctgcctaaaacttaccccaatctgtatgattctgtggtgagttatgataccttcgttatttattcagcttccattcgcttccgtccttaccgtccttaatctcgaaaccgagcgcggtgagttcattgcggattttgtcggatgtagcccaatctttgttggcttttgcctttgaacgctcttccaatagcatgtccactactttgccgaaggcagcttcacgctcttcgttggaggcgttgtcttcttgtaatcctaagatgtcgaagcagaagaggtggaaggtttccttcaattctttcaggtcttcggctgtgatggaatcgtttccagccaggatattgtttaccatcttggcgccgtcgaagaggtgggcgatgacaatcggtgagttcaagtcatcattcatggcttcgtaacacttggcacgcagggatttcacgtctatggtggaggttgcagcaggggtaatcttgtccagtccatgtacagcatccatcagtcttgccaatcccttttcggcggcttgcagagcttcgttgctgaagtctaccgtactgcggtagtgggcttgcagggtgaagaagcggatggtcattgggctgtaggcttgctccagcatggggtgtgtgcctttgaagagctcttccaatgtgatgaagttaccgtaagacttacccattttctgtccgttcacggtcagcatgttgttgtgcatccaataatgtaccatatcttctccttgggaagctacggattgtgcaatctcgcattcgtgatgcgggaagataaggtccataccgccaccatgaatgtcgaagtgctcgcccaagtatttctttcccatggctgtacattcggcgtgccagccggggaagccgtcgctccacggggaaggccaacgcatgatgtgttccggttgcgcacatttccagagggcaaagtctgcgggattgtgcttctcgctctgtccgtccagttcgcgggtggtgttgagaacatcatccaggttgcgtccggagagcttgccgtagtgatggtccttgttgtatttttctacatcgaaataaacggaaccttcactttcataggcatatccgttcttcaatatctcctttacaagttctatctgttcgatgatgtggccgctggcatgtggctcgatactgggagacagcacattcaatgcatccatcgccttatgatagcggttgatgtagtactgtgccacttccattggctccagttgttccagacgggcttttttcgcaatcttgtcttcaccttcgtcggcatcgtgctccagatggcccacgtcggtaatgttgcggacatagcgcaccttgtagccgatgtgcgtcaggtagcggaacagcaggtcgaaagtgatggcagggcgtgcatgtcccaagtgcgggtcaccgtacacggtcggtccgcagacatacatgcctacatgcggtgcatgcagcggtacgaacagctctttttttctatttaaagtgttgtaaatggtcagttgatgttccataacagttgattattagttcttttaggagtacaaaggtataataaatctgtgaaaatctataatgatattctgttttataagagtaaatgcaacggatttcaccttcgtttattacttttgtatccatgaagtcagataaacgtgtattgcttggcatgagtggcggcacggatagttccgtggccgccatgaggttgcaggaagccggttatgaggtgactggcgtgactttccgtttctatgaggcaggagatgagaccgggtatttggaagatgcacgggctctggccctgaagctggggatgaaacacattacctatgatgcacgcgagcttttccgttcgcgtattatccgctattttgtggaagagtatctaaggggacgcactcccgttccttgcacggtctgcaataatgagctgaagtgggcactgttggctaaaatagccgatgaaaaggggatttattggatttctaccggacattatgtgcgtaaagtcttgtccggaggaaagtattatatagctcctgctgcagataaggacaaagaccagactttctttctgtggggattgaagcaggacatcctgcagcgtatgttgcttccgatgggagatattacgaaaaatgaggcgcgctcgtatgcggcggagcgtggtttcgggcaggtggctgcgaagaaagacagtataggtgtgtgcttttgccctttggattaccgttcctttttgaagcgtgaggttcctgaaacactattacccggtaaaggtagattcgtcgatgaaaagggggatttcttgggatggcatgagggctatccgttttataccgtagggcaacgtaggggcttgggtatccatctgaacaaggctgtttttgtgaaagagacaagagtggaaagcaatgaagtcgttttagctccgctctcttccctctacaggcaggaaatgtggctgggagactggaacctggtggagaatagtcgtgtgctgggtgcaaacgaggttattgtgaagatacgctaccgtaagcaggcaaaccggtgcagggtgactcttacggtggaaggtctgttacgtgtccgtctgatagagccgctggaatccattgcacccgggcaggcagcggctttctatgataaggacggatacttgttgggcggtggaattattctctgaaccttacattcgttttatagcttctcgaacaaaagatagtaaatgttgttaattttatgagacgtctttttatgagaaacttttaaaacgaactgtaatatgaaaaggatatatattgtaatgttgtttgctgctttagcaaccataacttatgctcagacggatgataaaggttatcaggagggagcttgggtattgaaaggagtgactggtcttaatatgtcacagactgccatggccaactggtcggcaggaggtgagaattccattgctggaaatgcctacttgaatgcatcactgacacacaagaaaggaaactggctctgggtcaccaacatggtgctggactatggcttgtcgaaaaccaaatctcaggggatgaggaaaagtagtgataaaatagggctttccactcagttgggatattctacagacaacgtctggttctatacactgatgggtgatttgaatacccagtttgccaaaggatatgactatcctgacaaagagcaccagatttccaatttctttgctcctgcctattcgaatatcgccctgggtatggaatggaggcctaagagtaactattctctactgctttcacccgtttccaccaagatgactttcgtgactgatgactatctttccgatttgggcgcttttggtgtagacccgggtgaccacttcaagatagagggtggcgcttttgtgaaagcccgtgctgaattgcccgtgatggagaatgtgaatctgattactacggctgatttctttactccttacagcaaagattttggaaacatagatgtgaattgggatgtacttatcagcatgaaaatcaataaagtattgtcggctaccatcaatacaactctgaagtatgacaatgatgtgaaaacgtttgatgacaatggagtgaagaagggcgccaaggtgcagtttaaggaagtgctgggaattgggctggcatataatttctaatccttgaggctgattgttgaaatgaaaaagtaaagtcaaaacgtactgactgatttgtaaaacgcggattacgcagattacatggatttattaatttatccgcgtaatttgcgtaatccgcgcttgatttttatgatatagtaatttaccggttcagttccagcatttcctctatatactccctcgtgttgctgagccggggcaccttatgctgtccgccgagtttccccttgctatccagccagttatggaagaggttgggacgggcgacgatgatttccagcggttgcagcgccaggttattctgccttttagcttcatagtcggagttcacctctttcagggtgtcgtccaatactttggcgaacttctccaggctgtccggcatttgtgcaaactctatcagccactggtggcggcatttggcatgcttgtccataaacacgggagcagcagagtaatctactacttgtgcaccggtctcggcacatgccctggcaagtcctctttccgcgttatccacaatcagttcttcgccgaacgcgttgataaagtgcttggtacgtccggtgatgacgaacttataggggttcttcgatgtgaacttcaccgtatctccaatcatatatcgccacaaaccggcagaagtggagattaccatggcgtagtttttgttcagctccacctcctcgaggcagaaggtacgcggattctccttgcctacatcttcaagcgggatgaactcgtagaagataccgtagtcaatcatcagcaacatggcagggtcggcagggtcgttctgcgtgccgaagtagccttcggaggcgttataagtctctacataatgcatcttgctgctgcggatcacgtctttgtattgctcgcggtagggagtgaaggcaacgccgccgtggaagaatacctccaggttgggccatatctcctcaaggctctgctttcccgtcttttccagtatatgtttgatgagtacaagcatccaggacggtacaccggaaaggttgcttacatttgcatggatggtttcgcgggcaatggcctccattttgggctcgaagtgctccatcaaggctgtctgcttgctgggtacgcggacaaagtttaccagcgggttgatattttctatgaggatggcggagaggtcgcctacaagactgtggttggtgttcaggttgggagcgtggctgcctccaaggataagccctttaccggaaaagaaacggctttcgggattctgtcccagatagatggcaacggcatcccggcctcccttgtaatgcgtgtcgtgcaaggactcccggctgacgggcaggaacttgctcttgtcgttggtggtacccgatgatttggcaaaccaacgtatttccgaaggccaaagcagattttgctcaccggcacgcaggcgggttacataaggttttacttcttcataagtttgtatgggaaggcgcttcttgaaatcttcataagtacggatagaggcatagtcatgcttctttccccattccgtgtttgccgctgtccggacgaggcgctgcagtacaagctgttgcaattcaccggcatggctggtgtattgttcgatttctttcagacggggagcaaaatataccttattcagaaactttgtaatattcatcgttctttgtgaaatcttattttaaaccgcaaaaataatcttatttatcggcatctctatcttttttctcttttttttctatctttacggacctatagaacaataattcaaacaaaaatatcatgagaataggtattttgacttcaggaggcgactgtcccggcatcaacgctaccattcgcggtgtatgtaaaacagctatcaaccattatggaatggaagtaattggcattcacagcggttttcaggggctgctgaccaaggatgtggagtcgtttaccgaaaaatccttatccggtttgctgaacttgggaggtacgatgctcggtacttcgcgcgagaagccctttaagaagaacggcgtgatgtccggcgtggacaaaccggcactgatagcgcggaatatcgaagagatggggcttgattgtgtagtctgtatcggcgggaacggtacgcagaagacagccgccaaactctctgctatggggctgaacattgtgtctgtacctaaaaccatagacaacgatatttggggaactgatttctccttcggattcgattctgccgtcagcattgctacggatgccatcgaccggttgcacagcacggccagctcgcacaaacgggtgatggtgattgaggtgatggggcacaaggcaggttggatagccttatactccggtatggcaggcggtggtgacgtgattctgattccggagattccctataatatccaccgtatcggagaaacgattctgaatcggctgaagaaaggaaagccttactccatcgtggtggtagccgaaggtatacagacggacgggcggaagcgtgccgccgagtatatcgctcaggagatagagtatgagacgggtatcgagacccgtgagactgtgttgggttatattcagcgaggcggctcacccacaccttttgaccgtaacctttccacacgtatgggcggacatgccacggaactgattgccaacgggcagttcgggcggatgattaccttgaaggggaatgaaatagcttctgcaccgctggaggagattgcgggcaagttgaagctggtgacggaagacaatgacttagttgtccagggacgtcggatgggaatctgtttcggctaatttttcttgtggggattcttcaacagcttctgccatgggattttcttctgtggaggtttctgttgcatggtttcgctccttggctgcctggacttcctccttgaaagcggcatccttaatttttttcaatgccatctgtgccgcattttgttgcgactccttcttggaataaccggtgccggtacctgccgatatcccttcgatgcggacttcggtgtggaacatcggattgtattcttcgtcgagaaactgctcgataagctcgaatgacacctccattttgttcttctggctccattcgatgagttttgacttgaagttgacctctttgcgagacatcttgtcgaggtcgatatagtttttgaaaatcttctcttccatgaactgcttgcagcggtcgtagccctggtccagataaatggcgccgatgaaggcttcgaatgcattgccgtacatgtagctgttgtgggatgaggagcgggtggagtatttcaccagtttgtccagtccgatttccacggccagtttgttgagtgtttcccgctgtacaattttggaacgggtattggtaaggaaaccttcgcggcgtccttcgaaatggcggtagacaatatctcctacaatggcgtcgaggatagcatcgcccaagaattccagccgttcgttgttgatgggacgtcctttttcggagcgcatggagatggatttatgcagcaaagcctgctgatagaccttgatgtcacgtggaaagaagccgagaattctgtaaaaacaaaaataagactctctatccttgcggaacaagagccttattttatctatttggttacgtaacacgaccttattattctgcgtatttcttgaaaatgacacacgcattatgaccaccgaatccaaaagtattggacaaagctacgttcacttcgcgcttttgtgctttgttgaacgtgaagttcaggtcatagtcgatgttttcgtcgttatcaccctcttcgtggttgatggtcggaggaacaatgccattcttgatggcgaggatgcttgcaatggattctaccgcaccggcagcgcccagcaagtggccggtcatggattttgtcgaactgatgttcaactcatacgcatgctgtccgaatacctctttgattgcttttgcttccgaaatatcacctacgggagtagatgtaccgtgaacattgatataatctacttcttcgggtttcatttctgcatcttccaacgcattcagcatcactaacttggctcccaaaccttcggggtgagaggctgtcaggtgatgagcgtcggcagacattcctacgccggcaacttccgcatagattttggcaccgcgtgccttggcgtgttccagttcctcgagaacgagacaaccgccaccttcacccatgatgaatccgtcacggcttgcgctgaacggacgggatgcagtttcgggagaatcattgcgggttgacaatgcatgcatggcattgaaaccacctacaccgcaagcggcgatggcagcttccgaaccaccggacacgataacatttgccttacccaaacggatgaggttaaacgcatcggcaatagcatttgtggaagtggcacatgcagaacaagttgcgtagttgggaccatggaaaccatacatgatggaaatttgtccggcagcaatgtccgaaatcatcttggggatgaagaacggattgaatttggggccgttttccttaccggtcagggcatagttgcccgcctcttcttcgaatgtacggatgccaccgataccggcgccgaagatgacaccgattctgtttaaatcctcattttcgacgtcaagcccagagtcacctaccgcttctttggctactgcaatggcatattgtgtgtacaagtccatcttgcgggcctctttgcggtctatatatttggtagcatcgaagccttttacttcgcatgcaaactgagtcttgaaaagcgatgcatcgaaatgagtaataggtcctgctccactaaccccattcacaagattttcccagaattcgggaacactgttgccaatgggagtaatggcgccgagacctgttactacaactctttttaattccatgttataaacgaatggataagattacttagcgtgttcttcgatgtaagatacagcatcacctacagtaccaatcttttcagcctggtcatcgggaatagagataccgaattccttttcgaattccatgataagttctacagtgtcaagagaatcagctcccaggtcgttagtgaagctagcttcgttagtaacttctgattcttctacgcctaatttatcgacgataatcgctttcactcttgatgcaatttcagacataactttaagtttttaattaataattagttttatttctttaaatttgcggtgcaaaggaatgaatatttatcattcctcgcaaatatttgatgaattaaatgcacctttttgcacatttttcacggttttgtgcagtaattggagggattatgggaaaaaatatcgcagttttagcgtcgggaagtggtacgaatgccgagaatatcatccgttatttccgggaaaaaggttcggcatgtgtggctctggttttgactaaccggcagaatgcgtttgttttagagcgtgccaaggggctgggagtgccttgtgtctggtttgccaagagcgattgggaaagtggagagcttgttttgtcgacgcttcgagagcatgatattgattttgtggtattggcaggattcctggcacgtgtgccggacaatattctgcatgcttatcccaataaaatgataaatatacatccttcgttgctgcccaagttcggtggaaagggaatgtacggcgaccgtgtgcacgaggcagtgattgcttccggcgaaaaggaaagcggtattaccatccattatacgaatgagcattatgacgaaggcggcattatctgccagcagaaatgccccgtattgccgggcgatacgccggaggagctggcgcaacgcatccaccggctggagtatgaatactatccgaaggtgatagaggagttggtggaaggcctctctcccagttatttatagaatcggttaagggagaggatggcctcgttcagcttacggttgtctatcttgtagttttccaggggattcaatgcactgtcgctgatttctatatatccggaagggtgtttttccagaatagtatgattttctacgataaaggcataattgagattgtcgcccacgatatgccagttccgtggacaagtatcggttattaaatgccccatactgtgtcttatcctgatataggtagacacatttacaaactaataaatgtgttactattatgacttcaaaacga

SEQ ID NO: 4475 - DNA, 600 bp, Unknown
  gut microbiota DNA sequence
cagaagcatcacgcggttcgttcggaatattcggagcatcgtaatcccagtaaggaacgagatcttccggcaagttcttattattaaagataaagttatacaccttttgcgcctggtcgaggtatttcttatctttcgtgtagcgatagcaggtagtatatccatagagagcccaagcttgtccgcgagcccaggcagattcgtctgcatatccctgcgcagtttgtctcttgcgcacttcgcctgtctccggatcgtaatctaccacatgatagcagctgttgtccggacggaagtggtgagctattgttgtatcggcatgtttcactgcaatattatagaaagtagaatctcctgaaaaggctgttgcttcaaacaaaagttcgagattcatcatattatcaataatcaccgggcatttccatccacgtgttccctgccagcctctatcagcatcccatgactggataacgccagcattcgggcgaaaacgagtggaaagcgacttagccgtttcaacaattacatctttgtactcttttttgtttgccagacgataaccgttcagatagctgcaaccaatcatgaaacctacatcat

SEQ ID NO: 4476 - DNA, 221 bp, Unknown
  gut microbiota DNA sequence
tctggaacttcatcggaacttttttcaaaaatatctttaacggatgcagggattatgttaacatggttcctgacaaaatcactttggctaccagccaatgttaaattcaagactaattaattaacaaaactcggtttagggcactgaaaagtgccctttcgaagggggatgccctaaattgagtgcttacctaaagactcgaaatatggatagtaaagtaa

SEQ ID NO: 4477 - DNA, 2042 bp, Unknown
  gut microbiota DNA sequence
attgagatgtcagattatgatttggaaacagcgaatgcaatgctgcttacaggccgttatctctatgtcggttcatgtgccatcaaacaatagagaaaattctcaaagcatattggactaattgcttaatggaagttcctctaaagatacattcactatccagacttgcggagagaacgggattggacaagcaattgtcggaggagcagttagactttatagacaaacttgaacctcttaatatagaagcccgttacccctcttataaagaaagattaatgaagagcttaaccaaagaatactgtgctgaacttttgagccaaactaaagagttgcaattatggataaagaacaagctataaaccttgccaaacgctataaggaaatggtagcggagaagtccattaaaggccctttatctttatggttcgtacagtaaaggaaattatagagcagacagcgatatagatattgctgtgatagtagaacgcctggatgacgattattttaaagatactcctctattgtggaaacttagacgcaagataagtaaccttatagagccagtcctacttacagaagatatggacaatcctctttattgtgatattagaaaaactggaattctaatacaatgaagtcttgtttatcacatgccatctatttctataatttatattcttttttacttccaacgcatattcttctcctaaatcttcgtaccataccaagtactgcgaaatacatacctgagcgtttttctcttacttattcccttcttcatccaatccctatcatgacttaaacatttttctcttgcagcaataatcacttgatattgcaaaaaatgaggaatatgaaatcattgtatttgcagctataattgtatatacttgtaagataaaccttttataaataaattggaaatgaatagaaatgaaattaccttacaagagatgttctcctcagtcatcggggaactccgggaaggcggcagatgggggacggcgcacatctaccagtcagcggtgaatgcattctcggcattcaccaaatggcaaccaatgcccatgcgcaagctgagcccgaccgtactgaagaggttcgaaaactacctcaggcagaggaactgcagttggaacaccgtgtccacctacatcaagacggtacgctcggtgtatcatcgggcggtggacagaaagtacatacggtatgtacccagactgttcgagcatgtgtataccggcacacgggcggacaggaagaaggcgctcgaagcatcagacatcagcagcctggtaagggagacggaaaggagcctgcaaggagggacgctcccaaacacacagcagagaacaaggattttcttcgtactcatgttcatgctcaggggcatacccttcgtggacctggcgtacctgcacaaaagggacttgcaggggaatgtgctgtcttacagaaggcggaagacgggacgggcgctgaccgtgtcactcacacccgaagccatgcagatggtcaggatggtggcgaacaggaatcccgattccccctatctgtttcccattctgcagagcgaggaaggtacggaagcggcataccgggaataccagtcggcactcaggggattcaaccagcggctggcagtactcaggcagtgcctgggaatgcagtcggcactcagtacctatgcagccagacacacctgggccacaatggcttaccattgcgagatacaccccggaatcatatcggaagccatgggacactcctccatcacggtgacggaaacctatctgaagcctttcagcaacagaaagattgacgaggcgaatcaaagggtaatttcttttgtaagaagcggagcgtgtacagtataaaagacgttacttcttttgataggatagaatagatttgtcgcatattttccggaatcttcaaacagagttttgaggaacggaatggtactgtctttacggagctccaatcggtgctatcaatggactgtcattcaaccttttgaactgaaaaatacatacttt

SEQ ID NO: 4478 - DNA, 2029 bp, Unknown
  gut microbiota DNA sequence
tgcttcctccggctatattgatgaataatctgcggaaaactttcttttccgactccactttctccggtaatcagcacagacaaatcggtaggagctacctgaatggcaacatctatggcgcgcgacaatgcttcggtatttccaataataccgaaacgctgtttcacttgttgtatctctgctctcgtcatcactcgtttttaatcttcgtctactgtatccagcttcagtttatcactatcgtcacgtttctcgtaatactgtttacgcaacggattggcacgagccactttttcccgctgacgattacggaacacatcgatggcaacatagattgcctgacggaaagaatcttcacaagccactcccttgcctgcaatatcgtatgccgttccatgagccggagaagtacgtactaccggcaggcctgccgtatagttcaccccgtcttccatagccaaggccttgaacggagccagcccctgatcgtgatacatcgccaggataccgtcaaaatgagtataattgcccgaacccataaagccgtcggccgcataaggaccgtagcaaaggattcctttttcttccatttctttcatggcagggataatcacttcctgctcttccattcccaacagaccaccgtctccggcatgaggattgagagagagcaccgcaatacgcggagcgccgataccgaaatcctgtttcagacaacgatggaatatcatcagtttctcctgaatcagttctttggtaatcgtagtcgcgatctctctgacagggatatgtgtcgtaaccaaagccacccggaagtcattcttcatcaaaatcatcaatgacttatcaccattgcccagacgttcttcgatatattccgtatgtccggggaaggagaactcttccgactgaatcgtatgtttgttgatcggagccgttacgataacatctatcaacccttcgcgatattcttcgatggcacgttccaaggcccccagcgcagctttaccggcttcggggtcgggtttggaaaattccactttcacctcatcatccgtacagttcaccacgctcaaacggttgtaccccgcttcggtagcagagttgacaatgctaaaattggcctgtatatccagcgctttgcgatgataagccgctactttcggtgagccataaatgatcggagtacatagttccaacattgtagggtcggaaaatgtcttaagaatcacctcatagcccaccccattaatatctccttgggtgatacctatccttatcttgttatcttccatgtttttatttattagtttgttccgcttccttagatgcctctcccaatggaatctgattctgctgaacttcattcggaagtttcagtgtatacagagatgcttccatctggcgtaccaggttgcgtttcattttatcaggtgaataaacaaatatttctgctgtaataattcgttggtttttctcgtccagacgagtgtgagagacatacggaccacccataaagtcgcccttcatacgccacagaccacgtgcttccattgtgtagctgttctgcacattgatcggacggacatcggtcagcaaactatcggtcgacatataaacgccctccttgaatccgggaatattggctttcatcacggagtcacgtttgtgcacaaaatattctttggtaaacgtatccttgtcagtgtacggataagagtacatcacaaagttacggtcggcagtacctgtgttggtagaagcccagaagaaatcatccccggtctttgaattagccagttcggcatccacccagatgtcgcatccgaacaaactgtccactttctgcgaaatgaaattactgtgtttcccttccaggaacgtaatctgacggttcatctccgcacgggtaaagaagtcgacaatcgtctttttgttctcttccacaaacttctcaaactcttcttcgttcggagcctggatagtcaatatcatctgcggattggcatacacgtccttcgcatatttg

SEQ ID NO: 4479 - DNA, 1653 bp, Unknown
  gut microbiota DNA sequence
accggcctgctgggacttgtccagtatgtcaagtatcggtgcgacggtagggttgcttacagctgcattgctggccacccattctttggattgtccggaaggcccttcacctactatgacagtaggacggtcaatgaatccccgtgcatcagggtcgtagtcggcatcgggaaagagctttccatcctgggcgcgccggacatcaatcttgcctccggactggcgaccggtggcaacgcgtgcgccggtaccggaactgccggaattactgccggaaagagtcatatttttgattttatcccgttcagctttggcactggccaattgtgcggctccggtcacgcccataagggctgctgcgattgaacccgcaatcggtcccaaatctgcatatgctttcatgattgacacagctgtgtctgcgatgatttgtgatgccttgattgcaaaattcacgtccgcatattttttctgtatatcaagctttttctgggccttttcgttttccagacgttccacttcttccgtattaccttgggctgcctcaatttccgcatcatattttgcatcgacctggtccatttccgcttgctgcaatgcttgaatggctccggaaaacagactggaataatagtcaaactgctttttataactgtcccgtttgaggttctggacggcttgctcatattgttcctcagtcagaaactgctgttcacgtgcgagcctgagctgttccagttccgcattgaaccgttcctgctgtgtagataagccatactggtcacgaatggactggatacgttgttgatgttcggattcaagttgttccttagctctaaggtaggcactgtccaattctgtcgtatcaagattgtttttctcagccatttccttacgcgcctggtaggatgcctcaagaaccttgagttgcgcggcatagtcttcatcaactgtagtaaccttgaactctgatttgaagtccttgacaagtgtattcagtttttcctgcagtgaagcacgcttggcattcgctgccttctccgcatcaatgacacgttgattggacttccggacgagattttccttggtttctgcattggaaatggccatggatatggcgtcctcataataagactgttctatgatgagcctattttccgcatacgatttttcaagttcgagtaccagcatttcatattgttccttactcattttccctgatgccagaaaagcagaaagagcggcaaacgaatcattataccatttctgttgggattgcagttcttcctcccttaatgcttcaagagacttggcggcttcctgctccgtagagacttttgctttctgctctttttctgcagccgactttgcttctttggcagccttttcagccttcttcctggtcgcgtcagagtcctctgccgggaaacgtttgttgtatatttcttgggctatttccacatactcaccggctgcatccttgttgttctttatccaggcttgcaactgaaccttctccatcttgttgaagttctggcgtgcttctgcaagcttctgctggttcttgacggtttcttcaatagtctggccgttcagttgtttcaatttctcttcagctcccaaaagcatgttgctgtaattctcaatctcttc

SEQ ID NO: 4480 - DNA, 651 bp, Unknown
  gut microbiota DNA sequence
aaatgtgtctacctatatcaggataagacaaaacgtgctgaattacgtcaacgtctatccgagccgatacttgacagctttgaactttggcttaaaaacacataccctaaagttctaaaacgaagtcttatagggaaagccatagcctatgcctactccctgctgccaagaatgaaaccgtatctccatgacggaagaatctttatagacaacaaccgctgtgagaatgccctgaggccactggtcatatcaagaaagaacatgctgttctgcggaaatcacgaagctgctgagaatacggctataatctgctccttgcttggctcatgtaaggaacgtggtgtcaaccccagagagtggctgaatgatgtgatcagtaaactcccctattatctagcacccaaatcagacagagacctgaaggaactgctaccggatgtatggagaaaataatcgggacagttccgggaaaatgcaggaaaaaacgggaaaaagcgagattgacactcaataacaaccctgagataagttggcatatgaaaaaatcgagacgcacttacaatggagtgcacctcaataaaaaatcgaatacacaagatgtagttgagcagtcgcttacaaattatggatactgcccaatatacgtaagaa

SEQ ID NO: 4481 - DNA, 262 bp, Unknown
  gut microbiota DNA sequence
atacgcgcgcgcatcggaatatactaagttcaccccttgacatagaccactgaacggccggcaccacgcttgaggagcccaaagagaactgacaataaacctgcgaaaggctacatccggaaagcccggatactaaacgagaactactgaacaacttttctcactacagatatgtttctttcttaccacacccgcgtttctttctttccacagctgtggtaagaaaagagcactgctgtggtaagattagtttttagagaaa

SEQ ID NO: 4482 - DNA, 2170 bp, Unknown
  gut microbiota DNA sequence
aaaagaaaaagcgtctagctaaatcaggaaaagacatttttcatacgggagttcctgtttatccgccatgtattccacattatacatatcctggataaatttgagtccctgcatggcatattccggattttcttccttgcacagctctatatgcctgcggatatgtgcgagacagccacacaggcacacgtcctctctatcctcaaaggcgtcataaataggatggccgtcactttggagatatcctttgaagtttttcaaaagcctgaccgcaactttttgtgaacgcgatccgttgtcgtaatggaagaagagcagacgcggcacagccgctcggactatccagatgtattcttttgcggctttatgcctctcatggtttataaccggaagcgtggtctcgtcaacctggaggtaatctgcggccagtactttcttcctgagttccagataaagtggtctgagaagttcgcagaccggtctgaaccagccgtccaatgtgtttctggacagtttcacacccagatgttccagctgtttcacttgtcggtagaacgggacatgatattcgtacttctgtaaaaggacctcagcgagcatggaagccccgggcatgcctttatatatgggcatcagtggcatgggagcggttattacagccttttctccgttgtcaacggcctccatttcatttttcagggcatatgtgggacgtaccgtgtctttcacatagaggtagccgggtttcatctcaagggtcctggtatgttcctcgcctatcttgacgtatctgcttaaatcgacattctccggttcgatgacgactgttacaaccggaaggttattcatgacgacccggttacggcgtggcgttttattggcggcccgggacttggggacggtaatctgttcagccgccctgctccgggcctcttcgatttccgcctctatctgttccaggtcgccatagtcaaaagggagcttcgggtctccgttatagacaggcttgcatttctcactcatctttccgaacaccttcctcttcagccatgccagggaggcgttcagctcaactatcgtaccccggagctcttctatggtccttgcctgggccgagatgatctcactctgtttacggttgatatccagcagctgttccattgaggattccacagcttgtccggttgcatcttcttttgccattcaatatccttttttgatgatataaagatagcgaaaagctataagaaaaacaagccttcaagctgtttgtttacaactgtttaccaatgctttttcaaattggaaagccgtctttgcctgcctttgctgacatcttcattgatgccttccaccataacgaccaggtcactccaggtcatggggtaagaacgggtggcaggatcataggcgggtatcttgaaggtgccttcttcaagcagtttctcgtaaaggaccagaccgcccggttcggcatggagcaattttatcttggtccggaaacggttgtagaaaatgaatacgtccccacttctgatgtcgcctcccatcctctcatgcacaaggccgcaaagagtgaacatacctttcctcatgtccgtataaccggggcataggaaatatctcatgctgtcatttaggcagaacattggcattatatattttagagatcagattcagggcagcttcacagccggaagaccctttaaacttcaacttcaatccgttgggtaattccaaggatatttcagagctgtcctttcctttcaagggaaaggggacgctaggctggggagatggcaggggagtctcgtgagatataccgggggatggcgtgtcgccattgattactatggggacaaagctgtctttaacccctaagcgggaggcttctgccaataactcccgctccgttataccgtatttttgtttccaaagatagaatctactacggctataaccttcattctcacaaaaatcagcaatggacaaaccactctgctgctggcggaaaagaacggagataaatttttctctgctcatcatgtgtttacgtcgctgcatcataggatattatttttttgtagcaaaagtaaggagggaaaatgaactgtagaagatgtacttacttattgcgcttaccataattttgtgtaaatagaaacgggat

SEQ ID NO: 4483 - DNA, 180 bp, Unknown
  gut microbiota DNA sequence
agtacggtatcgttcagtgatggtagcacgattacctatacttatggtgctgacggcacgaaactgagaacagtccataagataggtagtacaaccacaacgactgactattgcggtaatgtgatctatgaaaacggtactcagaagttgttactcacagaagagggttacatcaacctg

SEQ ID NO: 4484 - DNA, 651 bp, Unknown
  gut microbiota DNA sequence
actacctactctcccactgttacgcagtaccatcggcgtgaccgggcttaacttctctgttcggaatgggaagaggtggaaccccggtgctgtagtcacctgaataaggcagacatgatgagaaaaaagtaaagtgtccatatattgctgaacgtatatacctccatacacggaaggcaaaaagtggacgggcaattagtaatgctcggctatgacatcgctgcctgtacacctgcatcctatcaacgttgtagtctacaacgaccctgagaaatctaatcttgtggctggcttcgtacttagatgctttcagcacttatccaatcccgacttagatacccggcaatgcacctggcggcacaaccggtaaaccagaggtcagtccaacacggtcctctcgtactagtgtcagagccacgcaaatttcatgcgcccacgatagatagagaccgaactgtctcacgacgttctgaacccagctcgcgtgccactttaatgggcgaacagcccaacccttgggaccttctccagccccaggatgtgacgagccgacatcgaggtgccaaacccctccgtcgatatgagctcttgggagggatcagcctgttatccccggagtaccttttatcctttgagcgatgtcctttccat

SEQ ID NO: 4485 - DNA, 461 bp, Unknown
  gut microbiota DNA sequence
cctcccggattcacaataactacagatgtttgtacggaatacaatacgttaggacgtgataaagtggttgagttgctgaaagatgaagttgtaaaagcgatcactcatgtggaaacgttgatgaaatctaaattcggtgacgttgaaaatcctttgttggtgtctgtacgttccggtgcacgcgcatctatgccgggtatgatggatacgatcctgaacctcggattgaatgacgaagtggtggaaggtattatccgtaagacgggtaatgcacgttttgcatgggactcttaccgtcgttttgtacagatgtacggtgatgttgtgttgggcatgaagcctaccaataaagaagatatcgacccgttcgaagcaatcatcgaagaggtgaaaaaagcgaaaggggtagaactggataacgagttgaaagtggaagacttgcaggaactcgtaaagaaatt

SEQ ID NO: 4486 - DNA, 25417 bp, Unknown
  gut microbiota DNA sequence
aaatgtgtctacctatatcaggataagacagtaagcaaaacaatgtaccggagtaagcaaagcaatgaagtaaaaagatgaaaccaagccttcacttaatcgaatttttccattatctttgtacccgaatagcaagtagagccgtggggcatcgtcctccttcttattttattctccattttgaagtatcaccgaaaaagaactgaaatatgaaaggaattattcttgcaggtggcagtgccactcgtctctatccgttgtccaaggctatctccaagcagataatgcccgtctacgacaagccgatgatatattacccgctctctacactgatgttggcgggaattcgcgaagtgcttattatctctactccacgtgacttacccatgttccgcgagctgctgggaaccggtgaagaactcggtatgtccttttcctataagatacaagagaatcccaacggactggcacaagcctttgtgctgggtgcagagttcttggacggcggaccgggctgccttattctgggcgacaacatgttctacggtcaaggcttctccgccatgctgaagcgtgccgcttccatagacaagggtgcctgcatctttggttattacgtcaaggacccccgtgcctacggtgtagtggagtttgatgccaacggcaaagccgtctcgctggaagaaaagcctgccaatcctaaaagcaactatgccgtccccggactgtacttctacgactccaccgtgacagagaaagccgcctccttgaagccctctgctcgcggcgaatacgaaattaccgacctcaaccgtctctatctggacgagggcacgctgaaagtggagctcttcggccgtggctttgcctggctcgacaccggcaattgcgacagcctgctggaagccagcaattttgtcgccaccatccagaaccgtcaaggcttccgcgtgagctgtatcgaagagattgcctggcgcaagggctggatagatgtagaccagctgtatcgcttgggtgaacagcttggcaagaccgaatatggcaaatacctgatggaactggctgaatcgaagcgatgaactctttgttccccaaaaagagaaggagaatagttctcctataaaggcccgctgactttaatttttaatttataatttttaattctcatgaagacttatctcgtaaccggtgccgccggttttatcggcgccaactatattaaatatatcctggcaaaacataatgatattaaagtggtgatactggatgccttgacctacgcaggcaatctgggcaccattgccaatgacattgacgatgaacgttgcttttttgtaaaaggtgacatctgcgaccgcgtgcttgccgacgaactgtttgccaagtataaattcgattacgtagtgaattttgctgccgagagccacgtagaccgtagcatagagaatccccagcttttcctgatgaccaacatcctgggtacacaaaacttgctcgatgccgcccgccgtgcctgggtcacgggtaaggacgagtccggttatcccacttggcgcaaaggcgttcgttaccatcaagtgtctaccgacgaagtttacggctcacttggtgccgaaggctacttcacagagcaaaccccgctctgcccgcacagcccttacagcgccagcaagacgagtgccgatatggtagtgatggcctatcacgatacctataagatgcccgtcactatcacccgctgttccaacaactacggtccttatcacttccccgaaaagctgattccgcttatcatcaagaatattctcgaaggcaagaacctccccgtctatggcgacggcagtaacgtgcgtgactggctctacgtggaagaccactgcaaagctatcgacctggttgtccgcgagggtgtggaaggcgaagtctacaacgtaggcggtcacaacgaaaagaccaatcttgaaatcgtgaagctgactattgccaccgtccgccgcttgatggaggaagaaccccgttaccgtgcagtgctgaagaaacaagtaaaagccgccgacggcacgattgacatcagctggataaacgaagaccttatcaccttcgtcaaagaccgcctaggtcacgaccagcgttatgccatcgaccccacaaagattaccaatgccctgggctggtatccggagacgaagttcgaggtcggcatcgtcaagaccattgaatggtacctgaacaaccagccgtgggtggaagaagtgaccagcggtgattatcagaagtattacgaacagatgtatggaggtagaggttaaggtttagggattagggtctaaccgctaatccttaacctctaacccctcaattcagcgccaccgctaacagtaatcctaagaacagcatattgcgcgacgtctcgcccagtatgctgttcagctttttaccgctacctatctgtatcattttgcgccacgtcagtgcgtgcatatagagatagacgcagggagcccagataaattccagcggagtcagcttgcccgtgtagacaaaccagaagcagagcagcacggcggcgatgcccagtgccagatacatattctcaccgaacttcttgccgtagcgtaccaccagcgtacacttgccgctcacggcatcctgctcgcggtcgcgatagttgttcaccatcagcaaggtgtctatggcgaggccactgacgagcgacagcaccaccacatccatattcagcgtataggcctgcacgtagtaggtgccgcatacgggcacgaagccgaagaacaccagcaccagtacgtcgccccagccccgataggagagcagcgtggtatagaggaaagcaaacagtatgcacaccacgcccagcaccaccagttcccagcctccgtggggcagctgcccccagacggtgaacagcactgccagccctgccaggcacgacagtgtcagtgcgatgccgatgccggttttcatggctgccggcgtaatccaaccttcggcgcaggcgcgctgcggccccagccggtcttcccgacggtcggtccctttctggaagtcgaagaggtcgttgataaagttggcggcaatctgcatgccgcaggcaaagagggcgcacagcagggcgggtgcggtcttgaactgtccgtcgctgaaggcaagggcagtgcccagcaataccgggatgatggctcccgtcaacgtcttggggcgggcggcgagaaaccatgcgtagggtgaattctgtttaatctcgttcatcgtagttccaatttagttcggcatctgccagcaaaaatactgaaaatccctatatttgtacccacttatgatgaagaagttagtctacatatccattctttctctgctgctcttgtcttcctgccgttccaagcggatgattaccgtgtcgttgccgcagccagtcatgcaggcagacagcacgcagcttggcgatactatcgggttgcctgcccgcctttcgccgatgttcacctttgaccagtctgatttgcgtaatgtccgccgccagccggcgaagggcgaggtaaagaaacagcagataaagaaaacggcaccggtacaaaaggtaattgtgcagcgaggtacaagaatcacatcgaaaaccacccacgtaggctcggcctataagggcgtcagccgcattaagacgtacgacttcacgcatcgcgacgtgcctgccgccttcgagggcttccgcatcgcctttgtctccgacctgcactacaaaagcctgctgaaggaggagggattgaaggacctggtccgcctgctcatagaccagaaggccgacgtgctgctgattggcggtgactttcacgaaggctgccagtacgtgccgcccgtcatggctgccctggcgcaagtgaagacgccgttgggcacctatgccgtgcttggcaacaatgactacgaggcttgctatgacgacatcgtgcgcgaaatgaggcattatggcatgcatctgctggagcataaggtggacaccctgcggcgtggcggcgagcggattcttgtggcgggcgtgcgcaatcctttcgacttggccaagaacggcacatcgcccacactcggcctttcgcccgacgatttcgtaatcctgctgacgcatacgccggactatgccgaggacgtcccggtgacaaactccgacctcatcctggccggacacacgcatggcgggcaggtgacgctgttcgggctttatgcaccgatagtcccctcgcactacgggcagcggttcctctccgggctgaagtacaactcaaagaacatcccgatgattgtcaccaacggcatcggcacttcgcagaaggccatccgcatgtttgcccccgcagaggtggtgatgattgtgctgcaccggctgacggactgatttattcttcgggcatcagcaccactcccagtttcttcttgccatccatctttaccaccatcggctggtggaaatgtacatgccgcaggtacttcgtctcgtgtacggcaggctgtgcattcaggaattcctggttgtatacgccgtcattcataaaggcgttgatggtaaagtatcccactccaaaggaggtcaggttctggaagaagtgggttccctggctggggtctacccggtagttggtcagtccggcttccactatcacgcgggcagcgctgatgtgcggccacttcacggggatgccgagccaggtgtcactgctaccccagcgtccgggacctacaaggacatagttgcggccttcgtccaggaactgctggttcagcttctctatctcccaggcaatctcctggttgtgggaggcactatagtcgtctgtcttcacatagataatgtcatgtatctcgttcatgatgccatgtcccaatgagttgttggaacggagcagtacctggtcgtccggaatggcggtaaggtcttcatccagcatctccttggtgtcgactatcgggcggatttgcagcaggtagaaggtgccggttttgtccttctcgcggctcatggtggcggcaaactctatctctacgggacggcgcatctcctgctctccgtatttcaaagccagttgcaggatgcgtggcagggggaatacgtcgtgttgcaggatgttggcaaaggtgatgactttgcgtccgccgggataaagcccgtcgcggataatctggtcgtaagggtcgtaggtggaggctatgtagttcagtgctccgtccttttccgcttctttgacgtgcagtttcagcaggttgaagccgtcgtcgatggagaagtcgtgaccggcattgcgcaggtcgagggcatagaagcgggtctgagtctctttgagggcaatctccatttcgctggtttgcagcacctggttggggtgatagggcgagaagcggagcgtcatgccaccgtccacgatgtatttacctaaaccgagcgccagattgacgataccttcttctgccttctcgtcgccgatggggtagtagttgagcgaacgtgccacgccggacatgctggggtagtagcggtcaccatactggttgcccactacctcttgcaggatgacagccatcttttcctggtcgataacgttgctcgttgcctgcatgtatgccttcgagtcgcggaagtagaccgaagcatatactcccttgatggcatcgctcagcatgcgcagcatctcgtacttgtcgtccagatagggaatcatgtaggtgttgtagatgccggcgaagggttggtagtgcgagtcttccaacaacgaggacgaacggatggcaagcggcgacttcaccacgtcgaagaaggtgaagaagtcctccaccaggcggtcgggcagctttgctttgaggaagtagcgcaggatgacgtcatcgtcggcatcggacaaggctatctgatacagattgttggtatccataaactcgtcgaacacatcggtacagagcacgatggtcttggggatggcgacacgggcattctcaaactcttcgaactcggggtgatgcttcaccaggttgtcgatgaaagccagtccgcgccccttgcctcccagcgaaccgtcgccaatacgggcaaagttggagtatcggtcaaagcggtcgcgcctgaagactgccactactccctggtttttcatcttgcggtatttcacgatagcctcgaagataattttacggtgggcatccacgtcttgcaagctattccaggtgatgggccgcaggaactctgccacgggaaacatggcacgtgagtagagccagcggctgacgtggttgcggctgatgtggtaaaggaatgattctgccggaacagcaaaaagaatgttctgcagctctttgagattctttacgcgggcaatctcttccagcgtgtccgggttgcggaagataaagtcgccgaagccgaaattgtctgatacaatacggcgcaggtccacatccatctttttggaattcttgtcgatgaaggcggcatcgtatttggctgcatacgctacgttgtccgattcgctggactgtatgataaggggtacaaacgggtcttccttgcggatggcggcacagagcttgataccggccagtccgtccttctcgccccgttctacgcgggggaagcgtacgtcggtgatgacacctaatatattattcttatatttttggtagatgccaaaggcttcttcataggtacgtgccagtacaattttgggacgtcccctcatgcgcagtgtgcgctggtgggcattcagtgcttcagtagagaattcctggctctgcttcaatacgaatttatacagattgggcaggatggaggagtaaaagcggatgccgtcttccaccagcaggatgagctgcacacccacttcgttgacgtcgtgctccaggttcatcttgtcctctatcagcttgatgatggaaaccagcaagtcggtgtttcccagccagcagaacacatactcaaagggactgaggtcttcattggcaatacgcttggtgatgccgtggctgaaaggggtaagtatcaccatcggaatctgttcatacaggtttttgatgtatcgtgccacgtcgaagctgtcgttgtctcccgtgcccggcatgcagatgatgaggtcgaaagagatggaggacagctgtgtcagcgcctcctcgcaagtggaaacctgcgtgaaacggggagggtagcgcaaggagagcgaagtgtattcattgaatatcttttcgtcgatgcggccgtcatcttccagcatgaaagcatcgtaaggattggctatcagaaggacgttgaaaatgcgccgtgtcatgaggttggcaaactgtgtgtccttgaaatagagctggtttaatttgaacttactgagcatggcttctcatgatttgttggtttcggaaggcaaaagtaatagaaatcgaacctattcggatagtttttcgaccgttttttttatatttatgcgtaatattgcatccgaaaaacaatatatgacctatgtctgctccatatccgtttccatataaatccgttgcatgtacatttctgctgttatgggtgttcgtttttttgtccgctgacttgtttgccggttcattccgcaccttgggtatcaaggagggattgggcagtcggcaagtattccagataaacaaggattcagccggatttgtctgggtgtatactcatgtcgggatagatcgttatgacgggaatgaaatcaagcattacaagctggacggaatggttgattccagggacaatatccagtcttccactaccatgatgtgtgataaggagggtattgtctgggttgcattgaagaatggaaaaatctatgcatacaacaaactgacggactctttccaattgcgtgtggacttggccgattacctgccttctccggtattgtataatatgctgtttgatgacgaaaaccgtttgtggttgtgtatgtcgaaggggctttattcttgggaagaaagtgcaggactgtcttttgccggattgaaggggcaatctgtccgttgcatggtccaaatggaagatgaagtgttttttgcaggcaccgacaagggtgtcttccggctgacgaaggcaggaacggcaggtgcttcgtcttttgagacgaggccggttgacctgcatacagagatgcatgtggaatcgctctatgtcttcggagcgaagctgttcatcggtaccttttcaaacggcgtatttgtgcttgacggtcccgaagggcaaatacattccttgaatgaccggattcctcatgtacctatccgttcgtttgcaaggacaaaggataatttgctgctggtgggagccgacggtgcaggtgttttttgcatggatgtcgctaccggagaacttttgaaccattatatgaataacggggatgatgacaaaagcttgagtggtaatacggtatccgatatttgtgtggatgaatccggagttgtatggattggcacttctacgaatggcatcagctatctggatccggagatgccggatgtctatagaatcaggcacgaacgcaataatgataattccctgaagtcggaccatgtaaatgtgatgtttcaggactcggagggagattattggtatggtacaaacaacggcgtcagcctctatcaacctcggtcacgcaaatggacccactatctggacggtacggaatatagtggcaaagtggtattggcgcttgccgaagactccgggggaaacatctgggtaggtggctatggtatcggtgtctattgtattgataaacagaccggacgggtacagaagaaagagaaaagaaatgcacatccggagaagggaatggccaccgactatgtttatgccatttatgcggaaggggattatgtctggttcggtggtattgaaggagagtttacccgttacgatatacggacggatacttatacatattacccgattgattgcataggtgacataaagccgggtaaggggggctcattactgattgccggttgcagcgggttggccgtctttgataagaagtcgggagacacgcagtggcatcagacgtttggagacatctctctgcattatcctgtccgttgcctgatgcagtcctcatccggcgatacctggctggctacagacggggaaggccttatacgtgttgggccggatgggaaagaggcgcatgcctataccgtagatgacaatctggtttccaattccatcaacagcctgctggaggataacgaagggcgtatctggttcagtacggagaaggaattgtattgcttggactgctcccgggatattatcatcagtgccaatgattttttggatgtcagctggggatattacaatccgaatgctgcccttaagttgaagaatggatgtcttgctttcggcaccgcagaaggggttctttcctttctcccgtctttggacttggggactcatgcacccgttgagctgattctgacagactttaaactgctttatgaatcggtcaaagcgggaatgaaaggctctcttttgcaaacgaatatcaatgatacccggaaaatagatttgaagtataatcaaaactccttctctatttccttctctgccatcaactttgcagtcccgcatcgtatcaggtatgagtataggctcgaaaatcacaatgaggagtgggaacactccaattcagtgcggaacgtgagctatatgaatctctcgtccggtaagtatgtattccgcttgcgggcatttgataagtacaccgggcagcaggtgggagaaagaagtctggacattgtcattcataacccttactgggtttcgtggtgggcgctgctcatctatttcatcttgttgtctgtctttgtctacatgtttgtgcagtataggaggcataaggtgaacgaggggcgtataagggacaagatacgttcctttatcagtatagcccatgatatccgtacaccggttactttaataaaggctccgctgagtgagctcgaagcgcaggagggacttccggagcagggtaagaaaaccgttgcggtggcaatgaagaatgtggaaaaactgatgggaatgattactcaactgcttgagttgcagaaaacggaactgcatgccgaggagtgtttgaaggtttctccatacgacattaaggcttatctggaggaaaagatggcggagtttcatttagccgccatgcagaagagcgtcgggatagagttggaggtggagccggatatgcccaaggtttggattgaccgggagaagatggatcatatcatagacaatctgctctccaatgccttgaagtatacagagaagggagtcattcacatactggtgaagactgcaagaaagaagtggactattgaagtgaaggatacgggtatcggcattccgaaagaggagcagggcaatatttttcacgaatattatagagcccagaatgccatgaactttgaggaaaccggttcgggtatcggtctgatgattacgcgccgcattgtgaaacagcatcacggcaccatctctttcagtagcgtggaagggcagggaactacgtttacggtaactttcccgcagaggataaaggcgagcgtggcggtggaagcgaaggctgacggccgggaagaagctcaggccgctaccggggctgtgcatgaagaaacggaacgtgccgggaagaatgtccttcttctggcggaggacgatgcggatatgagggagtatctggtggacagcttgtcttccgaatataaggtagttgccgtgcccgacggcggaaaggcattggagacggcaagggaaatcaatcctgatatcattatctcggacattgtgatgccggtactggaaggtgatgaattgtgccggattctgaagtcatcggtagatacaagccatatacctattatattactgaccgcactgagtgagagggaaaatatcatcttcggactggaggccggtgccaatgactacatcatcaagcctttcgacttgtctgtgctgaaagtgcgtatcaggaatattcttcagaataggcagcatttgcgcgaaaccgtgttggcgatggatgcgcagcccgaagagacagactataccagccagttggacaaggagtttctggacaaggttatgaaagtgattgaggaggagttgtccgattcggagttctccatcaatgacttctgccggatgctgggcatgagccgcacttctgtctacaataagataaagacgctgaccgggcagggaccgaatgatttcatccgcattgtccgtttgaacaaggcaaaagagctgctggtttcccggaaatattcgataggggaagtggcgaatatggtcggattttctgacccgaaatattttagtacatgcttcaaaaagcagtttggcaccagtcccagcaaaatttagagccatgaagactgcttttgaaccactgctgacaagtattaaaccttttttgtcagagaataaacccttgtctccctgatagtgcgtaatattgtggacagtaaacaatattaaaaaacgcatataaaaaatggaaacgtatttaggtcttgatttaggaggcacgaagttgctgattggcgaaatggatagccgtggcaacattttgaggtataagaaatatgactccggttactttaatcagcaggctgcgctggaaatcatcaagtcgtcgctcgatgattatatccgtaccgtgggctggtatgaccagaaaccggtagcgatgggtgttgggctgatagggcgtgtagatcccaacgaaggtgtctggctgcagattgacccgagcaggacacagcggattgagttggcaaaggaactgtcggacatatatggcatgccttgccatatagacaatgatgtgaagagcgctacaagagccgaacgcgtctggggattcggacaaatttccaaaaacttcatatacgtaaatgtaggtacaggcattgccgtgggtacggtgataaatgggagacaaatccgtggcagccatttcaatgccggtgaagtgggacacgtgcgtgtaggtgtgaacataggcattaaatgcggttgtggacggatggactgtgtggaggcgattgctgccggcataggttttgacaattgtgcccgtctgctccgcaaccagtatgagaccggcctgcatattccggctgaaaaaggggaacgggtgattgtgagtgaggtgtttgcacttagtcagaaaggtgaccctctctgtacggtgctggtggagaatgcagctgaggcgcttgccaatcttatcatgaatctggtacgtgtgattgacccggacacggtggtgttgggtggaggcattgtggccgacgggtatatgcacgagaagattctggagaaacttcatcctacgaccatgcgttttgtcagcaacggggttgtcattacgaaactgaatcccggatttatcgggcttctgggggccggcgcggtggcgatgaatatgtgattaggaattaatgattaagaatatgaaaataacaataacaaagaatgaaaaggagtttgactgcacggctgcatggcgcatcatcgggcagatgttgaatgaaccggagagtgtgataggactttcgacgggacgtactaccggcaatcttcatcggttggtgggagaaatctatactaaatatccgtttaaggtggataccgttactttcttcggattggatgaggtaacgaatgtgccgcgcgaatatgccggagcatgctacacgatgctgaaaacggagttgatggatacattgggcatcaaggaagagaattttttgatgctgcctaccatttctggtgattttgaacagtcatgcagggatttccagcaggaaattgcgaaccgtggcggcattgatttgctgattttagggttgggtgagaacggacatctgggattcaaccagccggaatctccctttggcggtgaagcatgggtgacccggatgaatgtggaactggaagaacgcatccgtaaagaaacgggtactcctcccgataaagagttgggaggggctactttgggaataaagaacattatgcaggcacgccggattgtactggttgccaaagggactaataaagcgaatattgtcaagtggatgcttgaagggcctgtgacaacagatgttcctgcttccatccttcagcttcatcccaactgtgaatttctgctggatgaggcggcggcaagcatgcttaactgctaagtcgccttgcaggcggctgataactaattatttgaattaataatcaaaatactatgacacaacaagaaaaacaaataaactatatggggccattcatcacgatggtgttcttgttctttattgtaggtttccttacgactgccaatactcagtttcagggtcctctgaaagaaacttttctttcggaagtgggtgggttaaaaaatacttttgctactttgattactttctcctggttccttgcttatccggtttgtggaggggtaggctcgtcgtggattagcaaatacggatataaaggaacattgatgcgtggattgctggtgatgattgtggggcttggtttgttctttgcctcttcctatttcacagtacactttcctgaagcgaattggcatgcaggaaataatgttatccctggagggttcttgattttcttactgggttctttcgtggtaggggcttcggccaccattctgcaagtggttataaatccttatctgacggcttgccatgtcaagggtacccagtccattcagcgtttggctataggtggttccgccaattctgtgggaactacgcttgctccttatttcgtgaccggtgtcgtgttcggcggtctgtctatggaggacattcagattgaccagctgatggttccgttcctggcattgatggctgttatttctttgattgtattgttgttgatgaaattgtctttgcccgatatccaaggaaccagggtagagaagggagaaaagctggaaaaaagtgtatggtccttccgtcatctgacattgggcgtggtggctatcttcttttatgtaggagtggaagtctgtatcggggccaatatcaatctgtatgccatcgagatggattatgcttctccggcactgatggctacgctctattggggtggtatgcttgtgggccgcctggtggggagcagcctgagcaggatttctccccgcgtgcagttgacggttactacggtatcggcaggactactcgccctactggccattcttctgaataatccgtggctgctcacggcagtaggtctgttccattccatcatgtggggagctatctttactttgtccgttgcccatttgggaaaatacacttcggtggcttcgggtgtgttcatgattggagtggtaggcggtgccatattgcccttgttgcaaggagtgcttgccgatgttcttggaggctggagatggtcatggctcatcgttctttttggagaagcgtttatgctgtattatgcattgataggttcacgggtccgtcagacctgcgataatttgtaattaaagatagtacttatgaaaaaaattagaatgatgatggctgccgctttgggcgtattggtttcatgcggtagcgttaagtcgggagaagaggtcgttgcggcttcccgcgattcaaaggttgtggttgcttatgtcacttcgtggagtgaggtgatgcccgacccgcagtacatgacgcatatcaactatgcgttcggtcatgtaaacgagagctttaacggtgtcaagattgataatgaggaacgtttgagacagattgttgatttgaggaaacagaagccggaactgaaagtgctgctttccatcggcggctggggaagcggacgtttcagtgagatggctgccaatgatgaatatcgccgtgcttttgtcgcggactgtgcccgtgtggtgaaggagttcgctttggatggcattgacatcgattgggaatatcccaccagctctatggcaaatatatcttcgtcaccggacgatacggagaattttacacttctgatgcaggatatcagagctgccatcggcaatgaaaaggaactgacacttgccaccgtagcttctgcccgttacattgacttcaaggctatcttgccttccgtcgattttgtgaatatcatggcttatgacatggcttctgctcccaagcaccattcggcgctttatccgtcgggacatagcggtgacattacttcggacggtgccgttactgcacacttgaaagcgggcgtaccgccttccaagctggtgatgggtatgcccttctatggtcgtggaggtgacggttatcccagcttccaagactataataaggtagggaatacggatacccaatatactgaaaagtgggatgaggtggctcaagtgccttatctggccgataagaatgatacgttggtatttggttttgagaatccccgttcacttgccatcaagtgtcagtatattctggataaagatttgctgggaggcatgtattgggattatagcggagacaatgagcagggtgatttgcgccgtacggtagcagaaaacctgttgggcaagccgcacaaggcgaaggtactggtgttgacggaacgtggcggacagcacggaggatttacggatgccggtttgaggtggttggcggccgaaggtgcaaaggggaatttcagtattaccgagataaacaatgccaggaacataacggaggcttacttgtcgcagttcagcctggttattcaattggatttcccgccttatacttggccgaaggaagcggaagatgcgttcgtcaagtatatagaagaagggcatggcggctggattggtttccatcatgccactttgctgggcgagtttgacggttatcccatgtggcaatggttctctgattttatgggtggcgtgcgtttcaagaattacatagctccgctggccgacggtacgctgattgtagaagatgagcagcatccggtaatgaagggtgttccggcctctttcgttgtgcccgatgacgagtggtatatttatgacaagagtccgcgtcccaatgtacatgtactggccaatgtggatgagtcgagctacacgcctgcgtcggacatcaagatgggcgatcatccggtggtttgggtcaatgaaaacaaaaaggcacgcaatgtttatttccagatagggcatagtagtaagttgtacgaaacggaagggtttacgaccatgttcagaaatgccattaactggactttagaaaggtaatactttttataatcaatggatttggaagaaaacgggtacgtacagaaacgtatccgtttttttatgggtttaaactttatcactttaagtttaaaataaaacgttttttatggatgtgttagtaaatgaactccttatgagaaatattcaacttccatttcttgtttagtacgtaatttcgcttatcgaagtattggaatttgtatcaatacaatatgaataacttcctattttataaactaatactattatcatgaaaagaaaaagagtccttttgctgctttgcattctcagttgcactttgcagctcttcgcacaacaaattaatgtgcagggtgtcgtttatgacccttccggagaaacggttccgggtgctaatgtcagtatgaaaagtaatccggctgtgggtactgtgacggatattgatgggaatttcagtctgaaagcttctgtgggtgatgtgttggtcttcacctttatcggttatgagcctattgagtataaactgactgctgcagatacaaatctgaaagtccgttttactgattcttctgagttgctggacgaggtagttgtagtaggctatggtgtacaaaagaagagtgtactttcgtctgctgtgagccgtgttaccagtgaagagttggataaaggtaatcctacaaatattcagaatgctttgaaaggtaaagtttccggtgtacagattatctctaattcaggtcagcccggtgcggaatcaaagattcgtattcggggtaccggtacggtcaacaactccgatccgctttatatagtagacggcatgccgtctgaaagtggtatcagtcatttgaatccttctgatattgagtctattgaagtgctgaaagacgcagcttccgccgctatttacggagcccgtggtgctaacggtgttgtgctgataactacgaagaagggtactaaagggaaggctactttgaactatgaatttacgtatggtattcagaatccttccaagaaggtggatttgctgggtagtgcggattatcagatgttgatgaatgaaatggctgccaatgcaggtaaagacccttatttcccgactgtttccagcgtcaataccgactggcaaaaggaactgcagaacaagaatgctcctattatgaaccacaaggtttcgttgagtggaggtacggacaactctacctattatgcttctttcggttatgtaaagcaagaaggtatttatgccaaaggacatgctgattatgaacgctacaatgtacgcttgaattacaataatgtattactggacacgaaatcacgaaattggttgaataagattagttttggtgcaattgcaagctattccaagtcaatccagactggtaatactattggcaatagtgaagcagcgggcttgattacttccatgaatatgttgcctcctaccgagccggtttatcagaccgaccctgctatactggagcaatatgccgtaacttatccaaatcatgtcattgctcccaacggcctggcatacaatatcatcgagatgcgtgaaataaccaatccgctggcagccatgcaggtcagtcataaccagaggactatgcctcagaatttcggtgcgaactttaaccttgatgtcgacttgttgccaggcttgaagttcaagactacctatggtgcggaatgggtgttcaattccatcaagaatgtaactccggtctacgagctaaatgctaccagtaagaatgccacttccaaggtagaggataagaaaagggagtcttcctattggcagtgggaaaatgtactgtcgtatacaaagtctttcggccgtcataatataggtgcactgttcggtacaagtatgtcttcctaccattactccaatttggaagcggaagattataatctgctggtggtggatatagacaagggatatatagacacggccacagcgcccgaagaacagtccaaagtatggggtggggcggaagatcaccgtattgcatccatattcggacgtatcaattataattatgatgaaaagtatttgttcgaagcggtagtgagacgggacggttcgtcaaacttcagtcgtgaccaccagtatgctacattcccttcggtttctttgggttgggtgttgacccgtgagaagttcatggagaacagaccttcctggttggattttgccaagatacgtctgagctggggacagaacggtaacgaacgcatcggctcctttgcctatacaagtatgatgagtcagggtaagaatgcagtcataaatggaaaggtatatacgggcatgctgcccagtggctatgccaatgctgatttgaaatgggagacctccgaacagaccgacttgggtattgacttgcgtttcttcaacagtgcattgacattctctgccgactatttcgtgaagaagacgaaggacatgctgctttccatgccaattcctctttataccagttatggcagtatgacggtcaattcgggtacagtgaagaacgaaggtatcgagttcgaagcgtcctatcgctttaaggtgggtgaagtgaatctgggtatcaatggaaatgcttcttatgtgaagaataccgtaacagaccaaggccccgaccgcgtcggtctcaataatatcggtggtggtatgggcggtcaggtcagttggagagagaacgggcgtccgtacggcttcttctacggttacttgcatgatggcattttccagaatcagcaggagatagacagctatacttacgtagattctaacggaaagactcagttgatacaaccgaatgccaagcccggagatatccgttttaaagatttggacggtaaaaatggtcttaatggcgatgaccgtactatgataggtaagccgaatcccgactggacatatggatttacgctctctgccgattggaaggggctggatttcagtgcattctttcaaggaagtatcggaaacgatatttataaactgtacagacgttccaacgtgacttttggtaactacgacaaatcctggttgaaccgttggcacggtgaaggaacttccaattgggtaccacgtatcatagatggtgacaacaataactatcaggtttcaaacttctttgtagaagatggatcgtatatgcgtttgaaagtgttgcagataggttacagtctgcccggacagatgttgcagcgtgtcggcatcaaggggctgcgtttctttgtgcagggcgagaatctgtttacaatcaccaattatagcggttatgatcctgaagtgggaacacgtgatggatttgacgggggaacatatccgcaagcacgtacttatactatcggtgcgaatattacattttgattaacctaaaaattagatacaatgaataagatattaaaggtattggctttgggtgcgatggctttgtcgaccacagcttgttcagattttctggaagtgaatccgagaactcaggtgtcggaaaccgaattctataagacggaagacgatatgatgaagggcttgtatgccgtgatgaatgaaatgcagacccgtatgccggaggtttggtcttactcttctttgctgggtgatgagtccgaaaccggcggtggtatcggtgaggggtcttacaagacgaaatgggatacttttacctatgacgcgacttcttgtttcggtgcatggggatatggttcttggtggaatgagtgggattttggcttgttcaatggagtcattgctgccaatctgttgattgacaaattggctggatgcaacctcagtgcagactttgtcaattccatttctgccgaagcgcgcttttaccgtgccattttctattaccatctgtttatggggtatgagcaattcccgcttatcaaacattatctggcagccagtgaaatgtatagcgttgccaaaggaacccgtgaagaaatttatgagtttatgatgggtgacttggatgacgaagtgactaagtatctgccccagcgcagtgctacacagcagggacgcgtttgccgggatgctgccaagctgcttcgtgctaaaattattttgttccatcgtgatgagactaaatatcaggtggcattgaatgacatgaaagaaataatcaccagtggaagataccagttgaaccctgattatcaaagcttatgggtgaaagacggagaatggtgtgcggaatctatctttgaggtatgttatgccggcaataactccggtgaagggtttggtcttgcacgttctttgggtggtcgtaacattgttgacccgagaagtgccgagcagggcggcttgggcgaaggttatgggcagaataccatgccgagttccgtttacaacatgtttaaggaaggcgatacgcgccgagaaggaacagtcattgtctatgcggacgaagctaagaaagtggcagaaatggtggccaaaggtgaactgccggcaggaagtgctttccaagtcagtgaccagcaggaaaattacgaaggcctggggcactataagattcatccgagaaaggagacgacgtctacggtgaaccctacggataactattataactcttggcgtatttaccgttatgccgatgttttgctgctggctgtggagcttgatgtacgcatcaacggaactgccagtgccgatacgcaaggctggttcgaccaggtcagagaccgcgctttcaaagacaaagagcatcgtatcaacttggcgggaaagagcaagcaggagttgttggatattctttttgaagagcgtgggtatgagtttatggatgaaatgcagcgttggtttgacattctgcgtttcgataaaggaacagagattttaggtaacaaaggttggacggagaagttcaggtacttcccgattgaccagtcggaaatggatagggctaaaggtggcttgacacagaaccctggctggttataagtttagatcggttttctttctgaagagtccccggtatttccttttgaaatactggggatttttatgtgtaggcagtggcggtatctctcactaaagtttatttcggcaaaacatctgtcatgctgtcacgcgaagagattattcttttgattataagttaattaaagtgtgatggatacctgtgatagataaaaaacattacaaccatccatcacgctttccaatttttgtaaaagatggtatgcatacttgtttcgtgggtcgttgaaatagttataatcttagttctcagcatgaaacttttagtttcaagactaaatacgaaaagttttgacaagtaagactattggtttcaacaagaaaaaccaaaagtttctttcgataaaaccattcgtttcaaaggttaaaactcttggtttcgactataggaaactatcattccaacttgtcgggaccagcaagggtatctatatgaaacaaccgaaacagataccttttccttcgaaaagtatctgtttcggcataaaagtgttgtattttggagaagatttgaagaatactatcctattttattcttttgattactgttatgggagttgtttcatttgaggaacgggtcaccgttcttgtctttgctcactacccagcggaaagcattaaccaatagcaggttctgtgtaccgtcgataaactcttcgtcaccatgtcccatatttaggtaaatcattctgtaattcttgttggaccatacgatggggaagtcgccaaaattcactacatccttgatacccagtggatagttcttgggagatagggacaagagtacctctacgtccttgttctggcgggggctgggagtccattggtaccattcgctggcgggagccacgaatgatgcaggcagattcttggtaacgggatgttcttcgttgtcgacttcgaccaataccggctggggaggccagttgttgcaatagaacaccccaccaccaagaaacttaacgaaccagggccaatgcgtgtttttgtcgttgtaggctgctgcgtggaaacctacccaaccgcctccgttttccatgtattgctcaaaagcatcgcgttcggccttggtgttgggggatgtgttaagcatgataatgacattgtattctttcagtttctcgtatgggtattttgaaaaatcggtagtaatatccagaacaaagccgtcaccgtaattgagcttcttgaagaaagtggttgcttgttctgcaaattgtacgtgtgcttcttccgcatgttgcgtgtaataaatcaaggccttgaagcgaggagctttggcatagtttgccggataaccttcggggacttgtgcgtacgtcagcagggtgcaagccgtaaacaataaaataagcagatgtttcataatttgtaatttataagtattaattcttcattatctaatattccgcaatcagagacagccatttgcctgccgaggtaacccatacctctttataacaggcattgttggtttgcggccaataggggacatcgtcgttgcccagggtacggataccgacgggcatctctcctgtcatttctcccgaagagaaggtgttcagttgcggatagttgtgtccttctccataaatcaaggattgtccgaaaggattcttgcctacggtccagtacaactgttccagaccgatgttgagcagttccttgtccttcaggaagtttccgcagatggcggcggactttccgttggaaagatggatggcggtattgccgttgaaaatgttgaaccacacggggaaacgtttcatgtagtgctctttgtccagttgtactcctcgtttaatctgttccgtgtacagttccttggcattggcagggggaaacagatggagggcgtagaagttggtggtatccttatattcctctgcatggtaaacaccgcttggaatcataccgtagggatgggtatacttcatcattcctttcagatactctccatatagttgtatggaattcacccatttaggataatcggggtgctccttctgggtttcgcaaagcatcaccatggcctgcatatagacctgctcgcgcgactggtgtatgtaatgtacgatggatttgcgggatttgtcccggtagaagaatccgcgtgtcccgtctttgtctttcagcggttccgtgcgctggcagtcgagggtgtagcggatgtattcggcggcgatgtccgcataagaaggttttccggtcagcttgtataattggcttgccgaccaggagatggtagccatatactgacttttcgaagtgttgtaactgtgttcgtaaggctggacgaactggtcgaagccatcttttttgaacttctccatagcaaaagcgaaatcttcttcggccacgcgcaataggtattcctgcagcatcgggtcgttgtccagcgtcatggaggcgtaagcttcgtatccggcatagagaaagttgtcaaatgccatgttctgtacacgtacggaagatatgtcgtccaatgtattgaacacaccgtcttgccagataagcaatcccatgctgctggcgcggtaaccatcgccgtagcggttctttaggatgaactctactccccattccgcctcttcacgcaggcgggcggcgagggctgggttgatatttctttgtttattataggcttcgagcagagcaaaggtcacgtctcccgtctgcaaggtttgctgggacaagtctcctgcatcgtgccatccgccggagtaggagatgctgcgtccgtcatgtcgggacatgaggtctacgtggcaggtggaatgcttgccgggaaccggatgtccacagcgctggcagaagatgaagttcagcactttccattgtgaatcttcccaaagtctttctccaatccggaaggtgggagttagcgatgttccgaccttcagctgatactctccgggattattgaaggaggtgaaatcaataaggccaaattctccgagagtggttttctcttttcggatgtctccttcgtaagctatttctccggttggggtaagcagttggaagcgctttccggcgtctatggtgaggtttgtgttgatgagggcggttttggggtggttgacggcatagccggttgtcgagtaggagatttttccatcggcaggtatccatccgctgactttctcaggggctttcaccgtttgcagttgtagattgtccaggtagtagatagctgaatctcctgtagtccggtctttgcctttgagggctgtgctgaaggtgatggatatcaccttgtcgcgctgatactcgtctatttcgaggaagcattggttccactccttattaataaggttaatgaggtgtgaacccgaaggctgattatatcctttcttggcaggagtatctgcattgcgaaacgtgaggttcatgttgacgatgcgcgcgccgtcgcaatcgggatagatggagaatacgatgcggttgtacttctccagattggcgccgtctagatgataggtaacactgctgtttccgtaggtggcatagtctgggtcggaaggagagccggtcgcccttttcccggtgaatgtggggaattgcagtttgatgctgcctttgccggaaacggtcttttccgtactgaaggacatgcttcctgcgccggaatgactccatccctctgtacctgccgagcgggtgagaggagcgctttgcaagacctcctttttccatccgttggtttcgaaagagttttcaatatccagggggaggggttgatgtatcagtccgctttcgtggagttgtcgttccagtttggggtcttgggtcagacgtgtctgaccgtatgcggcaatactgccgagagataaaaggtataaaaataataatgtctttctcatgttgatgtcaacctttggtttcggttgcaatgttagccattattaggcagaaggaggtttgaaaactgccataaaagctttaaaagctatccgaagtagaggaaatatgaatttcggtagatgtataatccctatgatgtacgacttataatgccaaagaaaatactaaaatcgtattttcataacagaagaaaattgtaactttgctcgaagaagttacgaaaagagtgtaatttattgga

SEQ ID NO: 4487 - DNA, 661 bp, Unknown
  gut microbiota DNA sequence
tttagttagttatctactgcattatccttctgcgcgttgcgtaaccttcaaagaactcttcgtatgcaaaagtagctatttaattcgagattttgatataaactcccgttttttatcccctcattcataagaattttccgtaaaagcggtattgtccgtcggcacaccattgcccaaaacgagtttggaacaaacgtgtgccgactaccgcatagctggagaaaagggcattgcctcacgcctaaacgatgtttagacagatgaagcaatgcccctttcttttgcgcctatgccaagaggtgcttttacgggttttcaaatgatttttcttttttcgctgtctcttttgccggaagcggaaagtgaatgcagagtgtgtcagcctgccccatgaatgaaacaggcgcccacacacagccggacaaaccgggaagaatgattgttgccacccggctgaacaagttccgtcggatcggaaacaatcatacttcctttgttgtggtttgcccttttcacgcttccggtgatgtctttttccttttggtgattcttttttttacggattttcccctgaagtttttttctacacaatctgcctctgttttcgtttacctccattttgcgcctttcagtaagccgcatcagtcagtcattttcgttc

SEQ ID NO: 4488 - DNA, 66852 bp, Unknown
  gut microbiota DNA sequence
tatgcctctcggtcggatatgcgctgatagtgcttgatgatttgcgccttgatgttgtccaatgccagattgacgttccgtgcttcggcactcttgcctttggctcggttgcctttcgcatcccaaagggttttcgggatggtctgcttgcagctgaactgtgccacagtaccgttgattgtcactcgtcccatgatggggacaataccgtctttctccttgctgccgttcacgtagaacagcactttgaatgtacttcttgccatactcgttttttttgtttgcaaagttaaatatcaacgagttagaccttgatatgcaaatcggtgacaaacggtgcaatagcatctcccatatgttaaatcttactctttcacgggtaatgatttgcaaaccattcttcttcttaaatccgcttttctttgcgttttccgctttttcggcttgtcatcatttgacaccgtaacaactctgatattaagtcgtttagcgtcatttctcccgtttttcgaggttattccagagatttatagtaagtttgtacgaggaacgctccatcgcactaattgtaaaacggcagaaatgtgtaaactgacagaaaactcctcccgtgatgtacagatagcttttgccaatgaactctctctgatttgtgataaagcaggaatcaatgtctgggaattgattaacttggcgaacaagcatccccgtgtgaatatccttcaacctggttgtggtgttggaggacactgtatagcggttgatccttattttattacggctgaatttcctatggaatctaaaatcatatctaccgctcgtgaaatcaataactataaagcattctggtgtgcagagaaagtgcagaatgctatgttgaagtttgaattggaatatcatcgtaaacctaccattgccatgatgggattggcctttaaacccgatattgatgatttgcgtgaagctcctgccaagtatattactactaaagtgatgcaaagctgtaataatgcagatattttagtagtggaacctaatgtgcaggaacacaatgtatttaaacttacagattataaagaagcctatgagaaggctgatatcgtcgtttttctggttgctcattctgtatttaaatccctgccatataatgatcggaaagtaattcttgacttttgcggaatttacaagaaataataaatagcttatagcatgaagaagattatgttggttttcgggactcgtcccgaagccataaagatggctcctctggtgaaagaatttcagaaatatccggaggagttcaagacaatcgtatgtgttaccggtcagcatcgcgaaatgcttgatcaggtattgcatatatttgaaatcattcctgattatgatttgaatattatgaaaccaggacaggatttgtatgatgtgacagctcgtgttttgataggtatgcgtgatgttttgaaagaggtacagccagatgttgttttggttcatggtgatacaaccacttctacggcttcggcattggctgctttttatcagcagattccagtgggacatgtagaggcgggacttcgaactcataatatatatagcccttggccggaggagatgaatcgagtgataacagggcgtattgccagttatcatttctctccaactcctttgagtcgtcagaatctgttggatgaaggtgtaagggaatcagctataacagtgactggtaatacagtaatagatgcactttacatggttgtagataagataaagagtgataagaggcttgatgaagagctgaaaggcattttgaaaactgccggttatgacatcaaccgcttgttagatggaaaaaaattagtcttgataacaggtcatcgtcgtgaaaatttcggtgacggatttgtttctatgtgccgggctattcagactcttacaaagaaatatccaaatgttgattttgtctatccgatgcatttaaatcccaatgttcgtaaaccaatttatgaggtatttggcgaagatttatccaatttagggaatatgttcttcatagagcctttagagtatctttcttttgtttatctgatggagaaatccactatagttttgacagatagcggtggtattcaggaagaagctcccggacttgggaagccggtacttgtaatgcgtgatacgacagaacgtccggaagcgctggaagctggaacggtgaaattggtgggaacaaattatgataaaattgtaaaggaggtctctgctctattggataataaggcacattatgaggagatgagcaaggcggtgaatccttatggagacgggacggcatgtgttcgtattgtaaatattttagaatgaaataattctaattagaatattattgaaattgaatttttgcgtctgagagataatgtattatttgtataaatagataaaaatgaataaacaaatttacatagggatgactgctgatatcatgcatcccggcttgattaatataattaatgaggctacaaaatttggtgatgtaatagtagggcttctaacagataaagctattgctgaacacaaacgtttaccttatttgacttatgaacagcgtaaaaaaattgttgagaatatcaaaggggtttctaaagttgttcctcaagaagagtggagctatatcaataatttgaaacgtttgaaaccagattatataattcatggcgatgattggaagacgggagttctgtgtgaaatccgagaacaagtttatgatgtgatgaataaacaaggtgggacagtgatagaaataccttatacacaagggataaattcttcttcattaaatagagatattaagtctattggtactactcctgatgtgcgaatgaagactcttcgtcgtttgataaatgccaagtctatagtgcgtatattggaagctcatgatggcttatgtggcttaattatcgaaaacctggaaattcaaaaaggtgaccgtttggaggtttttgatggtatgtggtccagtagcttaacagactcaacgagcaaaggtaaacctgatattgaggctgtagatttaactactcgtcttcaggatttgaataatatattggaatgtactactaagcctattattttcgatggcgatacaggaggcaaaattgaacattttgtgtttacggttcgtactttagaacgtcatggaatttctgctgtaattatagaagataaaataggcttgaaaaaaaattcactttttggaaccgatgcaattcaaacgcaagatacaattgaaggtttttgtaacaaaattaaggcgggaaaagaagcgcaagtgaccaatgattttatgataattgctcgtattgagagttttatagccggtaaatctatgtgtgatgctcttgaacgcgcgtatgcttatgtagaggctggtgctgatggcataatgatccatagtaaaaataagtcaggtgaagatataaaagaattctgtataactttccgtcagaaatatgctcatgtccctattgttgttgttcccactacttacgaccatatttatgaaagtgaattgcatacgtggggggtaaatgtggttatctatgctaatcatatgcttcgtgctgcatatcctgcaatgctgcaggtggcaaaaactattttagagaatgagcgtgcgaaagaggtgcgtcctttgtgtatgcctattaaagaaatattggaacttattccaggaactaaataaatagattatatggtaaacgttgagaaagtatatcatgctcttttagcaaacggaattgatttttttacaggagttccagattcgctcttaaaagatatttgtgcgtatataacggatcatacttttaaggagcaacatgttatcgctgccaatgaaggtacagctgtcagtattgcagcaggacattatttagcctcaggaaatttgtctttggtttacatgcaaaattcgggaataggtaatgcggtaaatcctttgctttcacttgcagataaaaaggtttatagcttaccgataattttaatgattggttggcgtggagagcctggagtaaaagatgaaccacagcatgaaaaacaaggtgaagtgactttggacttgttgaatgcaatgcaaattccttttgtaattcttaatgcagaagaggataaagcattgaggcagatacatgatattattatttctgctaaagataaatccattcctcatgcaattataattcgaaaaaatatatttggaaaatataaacttctaaatgaacaaaaaaatgattgtcctttatcccgtgaagaagccctaaaattagttgttgattatttggaagctacagatttagtagtatctactacaggtaagttgtctcgtgaattgtttgaatatcgtgaagcagaaggagaggggcatgaatgcgattttcttactgtaggttcaatggggcatagctcttctattgctttaggtatagcacttgctaattcagagagaagagttttctgtttagatggtgatggcgcttttattatgcacatgggagctattggcaatattggctatttgtctcccaaaaactattttcatattctgttcaacaatggttcgcatgaatctgttggtggtcaacctacaataggttttcaattagatataccggctattgcaaaggcatgtggatatcgaactgttttttcgcttacgacaaaggatgagataaaggagattttgcagcaaacaaagataatggaaggaccggttttgatcgaattgaaagtaaaagttgcttctcgtgatgatttaggaaggcctacgactacgcctcttgaaaataagtttcattttatggagttcttaaaaaataaataagtatatgcagattaaaagaaatattttgttgaatccagggcctgctacgaccactgatactgtgaaaatggctcaggttgttcctgatatttgtcctcgtgagaaggagtttgtaggaatgatgaaaacattgcgaacaaatttgttaaaagttgcccatggtatacctggtaaacatactgctgttttgttttgtggctcaggtactattaatattgatgtttgcttgaactctttgttacctaaggataaaaaagtgctgattatcaataatggtgcttatagtgatcgtgctgtggaagtttgtcgatattatggtttatctcatattaatttgagattctcggtgtatgaacgtcctgatctgcatgagattgaatccatattaaaaaaggattctgatatctttttagtttatacaactcaccatgaaactggcactggtttgttgaatcctattcgtgagattggtgcacttgctcaccgttatggttgtgtatttataacagatacgacttcttccttaggtatgattccttttgatatagagaaagataatgttgatttttgtatggcttctgcccagaaaggattacaatcgatgacgggactttcttttatagttggcaatgaagagattatatgtaagtcaaaagaatatcctaaacgttcttattattgtaatctttatatgcaatatgaatattttgagaaaacgggtgaaatgcattttactcctcctgttcagacaatctatgctacttgccaagccttgaaagagtattttgaagagggcgaagagaataaatttgcacgacatcgaagggtgtttgatgcgattcattctggcatagaagaattaggttttaaatatgttattgataagcaatggcaatcagggctggttgtgtctgttctttatcctaatcatccaaattggaattttgacaaagtacataattattgttatgaacgtggttttaccatttatccgggaaaaataactacaacaaatacttttcgactttgtgcattaggagcaatagatgaatcggatattaagtcttttttttctgttttgaaagatgctttagaacattttaatatcaatgtattttattaaaaccatattggaatgataaagacagcagtaattatggcagcaggtatgggaactcgttttgggaaatatacagaacagattcctaaaggatttgttgaagtgtgtggtaaaccaatgatagaacgtagtattgaaactttaatatcttgtggaatagaacgtattgtaattggcacaggatataaacacgaagtttatgattttctaaaaaagaaatatcctatgattgaaacttgctttagtcctctttatgctgaaactaatagtatgtatacactttataatactcaaggacttataggtagtgatgatttcttattattagaatcggatttagtatttgaaacgaaggctattactgaattgatgaattgtggaaaacctgatgtcatgttagcaactcctattacaaaatttcaagaccaatattatgtggaatttgatacaaaacatcatctgacagcttgttctactcaaaaagagaatctgaatgtaaaaggtgaattggtaggaattcataaaatatctagcacttttttcaaagaaatgtgtaaagattatggccggattctttctgaacagcctaaacttggatatgaatatgaactacttcgtatttcaatgagtacattacctctctttgttttagttgtagagggattgaaatggtatgaaattgatgatctgatggatttagcttatgctgaaatattttttaaatagaatctttagaaggtccatagatgttactttgttgaatatagataactgttcatatttaacatgggtttgaaaattattcataatgttttggcaaaggggggattgacaatttttaatttaatacttcctttagctgttatgccttacatatatagggtgttggatcctcatgatttgggaatgatagaatatgcgacagctattgttacttatttttcaatatttggaatgttgggaatatataattatggcttacgtgaaatgagctcgattcgtaacaatttaaactcatgcgctttcttgtatagacaattatttacgattggagttctgtcaaatatattttcggcaacatgtctgttgctattgtcttttttcatggataaattagtaaaagatattgtttatatacaattactgctaattgtttctcagattttttatgtagaatgggttaatgaggcgtttgaaagatattctttcataacattgaagacgatactggtacgtggcctaggatatttgtctatatttggattagtaacatcatcgaatgattataagacatatgtttggatattgtctatcacagtttttattaattattttattagctatttatatgtaaaaaagaaattacctatagaatctgtacaagttgactggaattttataaaaaagataatatttgctttattcttgatattattattgaataatacaaatttgctttatacattattagaccgatttatgttggggcttaaaagtgatatatatgtggcatattatggtgtcgggcagaagctttcagacatgttaaaagcttttttaacaattgtagtagttgttactatacctagaatgtctctacaattaaatcaaaataaagaaagatatttggagaatataaatcatttgataagttttttatttttattaactttaccaattgcctctttatttttttgcttatcaaaagagattgttatattatttgctggtgaaaattatttagaggctattccatctttaaagatatttgcaatacgaattgtggttattgtcttggaagctgttttgtataatcaaataatatttttatatcgtcgtgagaaagatttactcaagttaaatgctttatgtggatgtcttaatttagggttaaatggtgttttatattcattcttgaatccctttctggcaatattgacaacattggtaagtgaacttgtttttcagatattgtgtatatattatataagaacaaaaataggattgtatattacttatgcaaagaaatcgcatttgttatatttattgttatctatattattccctttatggatttatgtaattcatttgtttttcacatcggcttttgtagtcatatttttttcttgttttttatctcttattacatatataataggactgtatttatttaaagataaaatgtttttattagcatgtgaaaaaattaaagatagtatatgctaatgactttgatgatttttttcttgaaattgataaattattgtattcctatgcgaaaaagaatatattttattccgcataataattgtgatacagataaatatgatataataaattatacatctgataatgtattgtctctttttaattatatactggaaagtggaaaatatactgaatatgagttgtgtgtagaaatagataataatagtaaaatttgtcaatatcaggagtattgtttgaaaaagaatattagtcaaaaagtctatttcttaacaaggctaaaacgacctctttggaataataaaatacgagaaattataaggaattatctgttcattttttcttcaatgtatgtatttgtagatactttttattacaatttctcttttaaaaagcataaacaaaaagtggtgtgcttaggttattatactccatttaaagatgattatcatttaggaaataagttttatgagaatattcgtaaaaaaatagacttatcgtttgattatcatatctctacatcaagtttatcttcgcggattatatcaatagattcaggcattcgctattccaaatttcttaatttgggctttcctagaaacgacaaccttttgaactttgaaaataagaaggttattttagagaaattgtctaatctcttgaaatgccaatttgaaaaaattgttttgtatacaccgacttttagggattatgaaaaaagtgttttaaaaaaaagaggattatttggatatgatgacgagttatttctttataagctatcccgtatattggagaaaaataatagtgtattattgatgaaattgcatccctttcaaaatgttaatgtattttcatcaatggagtttcataatatttttgtatggactcccatagattatttaggattatatgatataatggcagtgagcgatgtattaataacagattatacatctgcttattttgattttctattattagataaacctgttgttttcaatttttatgattttgaagaatatagtgaaacacgcggcttttcttttactccaataaaaaacttttgtgctggtacaatgatatattcatctgaagaattgttgaattatataaatgaagtattgataaaggggacagataattattgtgagaagaggcattatgtgaattctttttttaatgaatttatagataataagtcatcagagcgtatatgcaacaaaattctcttatgacatgatttattttattgttcttattttttctgtttattctttctcatttttatatgttcatggtaaaaagtcgtttgccaattatatttatgcaagtgtcttttgtataattttatggacaatagtgcaaggtggacaatataatgttggaacggattattttacttatttgtactattttgataatccatattctttatcttattttagcgataaaggagaatggggattttattttttaattaagttctgtcacaatataggtgtgacgggacaaggtgtttttgttgtaataacattgctggaatctgtacttttttttataatttgcatcaaatttgataaaaataatccagaaattttcatattgctttatattgtattgtcttctctttttcataatcaaatgaatgcagttaggcaatctattgctgtttactttgttacattatctattttatatttgatagataaacgttggaaagaatttgtgcttttaatcgtgattgcttttacatttcataatagtgtccttctatttatattattattgccttctttttttctaatatggaagcaatataaatcttcaacatatttattattgctaatattaagttctgtttttatatttttgccagtcgaaaatttagtaagagaacttactctattattaccgaattattcgcattatgcagaaagtgaatatttggctgaggtaccttttttagggaagataacaaaagttttccttcttcctatctatttgtatagcttagttgttctaaaatcaaattttttatcaactcgtgagtatcgcttatttgttgtggggattatagcatactctttaaaaaatatttgtttggtgtcttctgttactaatcgtatcggattttattttatgctattatctatatttccgatttattatttgcttcgatatttgcaaaaaacaagacaaactaaaaaagtgtatttagtatattgtatattgatattatcttattgtgtgaaagtattattgttccctaaaggtgaatatagttataactcaatttacaattttatttatagtttatgacaatcgaattgcttatttcctgtatgtatcagaacgatataagtattgtaacagaggataaacttcaatgtgatgttcttgttataaatcaatgtaataaggatgattattctgaatctatggttaatgggtatagagttagaatgatatcaacacgagaaagaggcttgtctgtaagtcgcaatatggcaataaataattctcaagcagatatatgtttaatttgtgatgatgatgaggttctgatgcctgattgcgcaaaaaatatattgcaagcatttgaaagacatcctaaagcagatataataacttttgcgttgaggtatggtgaaaagaaatttgcgaatattgaaaaagaagtaaaatacgtagaggcaatgaaaacgtcctctcttcaaatcgcatttaggagaaagaaaattcaaaagcatcggttgtctttcaatataaagatgggttctggaacaggaaatggaggaggggaagaaattaaatttctttttgattgtttgaaggctggtcttgttatttggtatgtacctattattatagcttctattcaagatggtagtaaatctcagtggtttaaaggatttacaagacaatatttttttaataaagggtggagtaataaaatgattctcggaaaattttgggcttgcatttatgctgcctattttactataactcattataataaatacaaaaatgattgtagcttttggctttcttttttatatcaaataaaaggcacttttcagagaaaataaaaggtagtagtgaatattaagtaataattataaaatgagagtactctattttcatcaacattttaccattcccacccaagcgggggggacacgttcttatgaattagcaaaacatctggttgccagaggtcattctgtttgcgtggtttgtggtgaaacggccaagctggatttgccgaacacaacgatgaaaaatgttcatagaggagtggtcgatggtatagatgtgattcagatagctttaccttactctaataaggatggtatcgccaaaagagcatggactttcgtgaagtttggatggaaaggtattcaaatagcattgaaagaagattatgatttgttgtttgcaacttctactcctttgacagctggtattccaggcatagtaatgaagttgttccggaagaaaaaatttatttttgaagttcgtgatttgtggcctgaattacctaaggccttaggtatgaagaatccttttttattgtgggggatgaatattttggagtggttgagttatcattgcgcggatgcttgtgttggtctttctcctggaatttgtgaaggaattaaaagaaggagccagccaggcaagcgtatttcgatgattccgaacgggtgtgatttggagatattcaagccatcttcacgtgataatctttcgttggagggcatttccgaaacagataaagtggcggtttttactggtgcacatggaattgccaatggtttggacgcagtgttggatgctgctgcagtgctgaaggcaaagcaacggacggatattgtgttggcatttataggagacggtaaaatgaaaccgcatttgatggaacgagctcgaaaagagcaattggataattgtcgtttttataatccgatgcctaagaaggaactaaataaagttgttgcatcagcagatttgggtttgatggtattagctgatgttccggctttttactatggaacttcacctaataagttttttgattatatatcttcaggattggctgtcttaaacaattatccaggttggcttgctgatatgattcaagaaaataagttagggattgttgttcctcctaaggatgcaaatgcttttgccgaaggcttgatttctttattggacgatgatacatacagaacagaatgcgggcagagggctagggcatttgcagaagctaatttctcaagaaaatcattagcggataagttcgtttcattcttggaggaagtaatttctttaaaatgaagatttttatcgtcttgttatcgaagaatagtttttttaaggatattagatacgacttcatattggtacataattattagagcatgtattctcattttcttaagagagtgattgacttccttctcgtgttttgcatattggctttgatttggccgatactgtttcttgtcgctttttggttgcattttgccaataagggctccggagtctttttcactcaggagcgtccaggaaaggatggaaagatttttaaagttatcaagtttaagaccatgaccgatgaacgggatgcagagggaaatttattgcctgatgctgtacgtttgacaaaagttggaagttttgtacgttctacttcgatcgatgagcttccacaactgattaatgtattgcaaggggatatggctttgataggtccccgtcctttattgcctcaatacttaccgctttatagtaaagaacaagctcgtcgtcatgaagtccgtccggggattacgggttgggcgcaagttaacgggcgcaatgctatcagttggtcaaagaaatttaaactggatgtgtggtatgtagatcattgttcttttctacttgatttgaaaattgtttttatgacaataagaaaggtatttataagggaaggtatcagctctgatacttcggctacaatggaagtctttactggaaataactaatatcaaaacatgtatttatatggtgccagtggtcatgccaaagtgatcattgatatattgcgtgcaaatcatgaaccgattgaagcgttgtttgatgataatgaggaaattcatagtctttttgactatcccgtattacgtccgtcgaaggtctgcggaccattgataatcagtattgggaataatggtattcgcaggaagattgccaaggagttaaaggttgaatatggcaaagcttttcatccttctgcaattatatctgaagaaactgagataagagaaggctcggtagttatgcagggggcaattgtgcagtcggatgcttgtattggcagccattgtattatcaataccggtgcttcggtggatcacgaatgtctgattgctgattatgtgcatatttctccccattgtacgctttgtggcaatgtgcaagttggcgaggggacatggattggtgccggcagtgttgttattccgggtgttaagatagggaagtggagtattataggtgccggttccgttgtaacaaaggatattccggatggtgtgttggctgtagggaataggtgtaagattatcaagaatatagttttgtaaattacgtaattttatggataagagaatatatctttgcctcgcccacatgagcggcaaggagataggcttcatacaagaagccttcgataccaactgggtagtacccctcggtcctaatgtgaatgccttcgagcaggatttggaacgcttcgtgggacaggataaaaaggtagtggccttgagtgcaggtacagcagcggtacacctggccctgctcgcttgcggagttggtcagggtgacgaagtgatagtacaaagctttaccttttgtgcctcttcccatccggtgacctacctcggtgctactccggtattcgtggattctgaggctgatacatggaacatggacccggtacttctggagcaggctatcagggaccgtatcgacaagacgggccgaaagcccaaagcgattgttccggtggctttgtatgggatgccctacaagacagaccaaatcatgtcagtggcagataaatatggtattccggtcatagaggatgccgccgaaggctttggaagcaagtttgacgggcaagtcctcggaacttttggcaaatacggcgtgctttccttcaatggcaacaagatgataaccaccagcggtggcggtgctttgatttgccctgatgaggagtctaagaaagagattatgttctatgctacccaggcccgtgagtcctatccctactaccagcatgaacgtataggctataattataggatgagtaatatttgtgcaggtatcggtcgcggccagatgacggtggtggatgagcacatagcgcaccataagcatctgtgcggtctgtatcgtaagttgttggccgatgtggagggaatcacgcttcatgagaatccttccggacgctacgacagcaactattggctgaacacggtactgcttgacgggaatctgcatgtgagaggtgaggaggacgcctactgtgagacagtgaaaggtgccgttggtggtgccgcgggtgttacgcatgagtcaatgagtgcccatacttcttgtgagcctaaccgtaatgtagaggccatgcgtgtttgtttggataaagccggtatcgagagccgtcccttatggaagcccatgcatctccagccggtttatgcggctaatcctgcctatgtgaatggtgtcagtgaggacttgttcgaacgtggtctttgcttgccgagcggtccttatgtgacggatgaggatgtgagatacatagtgaatgaaatgaaggagagtatactatgaaactacatagtatcaattttttatgaactaatttcagaaaacagcttcagtggggctgttttctttgtttataggcatatttgagatagttaccgagaagtcttccctgacttcgggggatgtccataatgtgatcctctgtgatagagagtcatagttgtgtgttgccactcttacttgaataaccgttctttggtggtgaataataaccaataaacgtttatcaattatggcagtagtagcttatttaagagtaagtacagaaaaacagtttttagagaatcagcgcgaggaaattatacgcttcgcggagaagaatggtttgagtatcgacagatggtacatggagacggtcagcggaaaagtgagtagcaaagagcgtaaactggcgggcttgttggaccggatgaaaccgggagactccttgattataacggagatttcacggcttagccggacactgctggagataatgaccattcttaactcctgcatcaaaaggggagtggtgctgtacagtaccaaagaggggtatgtgtttcagaatgacatcaacagcaaagtgctgggttttgcttttggactgatggccgagatagagcgtaatctgatttccatgcgcaccaaagaagccttggaacgacggaggaaagaaggaaaacatctgggcaggaagaaaggggacacacccaagatgaagatactctatgcgaacaagaggaaacttgtaagggagcaccaaagaggagagtcgtgtgccgaacttgcccggcagatgggagtgtcacggactacgatgttccgttttctgagacgttattgagcaattcggctaaacgaaggtgtcaaaggtgggattccttttgacacgcttcgtgtgggctacttattcggccgatacttctttctctttcttttccttccactctttcccgcgcttgtgcaggtttttcagctcgaatgacagcatgatacggaagaaacctataatcaggaatgcaaacgaaatcatgtacacggcgtaaagggcgcctactgccggttgccacaagatgatgagcgagcagatgacggcaagaataccgaaagcaacataccatccccagtctcttgtcccgtatcttttgaggtccatggcatagcctacggatgagaagccgcggaacatcagccagaaggcaatgatgaatggaatgacttccatgctgagcattgggtaggttatcaggtagaatcccagaatcatgtcgatgatacctccagccagataccatccccaactggatacccttctacggttacttactgcaaaggatatttccagcagaccgctgaacaacatggagacgctgaacagaatgctcaataccgcatacccgctgagaggggagaacatcaggcttatagccactattacataaagaataccaagaatgagtgaaatccaccaattctttacttcctgctgaagttcgtcaaaaatagttttcatgtgaatttaatttttaagtgattatcattaattcgtccgtagaataacagtttatccggaaaaaagtttcgggtgaactttttctgtatgtaatttgttatgtatacatataatttgataaaactatggctacaacaaaatttaaaggacaaccggtaaaggttatcggtgaatttataaaggtgggctctgttgcccccgatttcgaattggtaaaaacagatttgtcttcattctctttgaaggaactgaacgggaagaatgttattttgaatattttccccagccttgacactggtgtgtgcgctacttctgtacgtaagttcaacaaactggctgccggcctgcccgatacggtagtgttggcaatctccaaggatttgccttttgcacatgcacgtttctgtacaacggagggtattgagaatgtgattcctttgtctgatttccgtttttccgattttgatgaaaactacggggtacgcatggccgacggaccgcttgcaggtctactggcgcgttcggtagtggttatcggcaaagatggtaagattgcctatacggaattggtacctgaaattacgcaagaacctgactatgataaagctattgcagctgtaaagtagaaagtttggatttgggataagcaataaaaagcggtggacagaatttatcatgctgtccaccgcttttttattatcataccgttttcttttttatttcttcttcatgcctttatagatgaagaatgccacgatgagtacgccgatgccgataaatacataacctatctcatggctgtattccgttactttggcaagcagctgttcctcgttctcaatgccgggtactgtggacaagtaatagccgataaaagccaggatggaattccaaaggcctgcacccaaggtggtgtacagcaagaaagttcccagcttcatgcgtgccagaccggcagggatggatatcaactggcgaacagcaggtatcaggcggccgacaaaggttgatacggctccatgcttatcgaagtattcctccgcatgctgcactttggcttcgtcgatgaggcacatgtgcccgaaacggctgttggcaaacttgtaaatgatggggcgtcccagccattttgccagatagtagtttatcaatgctccgatatttgcccctatggttgcaaacaataccaccagatatatattcatgttgtcattgttggcggctttccaagcggcaggagggactacaacttccgaggggaagggaataaacgaactttcaatggccatcaataaagtgatggtccagtaattgaggtggtcgagacaccattggataaaggctactgattccatttgctagattagtggtatataattactattattgtaatgcattgaaaatattcttcatcactagggccagctcttcctgattatcttcttgtagtatctgctgtaatctatccaactcttccagcctgaacggatgttcgcacagctggttgtacttcatgaagttctctttgtctttgagcagcatatacagagaggtcagcctttcgttgataccttcaaagtccggctccatctctttgacatgttcaaaggccagcttggcatagctcagttgtcctatttccatgctacacatgcctatttcgtgccaggtatctgcatagggggcatactctaaggctttggcccatctcttcacacctttctcatactcaccttcttccatgtagatgcgtccctcaatcaggtacgggtctatctcttcgggtgccaggtcgtatgcttttttacaatactggtgtgctttgcgtttctttcccatcttgtgcaggcatagggctgcattggcataaagagaaggcaaggcgaagtcatggctgtcttcggccgttatggctttttccagatagtcgtatccttctttccactctcctttggaggttttgttcaggccgatgaaggtgttgatgaaaccgtgggagacgagatggaacttttcggcttgcaggtagttctccatggcactttcctcatttcccaattggaagaaggaatgtcctttcatcaggtaggcatcggcaaactcgtcatcggccaccgtggcatagtcgcatgcttcgattgctttgtcgaacatctgctggtcaaagtagcaacgggccagtccaaaccagtaaggagccgaatacggattcttgtcaatcagcttattgaagaagaaggtggctttttcaaacagtccctgggcatagtaacaatcgccggtgacggcaaggtaggcttcttcttcggcatatttttcgagtccgcgcgtcagccatgtcaatgctttttccgggaatcccatgtcgatgtacatataggatacatcaacgatattggccaggtcgtccttatcgtctatgctgtcgagtatcgcttctgcttcttcttctttgccttcgcccaacagtaggttggctttcagcactttcacttcggaagattcttcggcaatccgttccaatatatctttggcttgctctttatgctgggtgtcgaggaacaagtatgcctgttccaccaacagagccgtattatccggatgtattcccaagccatactctacgacctcggtagccatggcatatttatgatgcacggcataccagtctgcgaggtcggctaagtcgtctgcgtccagatagatggttctgttctctgctttggcagcttcatattgttctgccatttcttgcagttctttgtctcttccggacagcaggttttttttactcatattcttatttattgattttaccccaaacgtctttcagacctacagtacggttgaataccattttttctggcgtagaatctttgtcaacattaaaataaccgatacgttggaactgcaggtaggagaggggctgcatgccggcagcgtacttctcgatgtagcagcagggcagcacattcagggagtcggggttgatcatttctttcatggctgtcagtgcgtcgcagttcttcgcttcgcggatggcggcaagctcatcgcgcgggttctccactttccacagacggtcgtagagacgtacttctgcttcgaggcagtgggcacaacttacccaatggatggtgcctttcaccttacggttggctccgggcagaccgctcttggtatcggggtcatattcgcaatatacttcggtgatttcaccggcgtcgttcttcttgcagccggtacacttcacgatgtacgcgttcttcagacgtacctcttgtcccggtgtcatgcggaagtatttctttggggcatcttccatgaagtcgtcgcgctccatccagagttcgcggctgaattcgatgacgtggttgccttcttcgggatgctcggggttgttgacggcttccatctcttccacttgcccttcgggatagttagtgatgataagcttcaccggattcagtacggcagatacgcgggtggcgcggtcgttcaagtcctcgcgcacggcgctttccagcagggcgaattcattgagcgcatcgtaggttgtatatcctattttgtcgatgaacttatgaatggactccggagagtatcccctacggcggaaaccgcagatagtcggcatacgggggtcatcccaaccgtttaccaagccttccttgactagagtcagcaggttgcgcttgctcatcagcgtatagctgaggttcagtttgttgaactcatactgatgggggcggttatcgtcgaggtctttgccttccttcacccagtccacgaagaggtcgtagagcggacggtggggcacaaactccagtgtgcagagcgagtgtgtcacgccttcgaagaagtcgctttgcccgtgggcgaagtcgtacatcggataagccttccaagtggtgcccgtgcgatggtgcggatgcttcactacacggtagatgatagggtcgcggaagtgcatgttggggcttgccatgtctatcttggcgcggagcaccatggcaccttcctcaatctcgccgctgttcatcttctggaacaaatccagtgtttcttcgataggacggttgcggtagggactttccacaccgggctgggtgggagttcctttctgggcggcaatctgctcggaagtctgttcgtcgatgtatgccttgccctctttgatgaggcggatagcgaagtcccacaattgctggaaatagtcggaagcgtaatattcgttaccccatttgtagcccagccactggatgtcttccttgatggcttctacatattccacatcttctttggtgggattggtgtcatcgaaacgcaggttgcagacaccgccgtgtgcggcggcaataccgaaatcaaggcagatggccttggcgtgtccgatgtggaggtaaccgtttggttcgggcgggaagcgtgtctgtacttttcccccgtttttaccctctttcaaatcgttttctactatttgctcaatgaagttcaagctctttttttcgcttgtttcttcgctctttatttctgccataatgttactattttcgtatcgtggggacaaagatagggtaaaaaaatgaagaatgaagaatgaagaatgaagatttattctttatgtaccgggatatatccgctctctttgatgattttctgtcctgcggcagacaagatgaaatcgagcagaggggctacgaccgaggcgttttttcggttataataatagtatagcgggcgtactatcggataagtcttattgatggcattctccagcgtgggagcggcataatgctgcccgtcgtatgaaacggcgagtgtcttgatacgcggtgatacataggctagacccacatatccgatggctccgcgagtttggctgacggattggataatggctcccgtggcaggcatggagagactgctgctcatgtagttcttgtttttcagtacgctttccttgaagaactcgtaggtaccggaggaagtctcgcgggagtagactacgattttgcggtcgtctccgcccacttgctgccagttggtgactttgccccggaagatatcttccagttgttggcgggtcagttgtttcactgggttggaggggtggaccactacggcaagggcatcgtaggcgatgggaacttctgccaagtcttctctggcggctttggccttcatcttttcgctgaacttgatggcgcgggaagccatggcgatgtccgtggtctggtccagcagggctgaaataccgacaccggttccgccgccggtcacggtgacacgggcagaggggttcagggtcataaagcgttcggcggtctgctgcgctatggggagcacggtgtcgctgcctttgatgcgttgcgcctgcatgccggtggtggctgtcagtgcgaggagtagaagtaattctcttgtcttcataaaacacatgatgcaaattgggtaaacagataatgcaattggggcaaacacatgatgtaaaccgatggtatgcatcatgtaatctggctcaacgcatgatgcaaattaaggcaatggatattacaagtgtgttacatggggtgtactttaagtcgttgtaatggttttgtaacacgtttgaaacatttctttcaaacgttagtcacactaccttaacatccggtccgttcctttgcatacagaaatcaataggcaacatgaaaaagatttttgagaagattgtagaaggtatactggcttgtagcggctttgtgacgagtcttaccatcgtacttatcgtcgtgttcctcttttccgaagcgctaggcttgttcagcagcaaggtgatagaagaagggtatgtattggctttgaataaggagaatcgggtgggcgaactgactccggcacagataaaggatgtctttgatgaagagctgacaaactggaacgaagtgggaggggaggaccttcctatccgccttttccgtttggaggacatcacactgtattatacggaagagcagttgggcgcttcctacgaaaatgcaggtgcctgcattacggagctggtggagcgtacgcctggcattatagcctttgtaccgcagcagttcattgtccgtccggactcggtgcatctgctgaaagacaacaccatttcggtgaaggacgtctttgccggtgccgaatggtttcccacggcaacacctgctgcgcagttcggctttttgccgctcattacggggacgctgtgggtcagtctgtttgccatcctctttgcattgccgtttggtctgtcggtggcaatctatatgtcggaggtagccaattcccgggtaaggaatctgctgaagcccatcattgagttgctgagtggcataccgtcggtggtctacggctttttcggcttaattgtcattgtgccgtttttgcagcaggtgttcaacttgccggtaggcgagagcgggctggcgggcagtattgtgcttgccattatggcgttgcccaccatcataacggtgacagaagacgcgatgaggaattgtccccgcgccatgcgcgaagccagcttggcactgggagcatcgcaatggcaaactatatataaggtggtgattccttactccatttcgggcatcacctccggggtggtgttaggcatcggccgtgcggtgggcgagacgatggctgtgctgatggtgacaggcaacgccgccgtcattccccataccatcctggaaccgctgcgcaccattccggcaacgattgccgccgaactgggcgaggcgcctgccggcggacctcactacgaagcattgttcctgctgggtgttgtgctgttcttcatcagtttattgataaacttcacggtggaagcggtttcgccaagacgaaaataaaagaagatagatatggtcaatagaaagcatctttcgcaaaacgtggcattcggcttgttccgtctgttgagcctaagtgtggtggggattctttttgcaatcctcggcttcattatatataaaggtataggagttatcgattgggagttcctcactacggctcctaccaacggtatgactgccggcggaatccttcctgccattgtaggtacgttctgcttgatggcgggcagtgctttatttgcctttccggtgggagtgatgagcggtatttatatgaatgagtatgtgccgaaaggctgggtagtacgcttcatacggatgatgacgaataatctgagcggcatcccttccatcgtgttcggtctgttcggcatggcactgttcgtcaactatatggattttggagacagcatcctggcaggttcgttgacactgggcttgctgagtctgcctttggttatccgcaccacggaagaagcactgaaagccatccccgacagcatgcgcgaaggaagccgcgcgttgggagccaccaagctccagaccatctggcatgtcatcctgccgatgggaatgcccaatatcatcactggactgattctggcgctggggcgcgtttcgggcgagacggcacccatccttttcacctgtgccgcctacttcctgccgcaactgccgaccggtatcttcgaccagtgcatggcgcttccttatcacctctacgtcatctctaccagcggcaccgatatggaagcgcagcttcctattgcctacggcacggcactggtgctgatactcattatcctcctggtgaacctgctggcgaacgccctgcggaaatactttgagaagaagattaagacgaattgaaaacatatacaataggtatgaagaacaagatagaaacccgtgacgtgaacttctggtatggcgatttccatgccctgaaaggcatcagcatggacattgaggagaagtctgtgatagccttcatcggtccctcgggctgtggaaagtctaccttcctgcgcctgctgaaccgcatgaatgatttgattcccgacacccgtctgaccggcgagatacgcattgacggacaagacatctatggaaaaggagtgcaagtggatgaactccgcaagaacgtgggcatggtgttccagcgccccaatcctttcccaaaaagcatcttcgagaacgttgcctacggactccgtgtaaatggcatcaccgataacgctttcatccgtcagcgggtggaagaaaccctgaaaggcgccgccctttgggacgaggtgaaggacaagctgaaagtctccgcctacgccctctccggcggtcagcagcaacgtctctgcatagcccgtgccatggcggtgtctccttcggtcctgctgatggacgagccggcatccgccctcgaccccatctccactgccaaggtggaagagcttatccacgagttgaagaagcagtacaccatcgtcatcgttacccacaacatgcagcaggcagcgcgtgtcagtgataatacggctttcttctatatggggcggatggtggagtttggagatacccggaagatatttacgaatcccgacaaggtggaaacgcagaactacatcacgggacgcttcgggtagcggattgttccatacaagcaaaaataagttgtacaaaagtaatcttaaaatagaaacattatggtgaagtttatcgaatctgaactcgtcttgctgaaaaaggaaatagacgaaatgtggaccctggtatataatcagctcgaccgtgcaggtgatgccgtgcttacgctggaccgggagctagctcagcaggtattggtgcgcgaacgtcgcgtcaatgctttcgaactgaaaatagacagcgacgtggaggacatcattgccctttacaaccccgttgccatcgacctgcgttttgtgcttgccatgctcaaaatcaatacgaacctggagcgtctgggcgactttgcagaaggcatcgcccgctttgccctcaactgccatgaaccggcattggatactgagctggtcaagcaactccgccttgaagagatgatagcccaggtgctctccatgctcgagcttgccaagcaggcacttcaggaggagagccaggaattggctaccgctgtgtttgccaaggacaatatgctggacgaaatcaatgcggaggccactgccattcttgccgactacatcagccggcatccggagagtgcactctcttgtctgaatctggtgagcgtgttccgcaaattggagcgttccggcgaccacatcacgaatattgccgaagaaatagtgttctttatcgacgcaaaagtgttaaaacatagcgggcagacagatgaacactacttaaatgataagaaataaacaaaattttaggataatttcagtgtttcatggaaaatagccttatatttgtccattgaaaacgattgcaggtgtagaaaaatgctttgaaatgataataaacttaaatgatttctcaaaaagatgttataagacatgttttttaatttggttagtatcacgaaaagcgcctatatttgcatcgttatcctgaaaacaatctttttaccttaaaaaaaaactaatacctattgaaaactgaaaaaggaggctttgtgaaaagcttccttttttttgtacctatacgaagggctttttgtatctttgcgcatattaataataaatcgtgtataacctaaaagtatatagaaccatgttttccggaatagtagaagaatgtgccacattggtggcgatggtcaaagaccaggagaatgtacattttactttcaagtgttcattcgtcagtgaattaaaaatagaccagagtgtgtctcacaacggtgtttgccttacagtagtcagtctgacagatgatacctataccgtgacggccatgaaggaaacgctggaccgttccaatcttggcttgttgcaggtgggagatgaagtgaatgtggagcgtagtatgatgatgaacggccggctggatggccatatcgttcaaggacatgtggaccagactgccacttgcatcgatataaaggatgcggaaggaagctattactttactttccggtatgcttttgacaaggagatggcaaagcgcggctacatcacggtagacaaaggctcggtaactgtcaatggtgtcagcctgaccgtgtgcaatcccaccgacgatactttccaggtggccattattccttacacctttgagcataccaatttccatgctttcaaagtgggcagtgtggtgaatctggagttcgatatcattggtaagtacatcagccgcatgatacaatataaataaggtaacggcactatggacgatttcctgcaattagtggcatcccgtcagagtgaccgtgcctatgatatgactcgtgccgtggagcctgagaaatatcggtgatttactttttagacacagatgacgcagatgacgcggatttttttaatattccaatccgcgtcatccgcgtctaaaaaataatcaaaaagaaagctgatacggagtttccggaaagacttccgcgtgcttacaaatccttcagcagcaccttgcttgcattcttgtagtattcctcccgtgctttcagcaatgctccccattggctgttgaattcattttccttatcaattttgaaatcttctgagccatgtgtgtccagcttgtctagtaggagagccacattcattttgttgatgtccatggaaggctggtaagcgatgtcttcactcttttcatcggtcaccacttcatgtaggaggttgatttcctgtaattcataaagggtttcgtgtgtcagccggatgggaatctggcactcttcggatatctcttcggctgtatagggctgggcgtcttgttcaaagcgcttggctatgagagacattatcaggatggagataaaatcgcggtagcgccggctgatattgcgcgcatccttgtcgaagctgaagttccggatattctgtccggcgtaggtcagttcggcaccgaataggcagatggtccaggatacctgcaaccatagcagaaacatcggaagggcggcaaaactaccatagatggcattgtaacgggaaacccacaactggctgctgatgtaaaggaattggaatgcctggtgtgccgtacctgccagaataccggatatgagtgcgtgtttcagcttgacctttgtattcggcataaagacgtacagtgctgtaaacatgaaccaggtcagcacgaaggggatgaggcgcaccataaacttgccgacgggagccagcagggtaaagtcttcgaggttcttcaccatcgtactcatgaagatggaaagaccaccggacaccaccagcagaatgggcatcagcagaagcatagagaagtaatccgttattttgcggtacatgctgcgcgcctttttcacctgccagatgcggttgaaggtgatttccatattgttgattagattcaggactgtccacagcaacataatcagacccactccgatgaatattccactcttggtttgagacaaatacgaattcacgaattgcaggatgacttccgtggtttccgtaggaccgccgaaaccgttgacaatctggctttccatcagattatcgaatccgaaaccgcgggctatagcaaacaaaatggcaagaataggcacgatggcaagcagcgtactgtaagtcagcgccgaggctttgtttactatccggtctttggtgaagcggttgatgcaaagataaatcgtcttgatgatattgtatacggaaaaggtcgttcgtgtgacttcatcttccgtaatacgccagatgtcgtaggtgaggaatttccaaagggcagcaatacgcttgttcatgctattatctcgattatccattgtcaataaaaaagcagtcagtctgtaagccgggttctgttcttctgtttctgaaaaagcctaattaggaattatccattcttcattatccattctccattaaagaagtgtctgtcatttatctgagccgcatgtcaccatacaagctttagcggtctaccctccgacatggagcgagcaactctcataacgtcggtttacatgaccttacaactcccaagacgcacagcccttgtgtcgccacaagactggtaggctcttaccccaccttctcacccttaccgtagcccaagggcgacggcggttattttcttctacgttactctaccctcacggacagctttctgttaggaagtgggacgctctgtgttgcccggactttcctcatacgcacgaggcgcaagcgacagaccgaccaactgctttatagggtacaaagatacggaatattaatgaagaatgaagaatgaaggatgaagaatttgttgtgcagtgtgcggatgcagtacggatgaatccttcattcttcattctttacccttaattatcttaaaaacatgtatctatttcggaataaattcgtagctttgctattagtaataacccccaaatccttttggccaatgaaaaagttatcctctcttttttctttatttctgttaatcccgctttttgctgtcgcttcggaagtgggtgaccgtacaatacctgcagaagtggcgcaactcgctgacagtttgaaacaaaagtttgcaccggacaagcgcgtggctttgttcgatgtggattactctttctccggaaagaatgtgatgttgcgtggtgtcaccacttcggcagaggcaaagacggctttgctggatggtttggcaaagaaaggatatgcggtgatggattgtctgcaagtgcttccggatgaggccggacttgaaggcaagacgtatggcattgtcaatgtgtctgtgtgcaatcttcgggtagccccggatttctcttcagaaatgatgacgcaaggcttgatgggtatgccggtgcgggtgttgcagcgcgacggctggtaccgtatccagacaccggacaactacattgcatgggtacaccgagtaggcatacatcccgtcacgcgggaagagctgaccgcttggaacaatgcagagaaaatagtggtgacttcgcattatggctttgtctactcacagcccagccaggcatcgcagaccgtctctgatgttgctgcaggaaaccgcctgaagtgggaggggacaaaaggtgccttttataaggtggcttatcccgacggccgtcagggatatatctccaaatccatctccatgcctgagaagaaatggcgtgccaccttgaagcaggatgccgccagcattatagccacggcgcatagcatgatgggcatcccttatctttgggctggcacttcctccaaaggggtggattgtagcggcttcatgcgcaccgttcttttcatgcacgacatcatcattccgcgggatgcttcccagcaggcatacgtgggcgagcatatcgatatcgctcctgatttcagtaacctccagccgggcgatttgattttcttcgggcgcaaggcgacgccggaacgcaaggaacgtgtggtacatgtcggcatgtatatcggcaacaagcgtttcatccattcgcaaggcgatgtgcgcgtcaatagcttcagccccgacgacgagctgttcgatgaatacaacctcggtagactgttgttcgctacgcgcgtgttaccttatataaataaggaggcgtcgctcaatacaacggaaacgaatccattttattcaatgtaataatgtgctaatgtgccaatatgccaatgacctgcggcgtgacggtgcaaacataacgtagcatatacatagcgcagcccattggcacattagcccattagcatattggcacatttaatacacacacaattatgtcaaacagaagagatttcctgaaaaccgccgcttttgccgcactcggctcaggcatggcaatcaatcatgtatttgccggaggaaatgacgctccttccttgttcaacgtgaacagtagggcaggtgtaacccccaaaatgaaactgcgtttcttcccctatgaactgaaattgcgccatgtctttacagtggccacctactcgcgcactaccactcccgacgttcaagtcgagatagaatatgatggcattatcggttatggtgaagcctccatgcccccgtacctgcaacacgaactaggcacgatggacagtgtactggcttttctgaagaaggtgcaggatgttatcggccaattctcagacccctttcagctggaagatatactggcttatatagacagcctctcggcaggggattccgctgctaaaactgctgtggacatcgccttgcacgaccttgtgggcaaactgttgcaagccccttggtataagatatggggtttggacaagaaaaagactccctctacaactttcaccatcggtattgatacggccgacgtggtgcgtgaaaagacgaaagagtgtgccgaccggttcaatatccttaaagtgaaactggggcgggaaaacgacaaggaaatgatagagaccatccgttcggtgacggaccttccgattgccattgatgccaaccagggttggaaggacaaacatcatgcgctcgatatgatacattggctgcacgaaaaaggaattgtcatgatagagcaaccgatgcccaaggaacaactggacgatattgcatgggtcacccagcaaagcccgttgcccatatttgccgatgagtccattcagcgtctgaaggatgtggcaggcttgaagggtgcctttacgggcatcaacatcaagctgatgaagtgtaccggcatgcgcgaagcctggaagatggtgactttggcacgtgcattggacatgaaagtgatggtaggatgtatgaccgagacctcttgtgccattaccgctgcctcccaattctctccggcagtggactttgccgacttggacggtagtctgctgattgcgaacgaccgtttcaagggtatggaggttgtgaaaggtaagataacgttgcccgatttgccgggtattggagtggtgaagttatgagaaagctattgtataccgtcgctctgtttgtgatggcttctgcatgcagcacgaagcccgagagcaagccctacaattgggaggacgacctgcaccaacgtctgcttacggacttctgtatgacggaatcccaggtgaaggactatatccgcaagtatattcccgacgtgaccgatgagcagatgcgccagtgggaagcctccaaagctttggagtgtatgatgctggatggagagaaacgctatttccgcaatgccggacctaatctgtttcgtgtggactccacttgctatgacatcaagatagccaaggaaggtacttcaccgagtggcagcgagaaggtgaatatggagaacctgcccgaaatcatttctgctgtgaagaaagagggcaaggccattgttgcgccgaagcgcatgcgcgtcacctacacgttgaccgtggataccaatgccgtacctgccgggaaaatcatccgttgctggttgccctatccccgtcaggaccaggcccggcagcaggatgtcaagttcatttcggccagtgaaccgcaatacaccttttcgtcgcccgagtgccgtcacagtacattgtacatggagaaacgtgctgtcgaaggagaaccgaccgtattctccgaaacctttgagtttaccgccaacggcgaatggcataatctgaagccggaagacgtgcagccctatgatacgacgaccgccctttataaggaatatactgccgagcgtgagaagcatatcgtcttttccccgcgcttgcgcgaacttgctgccaaattgacagctggtgaaaccaacccctatctgaaagccaaacgtatcttccgttgggtgaacgacaacttcccgtgggcctctgcacgcgaatattccaccattgagaatatcccggaatatgtgttggataaccgtcacggagactgtggtcaagtcagcctgctgttcattacgctttgccgcatcagtggcattcccgcgcatttccagagcggcttcatgatgcatccccatgcatggaatctgcacgattgggcggaagtctactttgagggtgtgggttgggtgcctgtcgaccagtcattcggcattcctgcctttgcccgcaatgccgacgaagaatatttcttcctgggtggtatagactcttggcgcatgattgtgaacactgattacggcatgccgctacagcccgaaaagcagtatccccgcagcgagaccgtcgacttccagcgtggcgaggtggagtgggagggaggtaacctctacttcccgcagtgggactaccacatggacattgattacttgaattattaaggtgctatctgccttctaaaaacagatgatgcgttcagcccgaacacatcatctgtttggtataaacgcatcatctgtttaccccaaatgcatcatccgtttcggccgcaacgggtgatgcgtctttttatgccctatctgtcagttctttaacagtcagcaatcgtacataaatgctaatttgtcagtctttgccgttaaccgctgttaagccctaaatatcctctgttaaaagagaacaaaaaagagtgacaagcggaataactgaacgttttttgtcgttattttaacgtcgtaatgttaaacgaaacttgaatattaacaatttaaagaataggaagaatagtatgaaacagacaacaaaaaacatccttggagttgcggctatcgtgctcctgagctctggagtggctggattgaccacttataagatgctgaataaggaaaagcctgccgcattcagcgagttgttccaacagaaccccaataatctgctaccggcggctttccatgcaacggatgcccagcctgtggatttgacacaagcagcggagagttcgctccatgctgtagtgcatatacgtgtcactcagttgagtaagacccagacggtgcaagaacagccggatatttttgacttcttctttggagacggtcgtggacgccagcgccagatacagacccagccgcgtgtaggtttcggttcgggtgtcatcatctccaaagacggatatattgtgacgaacaatcacgtggtggaaggtgctgatgaaatcactgtgaaactgaatgacgaccgtgagctgaaaggacgcatcatcggtactgaccccagcacggacttggcattgattaagattgaaggggatgacttcccgacaattccggttggtgactccgaccagttgaaggtgggagaatgggtattggcagtaggtaatccgttcaacctgaactctaccgtaacagctggtatcgtcagtgcaaaagcccgttccattggctcttctgcctccaatggacaagctgcaaacatccagtctttcattcagacggatgctgccatcaaccaaggtaatagtggtggtgcgttggtgaatgccaaaggcgagctggttggtatcaatgccatgctttactcactcacgggtgcttattccggctatggttttgccatccctaccagcattatgacaaaggtggtagccgacttgaaacagtttggtaccgtgcagcgcgcgctccttggcatcaagggtagtgatttgagtacagacctgcagatggacgaacgctggaccgaagaactgaagaagaaggccgacgaacttggtgtgaaagagggtatctatgtggccgaagttgttgaaggtggttccgctgccggcatcttgaaggaaaatgatgtaatcatagcattgaacggcaagaagattcacaagttctcggatttgcaggaaatgctggcaaaacaccgtccgggcgacaaagtgaaggtaacggtggttcgtgacaagaaggaaaaggaattcgaaatcacgctgaagaatgagcaaggcactacgaaggtagtgaaggatgccggaatggaaatcttgggtgcagccttcaagcccgtatcttccgagctgaagaagcagttgaacctgggttacggtctggaagttaccggggttaccaatggcaagatggccgatgcaggtatccgcaagggcttcatcattctgaaagccaacggagtgccgatgaagacggtggacgatttggaaaaggcgatgaaagaggcaagaaagtctcctgagcaaggtttgttcatcaccggtatgttcccgtcaggaaaacgtgcaatgtatgccgttgatttgactcaagaataaaaaatagggatagttaggtaagaagattgtaatattagctaacaatagcgaaaaagggggtgtcggtacaatacataccggcatcctttttgttatataggataagatataaataaggtgaaaaagttgggatgaaattattgtaacaaaataatttgtcgtacctttgcaacccaaatctgtattataagaatgagacaacttaaaattacaaaaagtatcactaacagagagagcgcttctcttgacaagtatttgcaggaaatcggtcgcgaagacctcattactgttgaagaggaagtggagctcgctcagcgcatccgcaagggtgaccgtgttgcactggagaaattgacacgtgctaatctgcgtttcgttgtatctgtggccaagcagtaccaaaaccaaggtttgagtttgcccgacttgattaacgagggtaatttaggactgatcaaggctgccgaaaagttcgatgaaacacgtggtttcaagttcatcagttatgcagtatggtggatacgtcagtccattctgcaggctttggcagagcagtcgcgtattgtacgtcttccgttgaaccaggtaggttcgctgaataaaatcagcaaggccttctccaagttcgagcaggaaaacgaacgtcgtccgtctcctgaagagcttgccgatgaactggaaatccctgttgacaaaatctctgatacgctgaaggtgtccggccgtcacatttcggtggacgcaccttttgtagaaggagaggacaacagcttgctcgatgtactggtcaacgacgactcccctatggccgaccgctctttggtgaacgagtctcttgcgagggaaattgatagagctctttctacgttaaccgatagggaaaaagaaatcatacagatgtttttcggtatcggacagcaggaaatgacattagaggaaatcggcgacaaattcggcttgacccgtgagcgtgtgcgtcagattaaggaaaaggctattagaagactaagacaaagtaatcgtagtaaattgctcaaatcttatttgggataaataagaaatattagtttccgacaaatagaaggaattaaaaaccgtacgtctttagtaggcgtgcggttttttttatatctttgccccattgataattcataacttataactcataactcaatgaaatacgttcgtatactttgtgccgtagctttggtttttgcgttgtgctcggcttttacaatgaaagataaggaaaaggctgtatatgcttttggtgtggcggcttctttcaatgactccatcgtatattatacagacatccaggtattggacagcgtagagctggataagaatggattcttgcccaagcgtgatttatacacttaccagctcaagaactatctggagtacaatctgaagaagccggactatacttgtatgatttatttctctgaaaacaggaaaaagttggaaaaagaggctgtaaaggtaaaaggtaagtataagaagagtaagaatatggttttgcaggtggtgaagcctgaagctttcacatttgcaaaaccgcaggaataagatttcaagtatgaaaacaaaactatatcttctttttttcttcgttttccccttgttcatgtcggcgtgtcgtggtgatgacccgatacctgatcctccggttgatgggaaacgtactgtgctggtatatatggcagcggataatagtataaatccattggctagctttacggatggggatttggaggaattgaaagctgggatggcttcaattgataatacatctgatatgcatttattggtgtatatagatacgggatttcctcgtttgattgaaattgaaaataaaggtggtactgttgttgaaacaatagtcaaagaatacgaagatagaaattcgtgcggagtcgctgagacgcaagaggtattcaatgatgtgtttgggaattctttatataaagcggaaagttatggtttgatttattggtcgcatggggaaggatggatacctactccattgccttctactcgctggataggaaatgataagactggaggagggcattatatgaatattgaggacttgaagttagtattacagaacgctcctcattttgattttattatgtttgatgcttgctttatgcagtcggtggaagtcgcgtatgagttgcgtgattgttgcgattactatattggtttccctgctgagaatccaggtcctggtgctgcctatgatagaatgtttccatttatatttcagaaaggtgcagcggtagaaatggctattgggacttttgctgcttatgatgaaatttatactggaaaaataggaagtaatagcaattggacaatgggcactgctatagatgtgctgaaatcttctgagcttgagaacttagctgctgctacagcaaatgctttgtcgggagtgacagcagatagagaagttcttcggtcatcggtctttgattatgatcagcgtaaagtaggatcgtcttattatgtaggctattatgatttcgtagaaatgatggaaaaactcgttgtggatgaagttgccttggatgaatggaagcaagcatatgatgcagcttctgtctgttggaaaaaaacgccgatgatttattcgatgtctgttggtatgttctccatgaagcgggcaaatggggttagccattatataccttccactgccacttctgctgctgctcaagctgctaatgccgcttatcgttctaccttatggtatagtgctgtcggtcttgctcggcttggttggtaagcttataaaaacttgcatactgaacggattattataggtgtaaaaacttgtaataatccgtttttttatgcctattcttattaaaaatgagtcttttaataatattttcctttggaaattatgttttattgaaaataattattttctttgcatcgtcaaacttaaaaaacgaagaattatgaaatatgtaatcattggcggtgtagcaggtggagccacggcagccgcccgactgagaagagtggacgaaatggctgaaatccttttattggagaaaggcccttacatctcgtatgctaattgtggtttaccttattatataggtggagtgatagcagagcgcgagaagctgttggtacagacacccgaatctttcggcaagcgcttccgcattgatgtgcgtgtgcagaatgaagtaatcgccatccatcccaaaaacaagaccgttaccatacgcaatgtggaaggcaaggagtacgacgaaagctatgacaaacttttgctttctcccggtgccaaccccgtgaagccccccttggaaggcattaattccgaaggcatcttcacgttgcgcaatgtagaagataccgaccatatcaaggcttatatctcggacaagcaggtgaaacgcgccgtggtggtaggtgccggtttcatcggattggaaatggcggagaacctgcatcatgccggtgttcatgtgtctgtagtcgaaatgggtaatcaggtgatggcacctatcgacttctctatggcggcacctattcatcagcatctgttgcagaaaggcgtctctctctatctggaagaaggagtaacccatttcaagcgtacggacaacggaatcaccgtattcctgaaaagcggaaaggccattcctgccgatatggtgttactctccatcggtgtgcgtcctgccactgcattggcgcaacaagccggcttgaaactgggcgagatgggcggtatctgggtagacgaacacttggagacttccgaaaaagacatctatgctgtgggcgatgccatcgaatatcctcatccgctgaccggaaagccctggctcaattatctggcaaatcctgccaaccgccagggacgtatcgttgctgataatatggtgtttggcaatactgtttcctacgaaggagctatcggcacctccattgccaaagtattcgacatgacggtagcctctacgggccttgcagccaaacgcttgaagcagtggggcatggaatatcaaagctcggtgactcactcggcatctcatgccggttactatccggatgccctacctttgaccttgaaactgactttccatcccaaaaccggtaaactctatggtgcgcaatgtatcggttacgagggagtggacaagcgaatcgaccagatagccggactcatcaagcggggtggcacagtctacgatttgatggagacggagcacacgtatgcgcctcctttctcctcggccaaagaccccatcgctattggcggctatgtagcatcgaacattatcagcggtgcaatgcccgtcatctcttggcgcgagctggtggaagagaaggataaagtgatgctgatagatacccgtacgcccgaggaattctctttcggcaccattccgggagccgtcaatattccgttggacgaaatgcgcgagcatttggcagagatacctacagacaagccggtagtgcttttctgtgctgtgggtctgcgcggttatctgtccctgcgcatcctgatggggcgcggctatcgcaatgtgcgcaatctgataggtggttataagacctactccacggcaacagcacctctgccgtctccatctgctccggcaggcggcggctcttcttcttcggtagaggctgctactgatgatgttcctgcggatgcatcagtgtccaagaaggaaacgttgaagataaatgcttgcggtttgcaatgtccgggacctatcatgcaggtgaaaaaggcgatggatagcattgctgtgggcgagcgtgtggagattgtggcaaccgatgccggttttgcacgcgatgcttctgcctggtgtgatacgacgggaaataaattgatagagaagcatgacgagaaaggacgctatacggtagtcatcgagaaaggtgctccggcttgtacatctgcttccaatgtttccgtagccggggggaggggaaagacgctgattctgttcagtgacgacctggacaaagcgctggcaaccttcgtactagcaaacggagcagcggcaacgggacagaaagtaaccattttcttcaccttctggggactgaacgtcttgaagaaagtgcagaaacccagtgtgcagaaggacttcttcggcaagatgttcggcatgatgctgccgtccagctctttgaaactgaagttgtcgcagatgaatatgttcggcatgggcagccgcatgatgcgcttcttgatgaagcgcaagggagtggattctttggagtcgttgcgctcgcaggcattggcgcagggagtggaattcattgcttgccagatgtctatggatatgatgggcatccagcacgaagaacttctggatgaagtaaccatcggcggcgtggctacctatatggaacgtgcggacaaggcaaatgtgaacttatttatataggaggacaagatatggagactttatgtaaaatccgtgatgtttatcgggctattgccgagttcgaggtgcagtttacgcagatgtatgatttatcgctgaatgaaggaatgctgttgtgcacgctgctcaatactcctaagcttacctccagtgagatagccgaggcactgggtttgtctgcctccaacacttcaaaggtcattcgctctgtcgagggaaagaagctcattacccgtctgataggtaaggaagataagcgtcagatgcgtttttctcttacgacagaaggcaagaaccggatttcggatattaagaatgctactttcgaattgtcggagttgttgcagcaggtagttagcctcgtatagttttgtgtaaaagcgaattaatatcgtgtttgcaggaagttaatatcctgcggacacgatgtttgttttttgtaggacacgttattaacttcttgcacgacatgttgttagtatcgtgtattgcatgctataaattgtttgtatctgttcgtgtgtatttctatcttttattactgagaaatttactaagaatctttaataatgtctctttcgacaatttcttaactcttaatcaattcttttctctgttttaaaaatgaacttgattggaaaagccattctttatgaatcgcctatatactcagtcgtatttccgtaaaggaacacaagcttgataccaaagaaataaattgaaactttctatgtcaattgcctaatattattttactttgctgtcaaatagtaagcaatacagcgattgatatgcagaaattattgtctttgccgcctaatctggtgtcggcattctatgaactggaaaatgtggaccgtacggaatggttttgtacttccgacccggtgggaatgaaacttggctcgggtgggggaactacctggctcttgagagaatggcagaaggaacgggataggaagtatttggcggaggagcgtattccaacagaaaagtgcattccaacagaaaagtgcattccaacagagaaaagccttccagcagagaagcgtattctgctgcatgccggaggacaaagccgtcgtttaccgggatatgcaccgtcgggcaagatattgaccccgattccggtgtttcgctgggcgcgtggacaaaaactgggacagaatttattatcccttcaactcccactttacgaaaagataatggagcgggctcccgaaagactgcgtacgctgattgccagtggtgacgtatatatccgtgcggaaaagccgcttcaagagattcccgatgcagatgtggtgtgctatggactgtgggtagacccgttgctcgccacacatcatggtgtgtttatctcggaccggaatcaaccggaatccttggatttcatgcttcagaaaccctctctggaagaattggaaaacctctccaagacacatctctttttaatggatatcggcatctggctattgagcgaccgggccgttgacttgctgatgaaacgttcgcagaaggcagatggggctttggacgtggatacgccatattccgacttgaaatactatgacttgtatgctgactttggcttgtccttaggaaatcatccccgtattgaggatgaagagctgaacagcctctccgtcgccatattgcctttgcccggaggcgaattctaccattatggaacaagccgcgaactgttgtcttcaaccgtcaccttacagaataaggtctacgaccagcgccagattatgcaccggaagttgaagcccaatccggccatctttgtgcagaatgcagaagtgcatctcccccttactccgaagaacgacagtctttggattgaaaatagctttgttggggcttcttggcggctgggggcacggcagattatcacgggtgttcccaagaatgactggaggctgaccattccagacggtatctgcattgatatagttccgcttgccgaccagcgctgggcagtacgcccctatggttttgacgatacttttaagggggatattcgggatgaaaagacactgttccttggaatgtcgttttcggaatggctggctgaacgggaattgtcggtggaagacatcaccggcagaaaagaggacctgcaggctgctgccatcttcccggttgtggaagataaagagcagatggggacagtgcttcgatggatggtttccgaaccgggcttgacggaaggaaaggctgtctggctggaaagtcgtcggttgtccgccgacgaaatttcagcacaagccgacttgcgtctgctgtatgcacagcgggagagcttctgcaaaggaaactgggaagtgctggcacgcaaccatgcaaagagtgtattctatcaactcgacttgatggatgtggccggtgaattccataaattcggcattgacaagccggaagtgttgccgacagatgcctcgctgatgcagcgtatccataaccggatgctgcgtgcacagattgagaagctggacggaagggacttcaaggcagacgagcaggccgcattcaatttgttgcgcgaaggattgctgactgatttgtatgaacgcaagagcagtcctcgcctgaatgtgtatagtgaccagattgtatgggggcgtagccccgtacgcatagatatggcgggaggatggacggacactccgccttactccttgtttgccggtgggagtgtggtgaatattgccattgaactgaacgggcagccgcctttacaagtgtacatcaaaccttgcgcggagcatcgcatcgtgttgcgctccattgatatgggagccatggaggtggtgaatacttttgaggaattgcaatcctattgcatgataggttcccccttttccattcccaaagcagcattggcgctggccgggtttgttccggctttttcagaaacggcttatccttcgctggaaaaacaactggaagccttcggcacaggtatagagattacattgctttctgccatacctgcaggttccggtctgggcacaagctccattttggcttctactgtcttgggttcattgagtgacttttgcggactgatgtgggataagaacgaaatatgccgccgtacgcttgccctggaacagttgctgacgaccggtggcggttggcaagaccaatacggtggggtactgcaaggtatcaaactgttgcagacggaggctggatttgcccagcagccattggtacgctggttgcccgagcatttgtttacccatccggaataccgcgattgccatctgctgtattatacgggcattacgcgtacagccaagggcatccttgcagaaatagtacgctccatgttcctcaactcttccctgcacctggggttattagaagagatgaaagcacatgccttggatatggccgaagccattcaacggaatgacttcaagagtttcggaacactggtaggcaagacatggatgcagaagaaggcactggacagtggaacaaatcctcctgccgtagaggacatcatccgtcagataaaagactataccttaggatataaactgccgggagctggtgggggaggttatctgtatatggtggctaaggatccgcaggcagccctgcgcatccgtgagaccttgacgctgaatgtaccgaatccgagagccaggtttgtagaaatgtcactctcggataagggattccaggtgtcgcggagctgaaattcatcattcatgatgatacggccccccgttcagtatggtcatcgcccggtagagttgctccacaaagatgaggcgcaccatctgatgggaaaaggtcatgcgtgagagggacatcttctcgtgtgccgcttcgtacactttgggggagaatccgtaagggcctccgataataaataccagccgtttgttcacggtattcatcttgcgcttcatatagtctgcaaactctatggagcgcatttcttttccaccttcgtccagcagtacgaccacatctcccggctggagagctttcaatatcagttccccttccttttccttctgcacttccatggagagactcttggtgtttttcagttcggggatgacttccatctcgaatgagagataacgcttggtacgttgcacatagtcgttgatggctgttataaagtgttgttctacagttcgtcctacaacgagcagagtagttttcatactggttctgttttgattagcgcacaaatttagcatttttttattgtattttgagacaaatgcttacctttgcctatcataaatacttgtgaaaatgaaaaaacgggtaatctttttgttgaccggtctcttcatttggacgtctgtgctgctggctcagaatgttcccgagggagtgattggagccttcaaggaaggaaactctcaggagctcaacaagtatctgggtgacaaggtcgatttaatcattcagaataagtcgacccacgccgacaagcggacggcagagggcacaatggctgctttcttctccaaccacaaggtcggcagttttaatgtgaaccatcaggggaagcgcgatgagtccggtttcgtcatcggtaccttgatgaccgcaaatggaaactttcgggtgaattgtttcttcagaaaagtacagagcaaatatgtcatacatcaaataaggatagataaaacagatgaataaggaagaagaattgattgacaggctgatagacctggctttcgccgaagatataggcgatggagaccatacaaccctttcgtgcattcctgctacggcaatgggcaaatccaaactgttgataaaagaaccgggcatcctggccggtatcgagatagcaaaggaggtgttccgccgtttcgatcctaccatgaaggtggaagtgttcattaatgatggtacagccgtaaagccgggcgatgtggccatgattgtggaaggcaagatacagtctttgttgcaaacggagcgtctgatgctgaacatcatgcagcgcatgagtggcattgccaccatgacacataagtatgccgagcaactgaaaggtacgaatacccgtgtactcgatacccgcaagactactccgggcatgcgtatcctcgagaaaatggcagtgaaaatcggtggcggtgtaaaccaccgtatcggcttgttcgatatgattttgctgaaagacaaccatgtggactttgcgggaggcatcgacaaggccatcaaccgtgcgaaggaatattgcaagggaaaaggcaaggacctcaagatagaaatagaagtgcgcaacttcgacgaattgcagcaggtgctcgacctgggcggtgtagaccgtatcatgttcgacaactttacgccggcaatgacaaagaaggccgtagagatggtaggcggccgctatgaaacggaatcttccggcggcatcacgtttgatacgctccgcgactatgccgaatgcggtgtagactttatctcagtcggtgcgctgacccattctgtgaagggattggatatgagttttaaagcatgttgacaaaggcagaacgcgttattgcagaataataaggaaagcctctcataaagaatgctgcattaaggcagatttatgagaggctttctcttgataaccggtagagtaatggacccggaaaaacagatggtgtatttgggagaaacagatggtctgtttggggcagatagatgatgcgtttggctgtaacggatgatgtgtttcaatggataaatagcgtaggaaggtatgaaaaacataacatggaataaagtaaaaacaactgtcaaaggttggcaagtgggagactacatccggcagacttccattgtggtgattggtgtactgattacctttgccggtagtgagttggttactcaaaactccgagaagaaagatattcaagccaccatgtcgctgattagggatgaactgaaaagcaaccgggagaattatgagagtatcgtttcagagtttagagaggatgaacgtctttccagcttattggtggagcatgacttaaagcatcggacgataccagaagattcattgatacagttccgctttcttatggggcatatccgcagtttttattatagtcagaatgcattggatatacttaaaaactccatgttgatgcagaagatttcagataaagagctactgttgcagttgaccggaatctatgaggtattggatggatttagggcgactatgaatggctattacgatatgaaggacgaaattatggttcctttccatttggcattgactgacgaacagacggaccagataaatcgtggaggatatgaggcgtgggatatttacttgtaggacaggtcggtacggaactttgtcagggtagcgcggaactattttacgccggactatgtagaacgtgtgggaaaacgtatagacgaggcaatacaagcgcttgagaaaaagtatcatttagaatgaaaagatatgggaaagacaagctttaacaggttgaaccataagataaaaagctggcgcataggtgattatttccgtcagttcagtattgtggctgcgggcatcattgtcactttctggggaaacgaccggattaccgagaacgcccgccaaaaggaagtgcgtgctacgatgcagctgataacggaagagttggaatataataagcaggagctccgtaatataaagcacttgttggatattgacatacacatgagtctgctgttgaaggaacatgatatggatgtatccaagataccgacagatactctgtggaagtatggcaagcttttcaataatatggatgaattctcttataggacagatgcgctggatgtgctgaaaggttcttcattgatgcagtatataccggacaaacgtatgttgcaggatgtattgcagacttattttgagttgggcaggaaacagagggatgtcggtgattactatgcaacgaaaacagatgctcttatgagtgctgccatgtccagggagttggcgcatgtttttgatggtgacgacagtcttcgggaccaggccttgtttcttgtgcagtataagaaatttatcaattacgtcaacatggttcctggttttctgtattggcatgaatttgatgaattggatgaaaggctggccaagcagattcaagtattgaaagccaaatataagtaatctccgttctttaacatctttttatatttaattcagcagcattttcaaaaatgctgcgtctaactaacaaacgacgcgaagaggcgtccgtaaaacgagcactgacattggaaaatgagatagaactgattgagggctgccgggcaggaaaggattccgcccgaaaggaattatacaccctctactccaagcagatgctggcggtatgttaccgctatacgggcgatgtcgatgcggcccatgacgtattgcacgatggcttcatcaaaattttcacccacttcaccttccgtggcgaatgtgcattgggtacctgggtgacaagggtaatggtgacgcaggcgatagactacctgcggaaacagcaacgtttcagccaactggtggtgaatgaggaacaattgcccgacattccggatgaagcaggcattgccgaaaccggaggccgtatttccgaagaaatgctgatggcgttcgtggcggaacttcccgatggatgccgtactgtattcaacttatacgtctttgaggagaaatcgcacaaggaaatagccgaaatcctccacatcaaagagcattcgtctacctcgcagttgcatcgtgctaagtgtttgttgataaaaagaattaaagaatatactgaatatgagagaaaatgatgaaataaccggtttgttccgcagtcgtcttgccggcgcagagatgacagtgcgggaggacttctgggaagggttgcaacgtgacttgccgtcaccggttgccgcaaaaggcaggaggcagctttttctttctccgaggtttcaccgcgtagccgcagccgcctctgttgtatttgtactgggagctgcttctgccgctttctggtatttctctccgaaagaggaaatcaaggaggcctttacacaagtggcggccatgacgccggaaggtaacttgaacggggatgtggtgcaggaaagttttccctctatccatcaggccaaccccatggcacaaaagtccggtacacagcatcccgccaacggcattccggcaggattgacggcgcaggccgatgaggatgaatccatgtctgtccatgtttccatccggattacccaacgggtgtacggaaaccagcagcagccgggaaacggttattacagtaacggaactccggccggaaacgggaactaccattcaaatcctggccataaggatgctgatatagatagaatgctgccatcttctgaggaagaaccggcaaagtctgtggctgtatcgccatctaagccccgtaattgggcattgaaagcaggcatcggcacttcactgccgaaagggaatttccatatgccgttcacggccggggtaagcgtggaacgtcgtttgaacaagcatttctccttggaagccggtcttcagtataattgcttggatggtgaccatacgttgcatacgctgggagttccggtaaggctgaacatgatgctggccagtacgccgaaagtggatttctatgctatggtaggcggagcagccgagaaatgcattgcaggtgctccggacaatggcttcggagcagagccggtacagttgtcggttgctgccggagtaggggtacgctataaaatgaacgaccgttttgccttgtttgcagagccgtctgtatcccatcatttcgatacggactcgcagacgagaaccttgcgtacggaacgtcccaccaatctgaatctgttgtgcggtgtgcgcatgacttattaatcttaaataccatacaaatatgaagactctatacaataaattacatatattcgggcagactatgctgctcgtattctttactctttctgttctctctttgggctcttgcagcaaagaaacgttggactacaaccatccggatgtagacttgtttgtcaagcagttgaaggctggcaaatattctacccaaagtccggatggattgagtaacatgcccaagttcacttccgaagatatagaggaattgctgaagtatgccgaggacttgacggtcattccctctttccccctggctccggtatcctattcggcaggtggcaagctgcgtttgggcgaatgcatcctgtggacggtagagactatccgcctcgggaacaatgcttcgatgggatgcaagatggtacatacggatgcggagaattatgaaggtatctatttcctttcggacgaagaggtgctggatgccgcttcgcgctaccgccgctggtgggaaacccgtaagtatccacggactatgtggacgattgatccctgctatgacgaaccgctttgtggcagcggatatatgtggtggtgaaatgtttttagggattaagtaatcaaaactgtcaggtgaagatatctatacttgtttgggggctgctctgtgcagtagccttcccttgctatgcccaaaactggacccctcaggactcgttgaggctgaaccggttgctgaagggcgagggggaggtaaaactgaatccggaggtattgcaggaattggaaatgaacaattctctgggtactccgaaagcggtgatggacaagtcgtggatggattttgataattcattgcccgtcatgccgaaagcgcccgagaaaaaagtggtgcttaccttacgtccttatacagccaataccaaatataattgggaccccatttatcagaaaaaaatcaaggtagacaaggatacttggcgaggagatgaattctatgcgcttaagattctgatgattcctacgaactgggctaaacatccgtttgatgccggtccgcgtgagactgtggagcagattgaagcaaccggtttgcgttaccgggtgacggagcgggccaataatatggctgtgggcggttggcagggtgccagtggcggtggaatttccggtttagacctgatgacaccttttacccgtgagttttggaatttcaaaggccgcaagcgccgtgcccgtacgctggaagtattgaaggcgtatggagattcgataactgttttggaacaacagtaatttatcactttttgtcaaattttgaactttctttctcctcttcttgttttcattagtaaacctttaaaaaaagtaataatgaacagagtgacttctctatttggaataagatatccgataattcaaggtggtatggtgtggtgtagcggctggagacttgctgctgctgtaagcaatgcgggagggctgggcttgctcggcgcaggttcgatgcatcccgaaacgttgcgggagcatatcaggaaatgccgtgaggctacgcatcatgcttttggtgtgaatattcccttgatgtatccccagatagaagagataatgcagattgtggccgacgagggagtgaagattgtatttacatctgccggcagcccgaagaaatggactggttggttgcacgagcgtggcatcacggtggtgcatgttgtttcgtcctcgcgttttgccgtgaaggcagaagaggcgggtgtcgatgcaatagttgccgaaggcttcgaagccggtgggcacaatgggagggaggagactaccactctgtgtctgatacctgctgtacgtacagttactacacttccgctgattgctgccggtggcattgcaacgggtgaggccatgctggctgcccgggtgctgggtgcggaaggtgtacagattggtacacgctttgccttgacggcagagagttctgcaaacgaggtatttaaggattactgcttgcatttggaagaaggggatacccgtctgcttttgaagaaattggctccggtgcgtctggtgcgcaataactttcgcagcgccgtagaggctgctgaggctgtgggagcttcagaggaagaacttcgtatccttttagggcgtggccgtgccaaacgtggtatttttgaaggtgacttggaagaaggggaactggaaatagggcaggtatctgtcttgctgcatggaaagggagtgcagtctgtggcgtcggtcatgcaagagttggtggaggagagcagaagggcgtgggagagaatgcaggaattggatttctgactattcccgtcttctggtatcatataacactaaaaaaggaatattcccggtgatttcggggatattccttttttagttccaatttataaccttttatcctttggggatattggttgtgtcttttgccatatttccacttgtggcggaattacttgtgccattgttgctggtagtggcgctaccggtagccatatttgttgcgcttttaccggctgtctgcacagcgggttgctcttcccagtggaatggttcgaagctactgttcgggtcaacccaggacggttttttggaagcataaataatgaacggggcaatgactacaatcagtgcaccgatgatgagcacggagaaccatactgtgttgctgcctgttgaaatctggctgggtgggataaagctcagtacgaatgccagcaatgacccgcagaaaccaagtccaccgatgagccacatcaatccgttgccattcttgccgatacggaacggacggttcagcttcttcatcttataacgcagcacgatggctccggagaacatcagcatatacatgataagatagaggactacagtcagctgtgatagaatctggtagaaactctgtacggaaggcatgactacgaacagaaggctcagtacggttactgcaccgccttgtacataaaggatattcttctgtacgcccagcttgtttgtcttttggaagaacggaggcatgtagcctgcttttcctacggcaaagatacctttggacggaccagcaacccatgtcaatacacctgccagtacgccgaatgccaaagcgatggcaataatcggtgacagccaggaggcgcggatgtaatggaaatagttatcgaagcctacaagcagactctgtgtcagactgatgtctttggccgggatgatgatgcccagtgagaaagtaccgagcacgaagatgataaccgcaatggccgcaccgatgaacactgccttcggataattcttggagggattgttcacgtcttttacgtggataccgcccatttccataccggcatagaagaggaagatactggcagcaagtaccacgttgtcgaagttcgtcaagtcggggaagaagctgctgtggaagtccaggttggagtgtccaccggtggcaaggtagataatacccaggataatcagcagtgcggcagggataatagtcccgaccaggccgccgacctttgccactttacctacccagctcatgcccttcatggaaatgaacgtagctagccagtagatgatgaggacaacaacgagtgagtaatacttgttgttggccagtgacatgtcgtgtacgtcgttcatgccgatgaaagcaatggatacggcaccgaatgtcaatacggtaggataccagattgtactttcaatccattgtacccagatggcaaggaagcccagtttttttccgtaggcttcgcccacccagcggaacacaccgccttgcttgtcttgaaacatggcagccagttccgcggcgacaagtgacgtcggaatcagaaaaacaatggctgcaaataagtagtagaaggccgaactcattccgtacacggcctcggcaggaagtccacgtagggatactactgccgtcacattcatgattgccagggtaaatacacccagcttcactgtttgtttaatatttgccataagttaaggttttagatgaaaaatatattcaaaatcagcgtctataacaacacttggggagagttgttcccaacggataagtgaaagttcaggttttaactattcaggaagcgtcggctttgggcgcgggcttctgtgcaactttcttgtagaactcttctttttccttattgcgccgttcgaccaggctcgttacatacactgtaaagatagggaacatcatcatgcccagcgcagccagcagtacggacagtacccgtccggtgggagtgactgctatgatattggaacccaccgtcgtcacgtccataaatgcccaccataaggcgtctccatatcctttgactaaaggattgggaccatgctccatgacataaaaggccagactggaaaaatagacagtggccagcaacatggtaaggtaggaaacgaacagtcccgatgcgcggttgtacgtcagccaacccaccacgatagccatggcgtaaccaccccgcaccaatgggatgaaacgcagcatataggttatctcgggtgagaaagtccatcccatataggcaatgatgttttgatagggtatagctaccagcaggaaaatgaaatgcgtggccacgtagtgacccttcttctctgccaggaaccattccaatacaaaatctgccaggaacagggcacatatccacaactgtactttcatgtagaccgactgttcgtaaaaggggatccccttgaacgtgtcgacagagatgctgataactaaaaatagcgacagtatcaatataatgacatgcagtatgccatagatacctttttcccgcaatacaaattctgatagagccattttcatgatgaagtccattataaagtcataagttatgagttataagtcatttgctgattacggtgcctaccaacaaataactcataacctataactcataactaaaaagagaaacttattctgtaatcgttacgttatcaccgttgaacacacccaggccgagcttgttcatgatgaacttgattgccgattgggcctttacggagtttcccgcttcgtctaggggaggagcgaaggccgatactcccatgacaccgggcaatacggccattacaccaccgcctacaccgcttttggccggtatgccggcggtgtacatccagtcgccggaatgctcgtagaagcctacggtcgaaatcatcgacgtaattttcggtgccaggctggcttcgaacaccgtttgtttggtgacggggttcacaccgttattggcgatggttcctgcggcaatgcccagttgctgggccgtgatgccgagagaacactggcgggtatagaggtcgagtgccatatccggatcatcgtagatgcggttgtagtttttcagcagccaggcaatggagcggttgttgaagttggtagccgtttccgatttgtacagttcgtcgatgagttgtggggcagagccgcacagctcagtgacattctgtacaatggcatcccattttttgtcggagtttcccactggctgcaccatggaacaagcggaaatggcaccggcatttaccaatggagtggaagggtggtcgttttccagcaaaatggcgatgatggagttgaatggtagtcccgtggcatcggcacctatcatgtccagcactttctgtgcaccgtattggcgcaggataaggatggccgtgtgtaccttcgagacggactctataccgaaacgatagtctgtgtcacctatattgatggtctgcccgttcatcaggcagatgctgagtccgaatagtttggagtctatgttggcaaggtagggaatataatccgcattcttgcctcctgtgctgcccttcacctcattgtaggcttcttgggcaacctcctttatttgtgaaattgatattttcttttccataaacacgttgtgatgtacgattagacgatgtacgatttacgattgaaattactcctttaaacgtagtccgtatcaagagaaactctaatcgtacatcgtaaatcgtttaatcgtaaattaatttattttttatgagtacggcatccgtggttgaatattttggtttccaccggcaggttcttttcctgtgccatacgggtaggagtcgggtaatccagtttctccagctccgtgatggcattcttgatgtcacccagcagcatgtctgccatgtcgcggctgaatccttggcgaacaacgacgcgcattacgacgtagtcttccagctttgaaggcagtgtataggcgggtaccatccaaccgtgttgtgacagcttgtcctgcaggtcatacagagtccatttggcagctcttgcatattccggtttcaaataccagataaacagcgggttcacaacctcgtcggaatagtttacgaacggagccatcttgccgatttcgtcatggatatacttggcgatggtcagagagttgtactgtacttccttgtaaccctggaatcccaaacggatgaactggtaatattgacccagaatctgtgcggcaggacgggagaagttcaggcctacctgagtaatgttggcaccgaggtagtttacgctgaatgacatttcttcgggcagatattccttgcctttccagcaaacccagcccagacccggataaactagaccgaatttgtgtccgctgacgctgatggagagtacccacttcagacggaagtcccacttcttttcgggatagaggaacgggaggatgaaaccaccgctggcggcatctacgtggataggaatgtcgtagccggtcttcgcattgtaggcatcgagggctttgtcgagggcttcgacgtcatcgttcagtcctgtccatgtaacgccttggataggcacgatacagatggtgttctcatcacacatcttcaaggcttcttcggggtcgagcgtggtcttgtccagtgtcaaaggcacttcacgcatttcaatctgccacaattgggcgaatttttcccataccacctggaaaccagttgaaataacgaagtttggtttgtcgaacggtttgccttgcgcctgacgtttcttgcgccagcgcaaccaggctgccacaccacccagcatacatgcctccgaggaaccgatggcaagtgcgccggttttccaggtttctttttcaggagagttccagaggttggccacgatgttgatacatttaccgttcattacggcgatgcgcggatattcggtctcgtcaatgtagttgatgttgatggcttcgttcatcagcttggttgcatattcgtccatataggtagtgacgaatgtagccagattcaagcgaggctgcgtttgggcgaaggtctcgtctttcaccatctgataggcgatttccggggtagtaggtccgtcgggaatcttttctacgggtgagggttgtaacatacggtttgaaccgaatacttcagtttttgcatctccttttctgaaattcaaatcttccatattaataagttttttaaaggtttaggcggcggggcttttccccgtcgaatttcccacaacaacggggtttgcggatgaaagttccggggttttgcattatttggcgtttattaaagggcagcgtagtaaaatcttaaaaaacgaacattctgaaggtaggtttgttgttcccacattattcatttaattaatatactactatatgaaaatcaataccggaaggggtacaatcccccttatcacgcttgtcggcatttggtcagtctctgcattgacttccttgccgggattggccgtatcacctattttgggacagcttactaccatttttccatatgccacagaactggatatacagatgcttacctccctgccttcgctgctgataattccttttgtgctattggcgggcaagctggccgagaaacgtgactttgtgcgtctgctgaaagtgggactttggatgtttgccgccagtggggtactttatcttttttcggacaaaatgtggcagttgatggtggtcagcgctttgcttggcatcggatcgggggtgattattccgttgtccaccggtctggtttcacgctatttcacgggggaatatcgggtgaagcagtttggttacagttctgccatcaccaatgtgacgctggttgtggcaacggcggtgactgggtatctggcagaggtaaactggcacttgcctttcgtggtatatctgcttccgttgatttctctgctgcttgtcgggtatttgaagggggataccggtcagccgcagatagcagaagatacagctaccgttgttccggaggaatccaagcgtgcggttcccggtaaatacggcatccatgtccgccatctgctacagttgatgctgttttatggcgtcactacgtatgtagtgctggcggttacttttgacttgccttttttgatggaggcccatcacttctccagcggaaattccggattgatgatttccttattctttcttgccattatggctccgggtttcttcctggggcatatcgtgaagtggatggggaaacacacaaagttctacagccttttgtccattgcagcgggtttgctcttgatatggatttcgcctaaagaatggctgataataccgggatgtatgttggttggtttgggatatggtgttattcaaccgctgatttatgacgagacagtagatacggccataccggaaaaaacgaccttggcactggcctttgtaatggtgatgaattatctggcgattctattgtccccgttcattgcagacttttttcagaccttgttccacactaattccaaggaatttccgtttattttcaacctctgcatcacactgctcgctatgtggtgggagtatgcgaggaagaaggattctttgttgggggggagttatgagtgatgagtgatttgttggtaattgtgctgcgctaccatgctgaaaggaaaataccaacaaatcactcatcacttataacttataactcaatcgcctcatatttcagcccgaagacgtcggctacagctttgtatgttactttgccttccactacgttcaatccttgcgccagagccgggtcgtccttgcaggcttgtctccagcctttgcatgccaaggaaacagtgtagggcagggtggcatttgtcagtgccatggtggaggtgaagggtacggcgccggggatattggcaacggcgtagtgcacaattccatccacaatgtaggtaggatcgctgtgcgtagtgggatgggaggtctcgaaacaaccgccctggtcgatggctacgtccacgagtacggtgccgggtttcatcatcttcagcatttcgcgggtgatgagatgcggggccttgtcaccggggatgaggacggaacctactaccatgtcgatgttcggcaattccatcttgatgttatgggtggaagaatagagtgtctttacgtttttcggcatcacttcgctcaggtaacgcaggcgagggaggttgatgtctgcaatcagcacctcggcacccattccggcagctatctgtgcggcattggtgcccacgataccacctccaaggataagtacgcgtgcgggacgtacgcccgttactccgcccatcagttttcccttgccgccttgtggcttttcaaggaagcgggctcctacttgggtagccatacgtcctgccacctcgctcatgggggtaagcagcggaagtgaacggtcttctttttccacggtttcgtaggcgatgcagacggcaccactttcaatcatggcttcggtcagcaatttatcggctgcaaagtggaaataggtaaataccacttgtccctttttaatcagtttgtactccggtgtaataggttcctttaccttgacaatcatgtcggctgcggcatacgtgtcttcaatggtcggtaaagtctttgcacctacggcgatgtagtcatcgtcggagaaaccgctgtttgcgcctgccgtggcctgcacatacaccgtatgacctttttttaccaactcggctactccggcaggggtcatgcccacgcggttctcgttgttcttgatttctttaggtactccgataatcataaccttaaagttttaattggggggttaaacatggcgcaatatagcgatttcccggcttgggtgttatcggtgcatctatgttcttcaacagaatttttatgcatgttttaatcaatgataattgcacctttctgtaggtagagagaactattctttttatatttgcatgcatttaaaataatattgactgtacaaaatatgaaatattctatatttttctctcttttgttctttattggtagtgtgcaaagcggctatgcccaagaaaccgatacagacaagccctccttcaccccgccttttgattttcccatcaccttctccggtaacttcggcgagatacgtgccaaccattttcatggcggactggacttcaagaccggtggcaccataggcaagccggtacgcgctctggccgacggatatatttcgcgtatccgcgttacccacggttcgggctatgtgctcgatgtggcttatgacaatggttattcgacgataaaccgccatttgagtgcctttgtgggcgatgtggcccgccgggttgaagacttgcagtacgagaaagaaagttgggaggtggaaattactcccgaacccgatgaatatcccgtgaaggccggtcagataatagctttgagcggaaacaccggatactcttttggtccgcacctgcatctggatatgatagagacggctacggacgaatatatcgacccgctgcctttcttcatgaacaaggtgaaagacaagactgccccgcgtgccgaaggtatcatgctgtttccacagccgggaaaaggagtggtggagggcaagcagacgcgacgggcttttccggcacatccaacgaaacccattaccgcctggggactgattggtgcaggcatccgtgcctacgactatatggacggagtgcagaataaatatggcgtgaagacggtgattctcgaagtggacggtgaggaagtcttccgcagtacgatagaccgctttgcctatgaggagaaccgctatatcaattcgtggacacacggtcagtacatgaagtcttttatagagccgggcaaccgccttcgcatgctgcaggcatccaacggcaatcgcggactggtggaaatcaacgaagaacgcccttaccgatttgtctatacactgagcgatgcgctgggaaatacctctaaagtccgctttacagtccaggggcagaagacgacaattgctccggtggaacatcgtgagaaatatgccctcaaatgggacaaggtgaactatctgcaggagccggggctggagttggttatcccgaaaggaatgctctacgatgacgtcttgctgaactactccgtgcgggctgatagtggcgacatcgctttcacctatcaactgaacgatacccgtattcctatgcacaatgcctgcgatttgcgtatcggcttgcgccggcgtccggtagaggatgtgaccaaatattatgtggcgggcgtaacggcgcgcggtggaaaataccgcatcggcggtaagtatgaggatggtgtcatgaaagtgcgtatacgggatttggggacttataccgtggcggtggatacggttccgccggtgataactcccgtgaaccaagcccaatggggacgtacgggaaaaatcatcttcaaggccaaggacaaggaaaccggcatcaatacctatcggggtacgattgacgggaagtatgccttgtttggaaagcccaattccatcagtggtaacctggtgtgcgagctcgacccgaaacatgtggagaaaggcggcaagcatgtggtggagatgacggtgacggatggttgtggcaaccgtaccaccggacagtttgaatttgtatggtaaatactgaaatatttagtaacattataatttagaagtatgaaaagtaaaagactgactctttccgtcttgtttgttgtggcagccgtggcgaatgcgctggcctgcaccaatcttatcgtgggcaagaacgcttctgcggacggttctaccattgtttcctattctgccgattcttatggtttgttcggcgagttatatcattatcctgccggtatgcacaagaaaggtacgctgattgacatacacgagtgggacaccggcaaatacctcgggcagatagagcaggcccgccagacgtacaatgtcatcggcaatatgaatgagttccagctcactatcggtgagacgacattcggcggacgtcccgagctggtggataccaccggcatcatcgactatggcagcctgatttacctcggtctgcaacgctcacgcaccgcccgcgaggccattaaggtgatgacggagttggtgcaggaatacggctattacagcagtggcgagtcctttaccattgccgaccccaacgaaatatggattatggagatgattggcaagggacccggtgtgcgcggtgccgtatgggtggctgtccgcgtgcccgatgattgtatctctgctcatgccaaccagagccgcattcatcagttcaacatgaacgacaaggagaactgtatgtactccgccgacgtcatctcctttgcacgcgagaagggctattttgacggtgtgaacaaggatttcagctttgccgatgcctacgctccgctcgatttcggtgcccgtcgctattgcgaggcccgtgtatggagctatttcaatatgtttaccgaccgtggcaacgagttcctgccttatatattaggtgagacgaacactccgatgcctctgtttgtgaagcccaaccgcaaggtttccgtgcaggatgtgaagaacgccatgcgcgaccattatgaaggtactcctctcgacatcagcaaagatttcggcgcaggcccgtatcataccccgtaccgcctttccccgctttctttcaaggtgggtgaccaggaatacttcaatgaacgtcccatctccacccagcagagcggtttcgtattcgtggcacagatgcgctccgagttgcccgatcctatcggtggagtattgtggttcggcacagatgatgccaacatgacggtatttacgcccgtatactgctgtacggacaaggttcccgtatgctacacccgtgtggacggcgccgattacatcactttctcctggaactccgctttctggattttcaactgggtggccaatatggtttatccccgttatgacttgatgatgggcgacgtgcgtgccactcagacagagttggagacaaccttcaacgaagcgcaggaaggcgttgaggctgctgctgccaaactactggaaaaagaccctgccaaagcaaaggcattccttaccaactatacgaacatgactgcccaaagcactttcgatacttggaaacgtcttggcgagtttcttgtcgtaaagtataatgacggcgttgtcaaacgtatgaaaaacggtcaattcgaacgtaattccatcggccagccggcaggcgtaatccgcccgggatacccgaaggagttccttgaagagtatgttaagcagacgggagacagatataaaatgcctgaataaaattaggatatttgaacttattcttctacatttgtgtcttacaaaaaagtttatattaacccttaaaacaataacagtcttatggaaaatcaggaactgattaagcaggtgactgagaaagccgaaaaatggcttaccccggcatatgatgccgaaactcaggcagaagtgaaacgcatgttggaaaatccagataaaaccgaattgatagacagtttttacaaagacctggagtttggaacgggtggtctgcgtggcatcatgggtgccggtacaaaccgcatgaacatctacaccgtaggtgccgcaacacagggcttgtccaactatctgaacaaatgttttgccggaaagaaggatatttccgttgttgtggggcacgactgccgcaacaatagcgacaagttcgcaaagatttctgccgacatcttctctgcaaacggcatcaaggtatatctttttgatgaccttcgtcctacgcccgaagtttcatttgccattcgccacttcggctgccagagcggtatcaacattacagccagccacaaccccagagaatacaacggctacaaagcttattgggatgacggtgcgcaggtgctcgctccgcacgacacggccatcatagacgaggtgaacaaggtgacggtggccgacatcaagttcaacggcaacaaggacttgattcagattatcggcaaggaagtggataaggtttatctggaaatggttcactccatctctatcgaccccgaagtcatccgtcgccagaaagacctcagcattgtgtatactccgcttcatggcgcaggccgcgtgcttattccggactcattgaaggagtggggatttgagaatatcaactgcgtgcccgaacagatggtgaaggacggcaatttcccgacagtggtttctccgaatcccgaaaatgccgaagccctttccatggccattgcgctggctaagaagattgacgctgacatcgtaatggcaagtgacccggatgccgaccgtgtcggtatggcctgcaaggacgataagggcgagtgggtgcttatcaatggtaaccagacttgtctcatcttcttgtactacatcatcaagaaccgtattgcaatgggtaagatgcagccgaacgacttcatcgtgaagaccatcgtgaccaccgaactcatcaaggctgtggcagacaagaacaagattgaaatgcgcgactgctacaccggcttcaagtggattgcccgcgaaatccgtctgagtgaaggtaagcagcagtatatcggtggtggtgaagaaagctatggcttcctggccgaagactttgtccgtgataaagacgcggtttctgcctgctctttgctggccgaaatctgtgcttgggccaaagaccagggcaagacactctatgacgtattgatggaaatctatgtagaatatggattctctaaggaaaccaccgtgaacgtggtgaaacccggtaagagtggtgccgaggaaatcaaggcgatgatggataacttccgtgccaatcctccgaaggaaatcggtggttcggctgtcagcctgattaaggattacaagacgctggaactgactgatgcccagggcaacgtaagcaagctggatatgcccgagacttccaatgtacttcaatatttcactgtagacggcacgaagatttctgtccgtccttccggtacggaaccgaagattaagttctatatcgaggtgaagggcgagatgggttgtccgaaatgctataccagcgccgatgccgaagctgagaagaaagtggaggcagtgcgcaagtcactcggcatttgataggaaagaggaaaaaatgtgtatatagtgttcggagaggcgtaacccgtgagggctgcgcctcttccttttgcttctgtgttgaaagaaaacttaaataaagacttaaacccgatggttgatgaacaaaacgtttgcagggaagtttagtatatgcagattgcggttacacaccgattggttgatgtgaatgagagtcgtttcattcgtagttgttcgtttgtgagtgtgtgttttccgcaatttgcttttttaaatttcttcccccctctttttaattctttaatttttaattgttctccatccaccagtctatcagccttcttgcgatactcagctttcgtggaatttcgggcaggttgtctttggaatagaaggcggcagcggtcagctcatcttcctgcagttttatctccccgctttcgtagtcggcaatgaaacccaccatcaatccgctggggtagggccagggctggttgctgaagtaggtgatgttctttaccttcagccccgtttcctcaaaaacttcccgttccacacattcttccagtgtctcgccggcttcgaggaagcctgccaccagtccgtagaaggttcctcggaagttccgggcatgcaccagcaggatttcgtttcctttgcgtatcagtacgatgatggcggtggaaacgggagggtacatctcattgccgcagttgggacacttcttcatgatgggggtctggtgctccatggcggtgccacacacggggcagaagtggctgtgctcgtcccaatagagtatctggaaggcctttcctgcagaacggtactcgtccggcgagatgtagtcgtacgatgcgcgcaggcctatcatgacccattcgtcggtttcggtcacgggctgttccaaggcaaatgcacgtacttgcttgccgttgggggggaacacttcgtgtatattacttccggcttccggtgtcagaggaggctctatactgacgggtacgctgtattttatttctcctttgtctgtatatccttttttcagcagcagttggtctttgaagaagacgaaccactgcgtgcagggttggggttctgttgatttttccattgtttgttgttttattatttttggggggatgaacacgaaaatacaaaggcacagagattcttttcaaagagataaagcattaatttctatgtctctgtgtctctgtgcttgcccccctaaatttcgtttgctgtgtctttttcttgtcgcacatagaccgttgaccttcccattccgcggcggcgcaggaacccttgccggatgaagttgtttagttcgtctatggcggcatgtctggttagtccgcttagctggatgtattcgttcttgttgatacatacattctgcttgaggaacagttccagttcggcttttcttgtttcttcggtggtctctactacttttttcgatttcttggtagtggagtgtacacgttccaacgtcattttcttcttgatgttgttgcggaacgtgctgctgatgcgcaggtgtacgttttggaattggacggattcggagcggattttctttttctcgtcgtcggtctcgcgcaagcatttcagtgaagtgctgaagaatccgagttctcccagctccacgatgtttccgttggccagcaaatcgcacaactcgtcaatgcaggcatccaatgctgcccctatcacattcttgggcagatgttggaaagttgcgatatgttccacaaactccttttgggtataagtccttttcgggcagatacgtgcatggagtgatttcttgtcttctttcccgtcgggcgaaggcgtttcgtaaaggtcgtaatacgcgctcataagatatttatttttgtttatagcgataaacagttctcgtcgcttcggggaattatttttgtcgctaagcagattaattttcttcttcctaaaaactaatcgtccgacaactgttgcattatcgtccaacagttgtttaattatcgtccgacagctgtcggacgaaacagaaatgggtatgggacgattaattcttagtgaacaaaggtataaaatatagtgatacgaagagtagtgtttggggaagaaagttttagttttcggcaaaagagggatattgggaatgataattagtttttggaaataaaaaatcccccgttaaggacgagggaacctaatgttttcacaacggaataatccttattgtgacttgcttcattttagtatgacaaatgtataaaataaatatggaaatacaatgcttatattgaaaaaaaaa

SEQ ID NO: 4489 - DNA, 6807 bp, Unknown
  gut microbiota DNA sequence
accaatagtataggatgggctgtaataaactctgtaattaaagaacagaccgagagaatttggatagaaatggctggcagtagaataattccgatggatgctgctatcttgggagactttgacaaagggaattctatatcacagacagctgaaagaacccgttttagaggggtgcgtcgattgagagagcgacaattactacgccgtgaacggttgcataaagttttgaagattcttggcttcctgccggaacactatttaaaaggaatagattttgaaaagcatacgggtaaattcttgtcaggcagcgaaccgaaattgccatgggtaaaggatagatggggaaaatactcttttttatttcagacagcgtttaatgaaatgttggcggattttgcaaaacaccaaccttcattggtttttgatggtaaaaaaatcccttatgactggacagtttattatctccgtaagaaagctttgacagaaatgataagtaaagaagaactggcatggattcttttgaactttaatcagaaacgtggttattatcagcttagaggagaagaggaggaagacaatgcaggaaaatctgttgaattttatgcattgaaagtcttgtcggtggaagcgactgatgaaaagaaaggccgggatatatggtataatgtacatctggagaatggatgggtatatcgtagaagcagtaatgtcccattggactgggaaggacgggtaaaagagtttattgtcactactgacttaaatccggacggtactccaaagcttgataagtatggtgaggtgaagcgttctttcagagcgcctaaagaggatgattggatgttaataaagaaaaggaccgaagctgacattaccggtactcataaaacgattgggagttatatatatgatgctttgttgcaggagccacaacaaaagataataggaaaattggtgaaaacagtagaacgaaagttttacaaggaggaactgaactttattttgcagaagcaatgtgcttttcatgcagaattgcaggatagagatttatacatgaggtgtattgaagcgttgtatccgggtaatgaagtgcaacggagaaatatagctaaccgggactttatctatttgttaatagatgatgtcttgttttatcaaaggccgttgaaaaccaaaaagtcattgatagctaattgcccttatgaggaaaatgaatatgtaaaccgcaaaacaggtgaaattaaaacagctccgttaaagtgtatagccaagtcacatcctctttttcaggaattccgtttatggtatttcctttccaatattcgggtatatcaaaaggaaagggaagtaaatggaactttacatttggatgtggatgtgacaacggagtttttgaaaacagaagatgattatgtggctctatttgattggctgaactctcgaaaggaaatagatcagaaagcttttctgagatatcctgcgtttggactgaaaaaggaaataaataattatcgttggaattatgtcgaggataagttctacccatgtaatgagacgagacatgcgattctttcccgtttggaaaaggccggtattggtattgactttttatctgatgaaaaagaaacagccttgtggcatatcttatattctgtaagtgacaagcaggaaatagagaaagcattggcgacttttgcggttaagaacggattgaatgaatcctttgtggaagtgttcaagaagtttcctcctttcaagtctgaatatggcgcttattctgccaaggcgataaagaagttgttgcctttgatgaggtgcggaaagtattgggatatgtcgttgattgatggtacaaccaaggaaagaatagaaaggataatagcaggtgagtgtgatgagagtataggtgccaaggttagagaaaaggcgatgaacttgtcggatatatcttgttttaagaggcttccgttgtggttggcttgttatgtagtgtataatcgtcattccgaagataaagaaataaccaaatgggaaacccctgctgatattgatgcttatctggctgcttttaagcaacattcactacgaaatcctatcgtagaacaagtgataaccgagacattgagagttgtcagggatatttggaaacaggttgggaaaattgatgaaatccatattgagttagggcgcgagatgaaaaatcctgcggacaagcgaaaaagaatgactactcagattctggagaatgaaaatgccaatttacgtataaaggcattgcttgctgaatttgtgaatccggaatatggggtagagaatgtccgtccctattcaccaagtcaacaagaaatattgcggatttatgaggatgcagttttaaagggggaagaacagattccggaagatatagatgtgatattgaaaaaattcaataccagtaaattaccgacgaaatcagaattcttgcgttataaattatggctggaacagaaatatcgttcaccttataccggtgagctgatacctttggctaaattatttactgctgcgtatgagatagaacatgttatacctcaatcccgctattttgatgattcattctctaacaaagtgatatgtgaatctgctgtgaacaagttgaaagataatcaactgggatatgagtttatcaagaatcatcatggacagaaagtggaagtgggttttggaaagacagtagaaatcttttctgtggatagttacgaacgttttgtaaaagaacaatatgcaaaatcgggcataaaaatgaagaaattgttgatggatgatattcccgagcaatttattgaacgccaattaaacgatagtcggtatatcagtaaggttgtcaaaggacttttgtcgaatatcgttcgtgaaaagaatgatagcggtgaatatgaaccggaggctgtttcaaaaaacatattagtttgtacaggaagcgtgacggacaggctgaaaaaggattggggcatgaatgacgtctggaatagtattgtaagtcctcgttttgaacgtttaaatgctttgaccgaaacccagtgttttggacattgggagaataaagacggaaaaaaagtttttcaaacagcagtgccccttgaatatcagaaaggattcagtaagaagcgtatagaccatcggcatcatgctatggatgcaatagtaatagcttgtgctacacggaatcatgtaaactatctgaataatgagtctgcaagccggaatgcgaaaatttcccgttatgatttgcagagactgttgtgtgataagagtaggggggatggtaatggtaattatagatggattataaagaaaccatggactacttttacgcaagatgcaagggaagcgttgagtgggataatagttagcttgaaacagaatttgcgtataataaataaaacaaccaatatctatcaacattttgatgcaaatgggactcgtgtttatgagaaacagaaaatcggtgatagttgggctatccgtaaaccgatgcacaaagatacggtttttggagcggtaaatttaagaaaggtaaaggtggtacgcctatctgtcgctttggatactccttctatgattgttgacaaaagagtaaaaaataaggttcttgaattgttatcatataagtatgataagaagaaaattgaaaaatatttcaaagagaatgctttcttgtggaaagagctggatatagccaaagtcgctgtttattattttacggaaaatactactgaacctttagttgcagtacgtaaatcattggactcaactttcaatgagaagaagatagcatcggtgacggatactggcatacagaaaatactcctgaatcatctgaaatcaaaagaaggaaaggcggagttggctttttctgcagaaggtatagaagaaatgaaccgtaatcttttacaactgaatgatggtaaaggacatcagcctatatataaggtgagggtgtatgaaccgcgtggaaataaatttaaagtcggtgtacttggcaataaaggtgccaaatgggtggaagctgctaaaggtactaacttgttctttgctatttacataacagaagatggaaacagaacgtatgagactattcctttaaattgggttatagagcgtgagaaacaagggcttgttcctgtaccggacagaaatgaaaagggagataaattattgttttggctgtctcctaatgatttggtatatctgccaaccgaagaagagcgggattttggtaggataaatgaaccgatagatagggggaggatttataagatggtttcatcttctggtaatcaatgcttttttatacctcaaagtatatcaaatgctattatttccactaaagaattaggttctaataataaagcagaaaaatcatgggatggtgaaatgataaagaatatttgtattccagtaaaagttgataggttaggccgtattatagaagttaagtatagagtaaatgaataatataaagttgtttcaagagaaaaagatccgttccgtatggaacgaggaagaacagcaatggtatttctctgttgtagatgtagttggtgtattgactgatagtgtgaatcctacggattatctgaagaagatgcgaaaacgggatgaagaactggctacttacctggggacaacttgtccccaggtagaaatggtgacagatacaggaaaaaaacgaaaaacgttggcggcaaatgtgcaggctttattccgcatcattcaatctattccttctcctaaagctgaacctttcaagctttggttagcacaagtaggttatgagcgtgtacaggaaatagaaaatccggaattggctcaagagcgcatgaaagaactatatgagcaaaaaggttatccaaaagattggattgacaaacgtttgagaggaatcgccattcgtcagaatttgacggatgaatggaaagaaaggggaatcacggaaaaaagtgattatgccattcttacggcagaaatatctagagcaacgtttggattgactccttcggattataaaatatataaggggctgacgaagaaaaatcagaatcttcgtgaccacatgtctgatttggagttgatatttacaatgcttggagaacgtgtcacaacggaaatttctcagaaagaaaaaccagatacatttactaaaagtaagcaagtagcacaacgtggaggaaatgtagccggagtagcacgtgaacaagctgaaaaagagttgggtagaagtgttgtttctcctgaaaattttctgttggattctgataaacagaatgatactttagagcttccttttcttgaaaatgatgaatgaataacttgtaaagtctatatgctatgattaagaaaacactttattttgggaatccggtctatttgtctttaaaaaatgcccagttggtgattaaattgccggaggtggtgaagaacagtgctttacccgaagggttcaaacgaatgtccgaagtgactaagccaatagaagatattggagtagtggtgttggacaataagcagataaccattacttcgggagtattggaagctttgcttgagaataattgtgcagtcataacctgcgattctaaaagtatgccggttggtttaatgcttcctttgtatgggaatactacacaaaatgaaaggtttcgtcatcaacttggtgcgtctctaccattgatgaaacaactttggcagcaaacaataaaagccaaaatagagaatcagacggtagtattgcatgaatgtgctggagaagaaataaagtgtatgaaggtgtgggctgcagatgtaaagagtggagattctgataatttggaggctcgtgcagctgcttattattggaagaatttgtttaaaatagaaggctttacaagggatagagaaggtattcctcctaataatttgttaaattatgggtatgctattttgagggcagttgttgctcgtgctttggtgacaagtgggcttctacctactttgggaatacatcatcataatcgttataatgcttattgtctggcagatgatataatggaaccttatcgcccttatgtggataggttggtatatgatatattcaaggaagcagaaccgaattgtgttgaattgacgagagaattgaaagcgaggttactgacaattcctacattagagactgttatttcgggaaaacgtagtccgttgatggtagctgttgggcagactacggcttctctgtataaatgtttcagtggtgagttgcgtaaaatatcctatccagagatgtgatggaccggtttagtgaatatcgcattatgtgggtattagtgttgtttgatttgcctaccgaaaccaagaaggataaaaaggcgtatgcggaatttagaaaaaatctgcaaaaggatggatttacgatgttccagttctctatatatgttcgtcattgtgcgagttgtgagaatgcggaggtacatataaaaagagttaaatctttcttaccggactatggaagtgtcggaattatgtgcattacggacaagcaatttggaaatatagcacttttttatgggaaaaagactgtggatgtgaatacgcctggacaacaattagaattattctaaaaaaatcccgcgcaatggcgggatttttttagaagcagcattctttttttatattctaatactatgtgtaatcgtttgaatattagattattacttgtaatcagctgtttccaatggttcaaagatactaaaatgaaagcaaatcacaacttaacagaagtgaggggtggag

SEQ ID NO: 4490 - DNA, 561 bp, Unknown
  gut microbiota DNA sequence
tgtcgtagggatgactattcggatgcgtgaaaagagtaaccaatccgccatgctgtttatgaaaggctacaaatcgattgaagtccacatcgaacacagcatcagcattcagcaacaaaaaatcagaatccaacttatccttgattttgaaaagtgcaccggcattacccagcggctccttctcaaaatagtattcaatatgaacaccgaagggcttccctgttgccggagatatgcctgaaccatctccgaaatagttcatgatgatgtttccgagatgagaaacggtcaaaataatgtctgtgaatccttggtcacgcagacactccagctcatgttccagaacaggctttccttcgatttttatcatcggcttggggatatcactggtaacagaggaaatccgggttcccctgccgcctgccattattactgttttcatcttagaccatcctcactcgaatttagttcttaggctcataagtttccggcgaataatgaatcactctagtaccgccgtcttcaaactcaaatgggatgtacatcaaatcccgcattgcc

SEQ ID NO: 4491 - DNA, 325 bp, Unknown
  gut microbiota DNA sequence
tgtcccttttcagcgcggttaacgctatggccgagaaatatgacatgcccatactttacagttgtcatccccgtagcaggaaacgtctggaatcaagcggctttgcacttgacagacgtgtgattcagcatgaacctctcggtttccacgactacaactgcctgcagatgaacgcctatgccgttgtgagtgacagcggcaccttgcctgaggagagcagtttcttcacttctgtggggcatcctttccctgctgtatgcatccgtacgagtacggagcgtcccgaggctcttgacaagggtatctttgtccttgccggcattga

SEQ ID NO: 4492 - DNA, 1110 bp, Unknown
  gut microbiota DNA sequence
caaattccccctgccatagatgtctatggcagggggaatttgcttaatggggcgtttcggcacacaccctcttttatcttttatttcattcggcaaagctaaccagttgcaagtcaaacgtcagcagagatcctccggggattgtatttgtagaataaggagcagtataatcatttataccatatccgctttgataagggatatacaacatccaccgctcacccgtccgcataagctgcaaagcagctgtccaaccggcaacgacacccgaaacttcaaaatccacgaatgaatcaaaagccgtaggttcttttaccggaggaataggtatatcacggtcaatagcactataaccgtcaaagcaaccgtcgaattcttcgccgttcacataagtcccataataataagcattcacctttgaatgataacccgtatacaacggacgttcacccgtctcattcttcacaagctttttgcaatagacatactgagcgccttcagaagtgcttgcagtcgtctgtatggcatacagtttcccgagttccatagcatcggcctgctctgctgtggcgacatagttatcgccggtcagccttcttatcgagtcaacaaaagcctcgccgcgctctctccagttatcatactttccagcctcttccacttcttcacaagagataaaagcacccaccagcaacagcaggaaaggcaaaaacaaaagggactttttcatttactattttattatttactatttactatttcagtttgttcacgcaccagtccattccataaccgatttattgcaacgttttcagcagcgatgtgatgcttacgcggtctgcaatgatattgttcagttcggagatagccacgcgttcttgctgcatggtatcacggttacgcaaagtcacgcagttgtcttccaaagtctgatggtctacagttacgcagtacggagtaccaatggcatcctgacggcggtaacgcttgccgatggagtctttctcgtcgtactggcaatggaagtggaacttcaggttgtcgatgatttcgcgtgccttttcgggcagtccgtctttctttaccaacggcatcacagccagcttcacc

SEQ ID NO: 4493 - DNA, 1080 bp, Unknown
  gut microbiota DNA sequence
gcggtctacaccaatcgaggtctcgatgacgtacggggtatagctttcgttggtttcagggtcgaaatacttgatgttcttgccggagaacttctcatgttgggacaagtcgaaattcgtacggctgtggatgccttccacttccttgaagccgaagggcatcaggaactcgatgtccgtagccgcattggcgtagtgagccagcttgtcgtggtcgtggtagcggtaatggtcgtcgccgaagcccagcgccttgtgccatttcagacgggtagccttccaggtcttgaaccagtcgagttccgtacccggcttcacgaagaactgcatttccatctgctcgaactcgcgcatacggaagatgaactgacgagctacgatttcgttacggaaagccttaccaatctgggcgataccgaaaggaatcttcatacgaccggttttctgtacattcaggtaatttacgaagataccttgtgccgtttccgggcgaaggtatatcttcatggcaccatcggcagtggaacccatctctgttgagaacatcaggttgaactggcgcacctctgtccagttctttgtaccactgataggacaaacgatttcttcgtcaaggataatctgacggagttcgtccagattattatcgttcaaagccttggaaaagcgttcatgcagggcatcacgcttggcctggtgttccagcacacgaccgttggtactgcggaactgagcctcatcgaaagcctcaccaaaacgcttggcagctttggccacttctttgtttatcttgtcatcgtacttggcaagctggtcctctatcaacacatcggcacgataacgtttcttggaatcgcggttgtcaatcaaagggtcattgaaagcgtccacgtgtccgctggctttccagatagtggggtgcataaagatagccgagtcgatgccgacaatattttcgtgcagcagtaccatactctgccaccagtattgcttgatgttatttttcagttccacacccatctgaccatagtcatacacagctcccagtccatcataaatctcgctggaagggaacacaaa

SEQ ID NO: 4494 - DNA, 339 bp, Unknown
  gut microbiota DNA sequence
cgaccattgtttgcttcgtatagctgaggaccttttccaatctggtttgagtagcacgattcttttttgctatagcgttggttcgcataacttcatattctgagggttcagagattgtttctttagcggtaggatctgactcaatgatatcagtcgtagcttggtttgaatctttgattgtaggggcttcaggaacagaaacggtatcattgtaatttttcatcgtttgaaaagcagagaaacgcaatagaaaagcttctatgcgtggcagcagaaactgattgaaagttgtctgtaaactggcatagattgccatcaagacaattactgttgcaaaaa

SEQ ID NO: 4495 - DNA, 414 bp, Unknown
  gut microbiota DNA sequence
ataaacggacgttgcggctggtgcggaaccgacgagctgtatgtgaaataccacgatgaagagtggggaaaaacggtaacagacgacaagacactattcgagtttcttgtattggaaagtgctcaggcgggactaagctggataaccatcctcaaaaagcgggaaggctaccgcaaagccttttgcaatttcgatgccgcgcaagtggcgcaaatgaccgacgaagacgtggaacggctgatgcactttgacggcatcgtgaaaaaccgtctgaaaatcaagttgaccatcaccaatgcaaagcagtttcttgccatacagaaagaattcggcagcttttataactatacgctatccttcttccccgaccggaaccccattatcaatcattttcagtcattgagtgagattccg

SEQ ID NO: 4496 - DNA, 228 bp, Unknown
  gut microbiota DNA sequence
ttaatcccatccataaaattgtaggcattgatgatgcccgtacagactatcaaggctatgactatccaccaccaggacaaggagaacagcccccactgataaaacatcatagccatagcagagaaatgaaaaagcagccttgtcatctgtccggtggattttatatcgtccacgaagctgatgaacgtcaccagtgtcaaggcaagcaggaaccagggatattcaaag

SEQ ID NO: 4497 - DNA, 482 bp, Unknown
  gut microbiota DNA sequence
gtgtggataaggaattcgagggtagcctggatgaatgggatatcatgatcgatacgaatataaggggactgttggctatgacgcgtttggtggtgcccggtatggtggaacgcggacgcggacatattattaatataggatctattgcgggggatgccgcttatccgggcggaagtgtgtattgcgcaacgaaagctgccgtgaaggctctttcggacggactccggattgatctggtggatactccattgagagtgacgaatgtcaaaccgggaatggtggagacaaactttacagtggtgcgttatcggggagataaggaagctgccgataatttttataaagggattcgtccgttgacgggagatgacattgcagaaacggtttattttgccgcgtcggctcctgcacatattcagattgcggaggtacttttgatgcctacttatcaggcaacaggcactatttcgtataagaagaag

SEQ ID NO: 4498 - DNA, 1325 bp, Unknown
  gut microbiota DNA sequence
gtcataattatttcttttaaattgtgattaataatgttctgtgtaaccctcaaacctatgtacacttggttatctgattacgctgcaaaactacttgcttctgggctgattaaaagagagaaattaatgagtggttttactttccctcttaattggtagctcgtccgctatcgttttgacggtgcaaagatgggatataatggcaggattaaaagagagaaaaaaagtcctgctttcatgtaccctcttaatggtatgaagcaggactgtattaattatcagaagtttattagaaatatatgctgttcgcagtatcaattctcttgtctttatattgcttgatgtaaccttttaggacatcttcatcatctgagaatttactatgtttagatagctttgtgaagtagataagccttgatatgagcaatgtcttactaagtgatatggtgcttcctttcttctgtctgacattaaactgcttgttatatggctctaaattgaagaagtcattgaacatcttatagaacagccatatctgaacggactccttttcttctgcatgggtgcttatgctgacttgttggctctgcatccaagggtgttcctctatctcctttaggttattgatgatggcagtagccaagtagcctattgcattggtattatcaattacaatctgatgcttgccctctacctttacagatatagtgataggtttcttaaaacttactccaaattggttaatctccttatggttgtcagctatggctttggcgaatttggtgagctgttctattccaatgcctgtagctttcattccatccaagtacgttccacaagtatagtcaaagatgaacaggagcagaaaccaaaacttatctatatcaactcccaaacctttcaatgtattctgtatgtcctcattagctatataatcttcgtttgtgaagttgccatatagtttattctgattgtatctccttatgaatagaggtaaggcggtagtgccgcagacgtatctttctcctgtggctgggtctatatctatgtctggaacatatttaacggctatggcttccatgtattccaaacgggtatcaatgcttatgtaatcttcctttagcttctccataattattagtttaaggcaaaattaaaaaataatccccacctgcattgctacaagtggggaatttgtgggtaggatatgctttagtaatcagaatttcctgtaaacgtatccataagtttatccatctgctcaccaatgcacttgtctattagctttgcataatgggcagtcattcgtgtattggtatgtccta

SEQ ID NO: 4499 - DNA, 624 bp, Unknown
  gut microbiota DNA sequence
ttcaacagattggaaacaccggttgtgttcaagccttctttttccatgataaatgttactgcaccggcatcaatatcaccgctacgagtacccatcatcaagccttccaatggagtcaagcccatagtagtatccatacatttaccatctttgatagcagcgatagaaccaccgttaccaatgtggcaagtgataattttctgtcctaccggatttacacccaagaattcacatacacgttttgacacataacgatgagaagttccgtggaagccataacgacgtacaccatacttttcatacagttcgtgaggaatagcatacatgtaagcataatccggcattgtctgatggaaagccgtatcgaatacacctacctgcggaatgttaggaagaatagcagaaactgcatttacccctttcaagttagcaggattgtgaagcggagccaagtcattgcaagcagcgaaagcttccagcacttccttgttcagcaatacagattcgctgaaacgctcgcctccgtgtaccatacggtgacctactgcattgatctcatccaaagatttaatagcgccgtattcaggattaatcagcgtgttcaggataaactctactcctact

SEQ ID NO: 4500 - DNA, 988 bp, Unknown
  gut microbiota DNA sequence
cttcaaaaatggtttcgcttaccaactgaatacagaacgcagcaatacctcaaccgaaatgctggcaacctccacaacattcaacggacaaggactggatgcagacctttccaaagcaaccgtcaatgtattcctaagcgcagtcaatgtaacagaaggaaatagaaaaaccgccacatataagataaaaaacaccttcaagagcccattgccccatgagacgcttggagttcctccttacaatccgttcatcatggtacacgacggattgggaaaaccacgcacagaagtgcatctggtgaattatcctccgaccgaaaaggcagacatgactttgttccatactggagaggatttatcttctgtaccgacaagctattatatagccaacggcaattatccttttgctatccatttaagcggagcaacaagcttcaatactcctgaaagccatccgatagacaagagctttgaacattttatggattgggtcaattccaatggagcaaattataaggactggtacaaataaccgataaaagaaactatttataaagaaatggcagccattcatcaggctgccatttcttgtatcttcctatattgaatacttaaagcaagcttattccaccgttactgccgtaccgcaggctgtaaccatcagcatactgccgctgcctcctactgtttcataatcaaggtcaacgccaatcacggcattggctcccatggctcgggcattatcctgcatctcgcgcaaagcagtctccttggcttcgcgtagcacttcttcataagaaccgcttcgcccacccaccacgtcgcgaatactggcaaagaaatcgcggaatacattggcaccgataattgtttcaccggaaacgatgccataatagcgggtgatgcgtccaccctcaatagtcggagttgttgttactaacataatctgtttttttaaagttacttatatagttagacgctggcatat

SEQ ID NO: 4501 - DNA, 13601 bp, Unknown
  gut microbiota DNA sequence
atctatctcctcccgggtattgtaaagcccgaaagatgcacgcaccgttccctctatgccaagacgctgcatcaatggttgggcacagtgatgtcccgtgcgtacggcaatgccaagacggtcgagcaatgtacccatatcaaaatgatggatatcacctaccagaaacgatatgacactacccttgtcttctgcctcgccgaagatacgcataccgggaatctctttcagccgttgcatggcatactgggtcaattcgtgttcataggcggcaatcttgtccatcccaaccagcgaaacgtagtccaaagctttggcaagtccggtagtaccgatataatccggcgtaccggcttcaaacttgaagggcaattcattgaaggtagtcttttcaaaagatacatgctgaatcatctctccaccgccctgatagggaggtatcctatccagccacccctctttaccataaagcacccctacccccgtaggaccatacaccttgtgcgcggagaaaacgaagaaatcggcatccagatcctgcacatctaccggcatgtggggaatggactgggcaccgtccacaagcaccggaacaccctgctcatgggcaaaagcaatcatctccttgacgggattgaccgtacccagcacattggaaacatgcgccacactgacaatcctggtacgttcggagaacaactgcctatattcgtccaataagagttcgcccttgtcattcatcggaatcaccttgatggtaattccacgcttggcggcaagcagctgccagggaacaatgttgctatggtgttccatcacagaaagaatcacctcatccccctcctgcataaattcctcaccaaagctggagacaagcaggttgatactctccgtcgtaccacgggtgaagacaatctcattcgtgctgcgagcattgatgaaacgtctcaccgtctcacgcgaggcctcgtgcagctctgtagcctgctgcgacaggaagtgcactccgcgatgcacattggcattcaccgaataatattcgtccgtaatggcatttactacctggcgaggtttctgcgtagtcgcgccgttgtccagatagaccaacggcttgccatatacctcacgggaaaggatagggaaatcagctcgaagcctctcccccagcccctctcccatagggaggggagccaagatactactcttatttatatcgttgttcataatgaatcgaaattataagctatcacttgcagatggcgcacccctggcatttgttcagttccccccggaaacgcttctctaccagcagatgcagacggtctttcaaagcatccaaacggatggtgtcgataacttcgttgacaaaagcgaacatcagcagcaggcgcgcctcgcgcaccgggataccacgctgccgcatatagaagagagcgctttcatcgagctgccccaccgtagcgccgtgactgcacttcacgtcatctgcataaatctccagctgaggctgggtgtacatatgtgcatctcgggtggcacaaagattgcggttggtctgttgcgaactggtgtgctgtgcgtcagggcgcactaaaaccagaccggcaaaggcacctacagcctgctcgtcaaggacatacttataaagctcattgctggtacagttgggcacggcatggtcgattgtcgtatgattgtccacatgctgattcttgtctgcaatggccataccgcacagattcagctccgcatgttcaccggcaagcgtcacacaggttgtattccgtgtagttccgttgtgcaaggtcataccattcagcaatacattactattggcttcctgccttacatacatattgctgatacgtaccgtactggtgtgtgtctcttcgagttcataaaaatcgaaaatggcattctcaccggcaaagatttctatcacctgcgttgccaggaagttcacgccgtccatcgcatggtcacacaccaacaagcgggcttgtgcaccctcctccagaataatcagcacacggcggttcaccataaaattgacgtcaccacgcaggatattcaccagctgaataggtttctctaccaccacgttcttaggaacataaaacagaacgccgtcttgtgcaaaagcggtgttgaacgccgtcaccccatcctctgccgtatcagccaacttgccataatatttcttcaccaaatcgggatgtttctcggccacctccttcaggctgccgaagataaccccttcaggcagatgggacttaggcaaagccctgccataaaaagcatcgttcaccacaaaataaagagcagtgctcatattgggaacatcgcacttgaacacttcataaggattcaccggaatttccaaccggttcaagttcaagccataatccggctcaaagaacttgctgatatccgtatatttgtatttctcctccttacgggtgggaaagcccaagcgctcaaagtcagcaaaagcagcggcacgcggcgcattcagcacctcggcactatgccggcatatcatcgcctccgtttgggagaaaaggtctatgtattgttgctctacactcatgttttcagattatgagtttataattcacctgcttctttccttatccaatcgaagccacgtgtttcaatctccttcgccaattccggtccaccggtctttacgatacgtccacccagcagtacatgtaccgtatcgggtttgatatagtccaacaaccgctggtagtgggtaatgaccatagcactggtttccgcagtcttgagtttgttgaaaccgtcggccacaatacgcaaagcatccacatccaatccggaatccgtctcgtccaaaatagcaaaagtcggttccaacatcgccatctggaatatctcgttacgcttcttttcaccgccgctgaaaccttcgttcacgctacggttggccagcttgttgtccaactccacaatggcacgcttctcgcgcatcagcttcaggaactcactggccgacaaagcaggcagatggcggtacttgcgttgctcattcacagccgcacgcatgaagttcaccatcgacacgcccggaatctctaccggagcctggaaagaaagaaagattccttcatgtgcacggtcctcaggactcatggcaagcaagtccttgccattaaaggtaattgagccgcgcgtcacttcgtaagcaggatggccaaccaacacattactcaacgtacttttaccagcaccgttctgtcccatcagtgcatgtacttctccatcacgtatggtcaagttgatgcctttcaatatttctttgccattgatgctggcatgcaggtcttttatctctaacatctttatatttactatttgactatttacaatttactatttataaatcaccccacgcttccttccagcgaaatggcaagcaatttctgcgcttctacggcaaactccatcggaagtttattcaaaacctctttggcataaccgttcacaatcagccccacggcatcttccgtagaaataccgcgctgattgcagtagaatatctggtcctcactgattttgctggtagtggcctcatgctccacgatggccgtttcattgtgaatatccatgtaggggaaagtatgcgcgccgcatttgtcaccaagtagcaaggagtcgcactggctgtaattacgagcattgtccgctttctgtgccacgcgcaccaagccgcggtaagagttttcgctctttccggcagaaatgcctttgctcacaatggtgctccgggtattcttgcccagatgaatcatctttgttcccgtgtctgcctgctgatggttattggttactgccacactatagaactccgctgtcgaattgtcgccggaaaggatgcaagacggatacttccaggtaatggccgaacctgtttccacttgtgtccaagacagtttactgtccacccctttacaatggccacgcttcgtcacaaagttatagacaccaccccggccctcggcatcaccgggataccagttctgcacggtgctgtatttcacttctgcacggtcgtgcaccacaatttccacaatggccgcgtgcaactggttctcgtcacgcatcggagccgtacacccttccagataagaaacgtacgaatcatcatccgccacaatcaaggttctttcgaactgccccgtattgcgggcattgatgcggaaataggtggacaactccatcggacagcgtacccccttcgggatatagacaaaagaaccgtcggagaacaccgccgagttcagtgccgcaaagaagttgtcacgataaggcaccaccgaaccgagatatttctgtaccaagtcgggatgctcgcgcacggcctcgctgaatgagcagaagatgattcctttctccatcagcgtctccttgaaggtagtctttacagacaccgagtccataacggcatccacagccataccgcttaacgccatctgctcttccagcggaatgcccagcttattgaaagtctttatcaactcagggtccacctcatccatactcttcggaccctccttcttcttcgtagggtcagcatagtaggatatggcctgataatctatttcgggaatgcggagatgtgcccaggtaggcatctccaacgtcagccagtggcgatatgccttcaggcggaactccagcaaccattccggttctcccttcttctcagagataagccgcactacatcttcattcagcccgcgctcaatgatgtctgtatgcacgtcggtcgtgaaaccgtacttatacttctcctgagtgagttcctttacatatttattgggttcttcttgttgcatcacttctataattacaaattatgaattacaaaatcacggctcacggtatcagtcaaagtctccgtttacaatctgctccgtaaccgcctttgccgcgggaaagaatatctcggcaaactcttccataggataatataacactgattctttcttttttgttttgctaatcagcgtattgtctccatctataaattcgatgacaccaatcagcaggctcgtcagcaggaggtacttcaaagctcctagaccggcccccaaccaatgattgagccaacccagcgagacggcctccattgcccgggtcagcagagaagccaccagggagaagagcaaaggaacagccagccagatgaggacaaatgccagtacttgcgccactgtcatagagtccgtcaacgtggggcacagcttcgctgccaacgaggcatacaacgcctttgccgccagcagaccgacaatcagccccagcaaagaggccaattgcttcacaaaacctttcatgaagccgatgattgtgcccaagccgaaaacagccaatatgatgatatctataattgccataaaattaatgtaccaatgtgcaaatgtgctaatgtgctaatatgcaaatatgctaatggggcaatgagcaaatagctaatatgcaaaatgtgccaattgccctgcggcattttctgtacgcgcagccaattggcacattagcatatttgcacattattcaattataatgtttgcttcacttctatttcttcgtaagattcgataatatcgcccaccttgatgtcgttgcagtttgtcaggctgataccgcactcgaagttggtacctacctccttcacgtcgtccttgaagcgcttcagggcattgatggcacctgtaaagattacgataccgtcgcgtatcaagcgggccttgtcgctgcgtttcacctttccggtcttgaccatggcacctgccaccagtcccaccttcgtgatgttgaacacttcgcgcacctcgatagttgccgttatctgctccttcaatgtcggtgccagcataccttccatggcagccttcacctcttcgatggcatcgtagatgacggagtacttgcggatatccacaccctcctgctctgccatcttggcggcagcacccgaaggacgtacctggaaaccgacgataatcgcatccgaagcggcagccagcgagacatccgattcggaaatctgaccgacacccttgtggattacgtttacctgcacctgctccgtagacagcttgattaaagagtcgctcaacgcttccacagaaccgtccacgtcacccttcacaatcacgttcagctcatggaagtcacccagcgccagacggcgacccacttcgtcgagcgtcagcatcttctgcgtacgcagaccttgttcacgctgcaactgttcgcgcttgttggcaatctcgcgtgcttcctgctccgtttcgattacgtggaacgtgtcgccagcagcaggtgcaccgttcaagcccaatatcagggcaggtgtagaaggaccagcctcctgcatgcgctggttacgctcattgaacatagccttcaccttaccgtagctggtacccgccagcacgatgtcgcccatcttcaaggtaccgttggaaacgagtaccgtagccacatagccacgacccttatccaatgaggactcgataatggaaccggtagcacggcggttcgggtttgctttcagctccagcatttctgcttcgagcagcactttctccatcaactcgggtacaccgataccctttttggcagagatatcttgcgactgatacttaccgccccactcttccaccaggaagttcatggcagccagctcttccttaatcttgtcggggttggcagtcggtttatcaatcttattgattgcaaatacaataggaacacccgcagccatggcatggttgatggcttcctttgtctgcggcatcacgttgtcgtcagcagccacaatgatgatggcaatatccgtagctttggcaccacgggcacgcatggcggtaaacgcctcgtggcccggagtatcgaggaatgtaatcttacgtccgtcgtccagtgacacgtggtaggcaccgatgtgctgtgtgataccacccgcttcaccggcaatcacattcgccttacggatatagtcgagcaatgaagtcttaccgtggtctacgtgacccatcaccgttacaatcggagcgcgaggttccaaatcttcctcatcatcctcttcctctacgatggcctgcgccacttctgcgcttacatattctgtcttgaagccgaattcctcagccaccaggttgatggtctcggcatccagacgctggttgatggataccatcataccaatgctcatacaagtggcgatgacctgagtaacagaaacatccatcatgcttgccaactcgttggccgtcacgaattccgtaatcttcagtaccttgctttctgccatttccatgtcttccaattcctgcatacggctggaagccatgtcacgtttttccttacgatacttggcacctttgttctttcctttggaagtgaggcgtgccaaagtttcctttacctgctttgctacatcttcctcgctaacctcctgcttgatgaccggcttcttgaagcggtccttattgcggttgcggttattattggcattgtttccaccaggctggtttccaccttgcgggcgggcaccctgaccttgctgggcacctgcgtgtccacggtcgttgccaccacgctggaagttggaagcattgttgatgtccactttctccttattgatacggacacgtttcttcttgccgttggcatcgccggcagcggtatccttcaacttgctgtcatcacggcggatttccttgatgatagcttccttcatctgcttcttctgatcctggcgaatcttttccttctcttcacgctccttgcgtttctcctctttcgatttcttcttcgggcgtgtggattggttcaaggccgccaagtctatctgtccgatgacattaatcttcgaaacaaactcaggctgatgtatcttgaagatttcttctccttcttctttcccctctttttcagccggtgcttcttcagccaccggtgcgggagcaggcgcttctatcatttcttcctttttagattcttgttgagcctctacaaccggagcaggctcttccttgacaacgggttgtggctgcggttccgaaacaggctgcggctcgggctcagatgccggctgtacctccggttgcggctgtggttccggttggggagcaggttccggtttcggcgtttctacaactaccggttcctccaccttcttctcctctaccgctttttccgcttctttctctttttcctgagcaggagcaggtctacggttcagtttgtccaaatcaatcttgcctaccggcttgaacttcggacgtgcgtcttccggaacaaccgtcttaatctcctcgggcttcgctttctcctgcgtttccttatagccgtcaatagacacggacgccttgttgcggtccttgctctgacgttcctggctgaaacgctccgactttatcttaaggtccttatctgtactaaactcctttttgagcagttcgaactgttcatccgtaatttttgtgttcggatttgcctcaacggtaaatcccttcttttgcaggaactcgacagccgtcgtaatccctacatttaaatctcttgttactttgtttaaccttatcgtcatactaatttaatgaattaatgtgccaatatgctaatgtgctaattggctgagaaaaaaggagtgtgcacttcatccgatatgctatctgcattggcacattagcatattacccacattaccacattactgctcctcctcttcaaactcctgtttcaaaatgcgcaatacctcgtccaccgtctcttcttcgaggtccgtcttctcaatcaacatctcacggggagcgttcaacacagccttagccgtatcgataccgatagccttgatggcatcgataacccaaccgtctatttcatcacggaattcgtccaagtagatgtcttcatcctctatggcctcatccaactcacggaacacgtcgatggtgtactcagtcaacatactggcaagcttgatattcaaaccgcctttaccgatagccagcgacacctcttcgggtttcaagaacacttcagccttgcgttcttcctcgttcaagcggatggaagaaattttggcagggctcaaggcacgctgtataaacaactggatattggacgtatagttgataacgtcgatattctcgttgcgaagctcgcggacaataccatgaatacggctacccttcacacccacgcaggcacctaccgggtcgatacggtcatcgtagctctcaacggcaatcttggcacgctcgccggggatgcgggcaatcttcttgatggtaatcagtccgtcattgatttcgggtacttccatttcgaacagacgttgcaggaagacgggcgacgtacggctcaggataatcttcggattattattcttgttgtccacacgtgccactacagcgcgggcagtctcgcccttgcggtagaagtcactcggtatctgttcggtcttgggcagcaacaattcgttgccttcatcatcgagcagcagcatctctttcttccaaatctggtagacttccgcattgatgatggtacccactttatcaatgtatttgttgtaaatactatctttctccagttccaatatcttggaggccagtgtctggcgcaagttcaagatggcacggcgaccgaagttcgcgaagataacttcatccgtcacttcctcgcccacttcataagaagcatcaatcttttgtgcttcggacaatgcaatctgcaggttcgggttttccaaatcctcgtctgccactacctcacggttacgccatatttcgaagtcacccttgtccgggtttacaattacgtcgtaattctcatcggtaccgaacattttcgcaatcacactacggaacgactcctcgagtacgcttaccatcgtggttctgtcgatattcttcagttccttaaattccgaaaatgtatctatcaagctgacagtttctacttttttggccatagtcttatttaaaactgattaagtatttagtgtattttatctcttcatacgtaaaggtcaagtcctcgtccaccagcttgggacgcttggcaccttcctctttcactttcttctgaatggtcacgacgaaatgctgttcgtcggcttccttcaacacgccgctgagcttgcggccgtcctttgccagcacttccacttccttgccgatgtggttaatgtactgctgcagtaccttgaagggctgtccgatgccggccgaaccgacttccaactcataatcctcatcctcacggttcaacttggactcgatgtagcggctcagctctacacagtcctcaatccaaacaccttctttgtggtctatttccaccaaaatcttgtcatccgggctgattgtcacctccacaaggaagtagtcctttcctgccagccactcgtcaacaatctgacaaacagttttcttttctatcatagattaaccattaggaacaaaaaagaggagcttaatcgcccctccacctttcatccgttttcgcttgcaaagatataaataatctgttcgactacaaaatattagagaaaaaaagattgatttaacggttcaaacgagaattatattacagacacgccctttcaacacttcaagataaagtgtaaaacatataatcttatgagacagaagcttatactttatgaaatgaattatcacgttccatactgcatgagatgcacatgtcaagcacaacgagatgcacatctcgaacaacatgagatatacatctcatgcgtacaatctctattgtttcaggaaaagaagtaaggaggtacaagcggaaaaaagatactgttgaaagacaacgcggaaaaataaaaggccgatagcttgtttcatgctatcggcccttttactatggttctaaaggtctaaaagaccttgtcgtatcacttattcggagtctcccacttcttggtatccgtacaaaccacgttcacagtctggtcacccgtctggatgcggaagtcacctttctccagaatccacttgccatcatagcctacgaaagcaaggtcggagcctttcagtttcagagtcacggtctttgtctcgcccggtttcagttccactttctcgaaagcgcgaagacggcgggtatcgggagtaagggaggcaacgaggtcactgctgaagagcaacacgctctccttgccgacacggtcaccggtattcttcacatctacagtgaaagtaagcacatcatcagcggtaaagtccgacttatccaccttgaggttactgtatgcaaaagtagtataactcaatccataaccgaacgcccactgtacagatacttgcgcatcgtagttataagcaccttccatctgcttgccgatgtgttcgcacggtttgtagtcgtacgtaatcagagagttgatttctttcggataagtgaaaggcatctttccgctgaagttggcgtcgccggcaatgaggtttgccaacgcatcgccaccatagttgcccggaagcatagtattgacaaccgctttggccagtggttcgatgtcggcaatcagacggggacgaccctcgttcagtaccagaacgatgggtttgccggtcttggcaagagctttcaccaggtcgagctgattctgggagaggaagaggtttgtcaagttacccggagtctcgcaataagagttctcaccgatgcaagccacgatgtagtcggcacccgcagcggcagctacagctttctctatctccggagtgttttcttcccaccagttgccaccttgcttataagtgacgccggcttcgtagatgatattctccgcaccgaatttattggtgaaggcctcgaggatggtattatattggcctgcatgctcatcggccttgtcaccctgccaggagtaggaccagccaccgttgaggcaacgcatggagttggcattcggaccggtaaccagcaacttcttgccttttgccagcggcaatatgccgtctgtattcttcagcagtaccaaagactcttcggcagcctggagtgcggcggcggcatgttctgcaccaccgaacaaggggaagtctttcaaatcataatagggcttttcaaacaggttcaagcgatacttcaggcgcagtacacgacggacagcatcgtcaatgcggctcatggggacttcgccttcttccaccagctccttcaagagtgtacagaacttccagtcgtacgggtccatagacatgtcgataccggcattgatggcaagcttgatggcttccttcttatccttggcaatgtggtcgcggctataaaggttgttgatgtccgcccagtcagtcacaatcataccgtcccagttgaggtcttctttcagccacttggtcagcagctcatagttggcatggaaaggcagaccgttgttcatggcggagttcaccatcacggagagggcacctgccttcaccatttccagataaggagcgaaatgcttctcacgcatatcctgctcggtgatggaagacggtgtacggtccttaccggaaacgggaacaccataacccatatagtgcttcatacaagcggcaacgttgttctcgccaatcaggttggggttctcgccctggaaaccgataactgcttcacgtcccatttcggcattgacgtaggcgtcttcaccatagttttcccacatacgaggccagcgcgggtcacgtccgaggtcggtcaccggagcatacgtccagggaatgcttcccgcctttgtttcataagcggagatgcgtgcaccttcgcgagtcagttcacggttgaaggtagctcccatattgacgccttgcgggaagaaagtaccgcccaacgtataggtagttccgtgtatctggtctacaccgtacacacaaggaatacccatcacctccatggacttctcctgaatgcgtttgatgatttcctgccacttctccacgctctgtgccacaccgttgggtacgttcaagatggagcccactttgtattttccgatgacagagtcgagcatcgcctcgtccaactggaagcccttggcattctcgatgccctgaatgcgcatatagagctgcatcatcacgtcctgtgaaggcatctccttgcccagcttgaactctttctccagcttgtatttcttgatgattttttgcaggtctttcaccgtgatgttcttcgggtcgagaccggcgaagggattggcgcgtttctgcaagaggtcgatggtgagttcgcacatctgaccgactttctcgtccagcgtcatcttcttcagcaaagtctcaatctgctgttctattttctcgtctctcgggatggcaggcgcaacagtggtctgcgccgtagcggtaaatactaaccctgatagggctaaagataagattaactttttgttcatggttgtgatattggtttataatagtttgcactatctgtttatatgcggtacaaatatataaacatcctgccataccgaaaggtacaacaggatgttttttagggtatgatttgttatcttttcagacaaatccgtctcatctctccaagagact

SEQ ID NO: 4502 - DNA, 24727 bp, Unknown
  gut microbiota DNA sequence
tcaatttatcgcatttcgttttaccccccttaaatatacaaaaaataagccttgtctctcgacaaggcttattcacaacacaaacacaaaataaaacacgacaaaactactatgcaatcttacctgtctatgccggggaggcatacgtactagttacggatattcacatatacataaacagcttcaggctgatttgcacattataaacaaatgcggggaggcatttgtttattgcctatttgttaaaaaacacaaattcaaagtttgtcattgaatacctctttcacgaagcttcaactgccatttccatgcagaaagtaaagtatcttcaatacttgtttctgccttccaacccagttcattgtttgccaattccgggtttgcccataccttctcaatatcaccggcacgccgacctactatctgatagttcagttttacaccggtagccttttcgaaagcattaatcagttccaatacggaaagtccacgacctgtaccgatattgaatacttccactttttccttctgcttgttctccaagatacggcggatagccactacgtgtgctttggccaaatcgactacattgatgaagtcgcggatacaagaaccgtcgggagtatcataatcgtcaccaaacacgctcagtttctcacggatgccgatagcggtctgggtaagataaggaatcaagttctgcggtacaccgttaggcaactctcccagcaatgctgtggggtgtgcacctatcgggttgaagtaacgcaacaagatggcgtttatcggagcaccggaagcaaccgtatcacgtacaatctcttcattgatttgcttcgtgtttccatacggagactcagctttcttaataggtgccttttccgttaccggaagttcgtccggctggccgtaaactgtgcaggaagaagagaatacgataccttccactccatgcttcggcatcaattccagcaggtttatcagtgaaaccaggttattacgatagtaaagcaacggtttctggacagattcacccacagccttgctggccgcaaagtgaatgatggctttaatgcctttatatttggtaaacacagcgtcaagaccggcataatccaagcaatccaattcctcgaatgcagggcggatgcccgataccttctctatgttatctacaacatctgcgctggagtttgacaaattatcaataataacaacttcataacctgcgttttgaagttccaccaccgtgtgagaaccaatataaccggttccacccgtaactaagattttccctttcatattaaatatagataatttagcttttaggttatcaatacgccacaaatgtaaggaaataaattaataaaaacagaaaaagggggataaattttagtttatcccccttccactttatttccggtttttcttctttaaatcttcacaacccccgaaaagcccatgaatgccattgccagcagtccggcagtaatcaaagctatcggagtaccctgcatacctttcggtacactaaccaggctcatttgctcgcgcaggcctgcaaacagtgtcagtgccaagccgaaaccaagtgccgtggagaatgcataaaccactcccgtcagcaaatcataatctttttggataacaaggatagccacaccgagaatacagcagttggtagtaatcaacggcaggaacacgcccaaggcctgatacagagaaggagaaactttcttcaggataatctctaccatctgcaccaatgcggcaatcaccaagataaaggtaatagtctgcaaatagcccaaatcaaaagcgtcgagcacatacttctgaataaggaatgtcacgatagtggcgatggtgagcacgaatgccaccgctgccgacatgcccaatgcagtctccactttcttggaaacccccaagaacgggcaaattcccaagaattgcgacaatacgatgttgtttacaaagattgccgagataaatatcaatatatattccataatcattaaattaagaattaaaaactaaaaattaaaagctcggcagcctaccgccgatacgttctcaattttttcatttttaatttttcattattaattcttcttcatactgttgattaaagcaatgagatagcccaatgcgatgaatgcacccggagcaaggacaaataccaacatgccgtattcttcaggaaggatactcaagttgaatatcttgccggttcccaggaactcacgcacggcacccagtaatgtcagtgcaatggtaaagcccaagcccatgcccagaccgtcgaacaaggaagccaccggattgtttttggcagcaaatgcctcggcacgtcccaatacgatacagtttacaacaatcagtggaatgaacaggcccagtgtggcgtacaatgcaggaacgtaagcttgcattatcatctgcaacagtgtcacaaatgatgctatgactacaatgaatgaagggatacgcaccatatcgggaatcagattcttgatggcagaaatcaccacattggaacatatcagcacgaacattgtagccagtcccatacccataccgttaatggcagaggaagtggtacccagtgtaggacacatacccagcaggagtacaaacgtaggattctctttgataatcccgttcatcataactttaaaattattcatatcttctactcctttctcatttagcgctgagtgtatccacagcttcgggagctgcggaatcagcaggttgttcaacattcttttgagtagcgccggtagtgccgtcggcagtttcctgaccggcataggcagcataagccgcattcactgcattcaaaaaagcacgtgaggtgatggtagacgctgtaatggcatctactttaccaccgtccttgctcactgtcaatgcagcttcacccggattcatgccggtgatgtcacctttattgcctttcttgaaccagtcggcagccttggaacccaaccccggagtttccacatgcgacaacaaggagtagtcgatgattttgccttcagcatcgaaaccgaccaacactttcagctcaccgccaaaacccatggcaacagcttccacagcagctccgatatattctccgcctttggtggcaggatatacagaatactgtactccgtttacttcctgcatcttcttctcggcgatggggtcattgtcgaagcccggaaccaccgcacttacggcatcgctcaaggtctttgcattggcctgcgcaatgggctccttcgtcaattcgtttacataagccagcaacgctacggagattgcggtaacgcccgtaagtaccagcaacatattcttcaaggatgattctaactttttcatttcttcttcgctacctccccaaagcgtttaggtttaacataggtgttgatgagcggagtgaacgcattcataatcagaatggcaaacgacataccctccggatatgcaccgaacagacggatgatgacagtcagtaggccgatgcaaacaccataaatcagcatacctttgtggctcatcggagaagtcacgtagtccgtagccataaagacagcacccagcatcagaccaccggacaacaactgtacgaccggggatacataaagttccggattgaccagatacatgataccggagaacacgaataccgtcaccagaatagataccggaatgtgccaggtgatgattttcttccacaacatgtagaacaaaccaagcagcagcgccaaggcactcacctcaccgagacatcctccattattacctatcagcaggtcgaaagctcccggaaggtcgctcagggacatgcccggagcaccattgatgacacctttcataatagccagcggcgtagcagccgtcgtggcatccgtataggctgtcaactggcctacagccggccatgtcgtcatctgcacggggaatgaaagcaacaggaacacacgtcctgccagtgcagggttaaagggattgcaacccaaacccccgaaggacatcttgcctaccccgatggcaaacaaggcaccaaggatgataatccagatgggcaggttggaaggcaggttaaaggccagcaacacaccggtaatgatggcagaaccgtcggtaatggttgtggtctcttttttcatgaggaatttgccgatggcccattcaaagaacaagcaggctgctacggaagtggccgtaacaatcagcgcacccagtccgaaaaagtaaagcgaaacgaggaatgccggaatcaatgcgataagcacaccgtacatattcttcttcacgctgtcaccgccgtgaacgtggggcgaaagggatacgattaatttattcatacttcgttattttttagcttgacgtgcacggatcatcgctcctaccttacccttacccaagcggatataatccagcatcggacggttggaaggacaagtgaactggcatgaaccgcattctatacacgacataatgtcttctttctctactctttcaaaatctccgtgggccgaaacggtagccagcagatacggctccaaccccatcgggcaggctcccacgcacttagcacaacggatacaaggctgtacttcgccgcgcttggcttccttctcgttcataatcagaataccggagcttcctttggctatcggtacatccgtatttaccagagctttacccatcatcgggccaccgccgataatcttacccgtatcttcgggcagaccgccgcaagcttcaatcagctgcttcatcggcgtaccgatacgtgccaggaaattggacggctttgccaacgacttaccagtcacggtaatgacacgctcaaacagaggtttgttcttctgtacggcctggtaaacggcaaatgcggtacccacattctgcaccacagctcccgtggagataggcagcgcaccggctgcaacctggcgactgatgacagcatcaatcaactgcttttcaccaccctgcggatattgtaccttcaagggtaccacctcgatacctgcatagctggaagcaaccttcgtcatcagctggatggcatcgggcttgttgttctcaatgccaatgaatgccttgttcacctttaccgctttcatcagaatggatacacctaccataatttcttccgcatgttccagcatcagctgatggtcggcagtcagatacggttcgcactctacggcgttgatgatggcacactctgccttgaatgcaggaggaggacacaacttgacctgcgtaggaaagcatgcaccgcccagacctacgatacctgcatcagcgattttcttcacgatttcctcggaggtcagactgcattccttcaccaacgtttcggaacggtcaatggattcttcccattcatccccttctacgtcaatgaatatagcaggcttggcgtaaccgctggcatcgacaatcgtgtcaatcttagcgactttcccgctgacagacgaatgaatggctgctgatacaaaaccgccgggctcggcaatctttgtacccactttcacaacatcacctttggcaacgataggcttggcaggagcaccgatgtgctgtcccagcaagatagcggccttggccggaatctctgccttgatgataggctgatgtgctgaaagtttattttcgtgtggatggactccaccaattgaaaatgtcttcaacatacaattctgtatttttagtcgtttatttactttattaattcatacctcaacttgggaagtctaaacctctgctttaggagtctcaacctcagcattaggagctgcaacctttacttggggagctgcatcgtcagccttcggtttgcgcggcgggaagttgagggctatgattgtgttttgcggacaagcttcctcgcacttgcgacaggatttacacttattggggtcaatgtaagccagattgttttccagcgtgatagcctcgaacggacaaaccttcacacacttgccgcaaccgatacatgccacggtacaagccttgcgtgctacggcccccttgtccttgtttacacactgtacgtaaatacgacgtgatttcttgccttgaggacggatttcaataatagatttcggacaagccttggcacaagctccacaagccgtacacttttcctcatccacttcgggaagtccggtctccggattcatgtggatagcatcgaactggcaggcagccacacagtcgccgcatcccagacagccataactacaacccgtttcaccaccatagagagaagccgcaatggcacaactcttggcgccatcgtattggttcacacgaggacggttggcacaagttccattacatctcaccaccgcaaccataggttcggcagcagcggcatccaagcccagaatctcggcaatctttgtcatgacgggctgtccacccaccggacaaagtttaccatccagcgaacctgcctttacgcaagcatctgcaaatccgctacaaccggggtaaccacatccaccgcaatttgcctggggaagcacctctgctacctgggcaatccgcggatcttcatacacggcgaatttcttggaagccacgtaaagaatagcggccgataccagcgctataactcccaatgaaatcactgcaatcagaattacattcataaattagttgtttattaattatttgttttattattagttagttcatcggtcgtacggagaatgagaacttcttacccatccgcgacttgttcagccacaatatataataataaggtataagaagtgccagcgaacaaagtgcagaacgcagctcgtcattccagatagccataaagacaaacagtgaaattatcagaataaggaaaggaaatataaaggcaaacagaactgccatcactcccattgaaagttcgcccgtcacccatacacggtcaccgggctggtaggatgcggcattggcatcggccacatcgacaagtttctctttcgtatccgcagaggtacaatgccccttgacactacacgaagcgcacgctgaagtctggatgattctcacttggagatgagaaccgtttatgttttccacaataccttgatgttttatagtattcgccattttgcaaagtgtgcattacaaatcacggcaaatttacgcattatttgtgaactgcaaacctttcctatgcattttctgtgttcgtaaacgtgctttttctatgtttttatgttttttcacctgccacagactacaaaaagacaaaaaacagacggtctgtcaaggaaaaacagaccgtctgactaaccaaaacagataatctgttcactccgaacagaccatttgtttatttaccatttataattgataccgaaactgagcaattcttttacctgaaaatagctgtccccttccgtcggcttggcactgtcgtcatagcgggcgtgcacatagagcttggtggaaagatagcggttcagcacaaagttcaccgtgttttcccattcaatacgtgtccactcataactggtctggaagtccaagcgggaatccagcgtgatggaaggaatgatggtccatgaaagtgtaggctgtatctgcgaaccgaagttatgcttcacgcatttgccctcatcaagaccgaaactcacttcattcacccccttatttcctacatagcgcagcatgtacgtcagcggagccatgaaaacggacaagctgaatttctgcttcttcaacttgtagtccataccgatactgcttgaccagtccgccggagcaaagaaagccgaaaccagctcttcactgttggccttgtagccattgcagaactgggtcttaaactcagtcgtgatggtataataccacttggacgcagcctgaatacccagtttactgtacagccggagttggtcggtgcttaccagatagttatgaaactcgtcggaaggtgcggaactgaagcccagcttggcatcgagcagattttcccactgcatcttttcacggtcattatagttggcaaacagttgcaggttggcaagcacggcgttagtgctctcacctcccttgtaccagttgtcggagatatagttctgggtaatctgcaatgaaccgtttccaccggtcacccaccagttgggcttgtggataatcacgtcggcttcctccttcactcccaccatattctcttgtgcaaacagtttcacgacggacggcttggaagaaacctccttctctatattatccttgaatatcttccctttcatcacctccttctcggtcattacaaccagattgggacaattcacatacgtgttcagcagcgtacggtccaccagtttgttggctcggtcctttgaggtgaaactcagtgtgtcgaacggcaacatctcgcgcgtcagggcaggcaccgtatcaggcacctggaaatgccagtccaccttggaaaggcgtctcatgggggcataataataggtaaggggaaggaacaacctatagtagttcggattggaaggtatataacgctccggagtcgtggggtcattcaaataatccagcactccgatatacctttcatataatatggaaacagtatccagcctgtaccccataccttccggtttcaatttcagaatcatgtattctttcattatatccggcaaggtgtcggctttggcagttgtttcctgtccactgttcttcgaggcggtatccagcgtattctgtgccatcaccgacgaagaaatcatcgtagcaattaaccaaaatgcaatgtgtctattcttcataatgccctaaagtctatgtttcgagcgcaaatttagcttaaaatgtttagaaaacatagaaaagccataagaaaaaggcaagaaggactttcttcgatgaaatcgtattttttaataattgtttcatcgaaactttctctacttcctcttttttttataattttgcgctttttaagttctacgtgtactgacgggagcagtgcgcaccctgaacgacaagccgtataggctcttggcattagattaaacaattaataaaataatatagttgtgggagaaacaaagtatattttcgtcaccggtggtgttgcctcttcattaggtaaaggtatcatctcatcctccatcggtaaattgctgcaagcaagaggttacaaggtaaccatccagaagtttgacccgtacatcaacatcgacccgggtacactgaacccttatgaacacggcgaatgctacgttaccgtggatggccacgaagccgacctcgatttgggccattacgaacgcttcctgggcatccaaaccaccaaggccaacaatatcacgaccggacgcatctacaaaagcgtcatcgacaaagagcgccggggtgactatctgggaaagaccatccaggttattccccatattacagacgaaatcaagcgtaatgtaaaactgctgggaaacaaatacaaattcgactttgttattaccgagattggcggtacagtgggtgacatcgagtctctgccctatctggaaagcatccgtcagctgaagtgggaactgggaaaagacgccttgtgcgtacaccttacttatgtcccctacctggcagctgccggtgagctgaagaccaagcccacccagcactccgtaaaggaactgcaaagtgccggtatccaacccgatgtcctcgtactgcgtacggaacatgagttgagtaccaccctgcgcaagaaagtggctctgttctgcaatgtggacgagaatgccgtggtgcaaagcatcgacgcgcctaccatctacgaggtgcccatcttgatgcagagccagggactggacgttaccattttgaagaaaatgggacttcccgtcggcgacactccgggactgggaccgtggcgcgctttcctcgaacgccgtcacaaagccgaagagactgccccgctgcacatcgcattggtgggcaaatatgacttgcaggatgcctacaagtccatccgcgaggccctttcacaagcaggaacctacaatgaccgcaaggtatcggtagacttcgtgaacagtgaaaagctgactgacgagaatgtggcagaagccctgaaaggcatggcaggcgtactaatcggtccgggattcggcgaacgcggcgttgccggcaagttcgtagccatcaaatatgcgcgtacacacgacatccccaccttcggtatctgtctgggtatgcagtgtatcgccatcgaatttgcccgtaacgtactgggttatgccgatgccaactcacgcgagatggacgaaaagacaccgcacaatgtcatcgacatcatggaagagcagaagtccatcaccaatatgggtggaaccatgcgtctgggtgcctatgaatgtgttctgcagaaaggcagcaaggcatacgaggcatacggtaccgagcatatccaggaacgtcaccgccaccgctacgaattcaacaacagcttcaaggaggcctacgaagcagcaggcatgaagtgtgtgggtataaaccccgaatcggacctggtggaaattgttgagattcccgcattgaagtggtttgtcggtacccagttccatcccgaatacagcagtacggtattgcatccgcacccactgttcgtagcattcgtgaaggccgccatcgaaaatgaaaacgaaaagaaataatttgtaataagtaatttgtaatcaacaaagaatggataaaaataccatcacaggtcttgttctgatagcgatattgttagtaggtttcagctttctgagccgtcccagccaggagcagttggaagcacagcaacgatactacgactccatagcccaggtgcaacagcgcgaagccgacttgaaagccaaggcggaagcagccctggccaacgaaagcggagcggaagcaagcgttgactccactgccctcttcttcgacgcccgtcaaggaaccaactcgcaggtaaccatccagaacaacctggcagaaataaccgtagatacaaaaggcgggcgcatagcttcggccacgctgaaggaatacatgggacaagacaagacgacccccgtcacactgttcagcggcaatgacgcttccatgaattttctcttttacaacaagaaagagactatccagacggaagactattatttcaccgcagtaaaccgtacggacagtaccgtcaccatgcgtttgtcggcagacagcaacagctatatcgactttacatatcgcatgcacaatgacacatacctgatagactttactattcaggcagtcaatatggaaggtaagctggcggctaccaacaattatgtggacatcgagtggtctcagcgtgcccgtcagatagagaagggttacacctacgagaaccgtctggctgaactgacttacaaaatcaccggagagggtaccgattatctgtccgccaacaagaacgacgaaaaggaagttccggaacgcctggactggattgctttcaagaaccagttcttctcttcagtatttttggcagatgccgactttgaaaagaccaaactgagttccaagatggagactcaaggcagcggctacatcaaggactattctgcggagatgagcacgaagttcgaccctgctggcaaggaacctacccagctgttcttctacttcggccccaatcactacaagactctgaccgcactcgacaaggggcgtgacgagaagtgggagctgaaccgtctggtctatctgggctggccgctcatccgctggataaacaaatggttcaccatcaacatcttcgactggttgtccagttgggggttgagcatgggtatcgtactgttgttcatgacgttaatcgtaaaagctgtagtattcccggctacatggaagacctacatgtcttctgccaagatgcgcgtactgaaaccgaaaatcgacgagataaacaagaagtaccctaagcaggaagatgccatgaagaagcagcaggaagtgatgggcctctacagccagtacggagtcagcccgatgggtggatgtctgccgatgctgatacagttccctatcctgatggccttgttcatgttcgtgccgagtgccattgaactccgccaacagagcttcttgtgggcagacgacctttccacttacgatgcgttcatcaacttcccgttccatatcccgttcctgggaagccacctcagcttgttctgcctgctgatgacggttaccaacatattgaacacgaagtacatgatgcaacaacaggatacgggtgccaatccgcagatggctgccatgaagtggatgtcatacctgatgcctatcatgttcctcttcatattgaacgattatccttcgggattgaactattactacttcatctctacgttaatcagtgtggtaacaacgctcatcatgcgcaagacaaccaatgaggaagcccttcttgcccagttggaagccaacaagaaagacccgaagaagatgaagaaaaccggtttcgccgcccgtctggaagccatgcagaaacagcaggaacagatgatgaaagagagacagaacaaaaagtagtaagactaccattcaagatattcttttgcagaaagccggacaatgacatttgcccggctttcttatccttacaccaacgaaaaaattcacagactctaaattatgcagactaaatacacctacaaacagatctggcttatagcctaccccatcctaatcagcctccttatggagcaactgataggtatgacggacactgccttcctcgggcgtgtgggcgaagtcgaactgggagcatctgccatcgccggtgtcttctacatggtcatcttcatggttgccttcggtttcagcatcggggcacagatactcattgcccggcgcaacggcgaacggcagtataaggaaatcggtgacttgttctatcagggcatctatttccaagtcggaatggcggcagtcatgttcctgctatcctattgcttctcaccgattatcctgaaacgcatcgtcgcttcggaacatatctacgaagcagccaccagctacctgcattggcgtgtattcggtgccttcttctcgttcagcgcagtcatgttccgtgcctttttcttgggaaccacccagaccaagacactgacactgaactccatcgtcatggtgttgagcaatgtcgtattcaactatatcctgattttcggtaaattcggtttcccagcgctcggcattgccggagccgccatcggctcctcactggccgagctggtttcgctgttattcttcatcctctatacccgcagccgcatcgactgccgcaagtacgggctggatcgtattcctaagttccggctggacgtattgaaacggatgctgaacgtctctttctggaccatgatacagaatttcttctccctctccacctggttccttttcttcctttatgtggagcatttgggagagcgctcgctggcagtgaccaacattgtccgcaacgtgtccggcatactgttcatggtactcatggcgtttgcctctacctgcgggtcactggtcagcaatctcatcggtgcaggccactccgattgcgtggcaggcaccatccggcagcacgtacgcatagcctacgtcttcgtacttccgctggcattgcttttcgcggtgttccccaagctgattctgggaatttataccgacatacccgacctgcaggacgctgccgtgcattcgctttgggtgatgtgctccacctatctgttcctggttcctgccaatgtctatttccaggcagtttccggaaccggcaatacgcgtactgcattgggcatggagctggcaacgctggtcatctacacagcctatatcacctacattattctgattctgcaactcgacgtggccatctgctggacctcggaaatggtttattccagctttattctcattttctgctggctatatatcaaacgtgggaattggcaaggaaggaaaatttagtatctttgcattgaaataactgaaacaaaaagcatatatgaaacaagtaaatctactacttatgtcagcagccatgacattggcctcttgcggaggcacaaaagatgccggacagcagcaggacgcagcaacgctcatccagcggtcggacatcaagattgaaggaaagcgtatgacacccgaggcactctgggcgatgggacgcatcggcagtgtggccgtatcccccgacgaaaagcaaattgcctacacggtatcctattacagcgtgccccagaacaagagtaacagcgaagtcttcgtcatgaatgccgacggtagtgacaatacccagataacgcatgacgcctggcaagaaggacagcccacgtggtttaaggacggcaagaagcttgccttcctttgcaacgaaagcggcagcagccaggtatgggaaatgaatcccgacggcagcggacgcaagcagctgactcaatacgagggagacatcgaagggttctctttctcgcccgacggcaagaaactccttttcattgcccaggtaaagaccgtgaagagtacggcagacaaacatccggaccttcctaaagctaccggcatcatcgttaccgacctgatgtacaagcattgggacgaatgggtgactactgctccccatccattcgttgccgatttcgacggcaatgccatcagcaatgtcactgatattcttgagggagagccatacgaaagcccgatgaagccctggggcggtatcgagcagctggcatggagcccgtcttctgataaggtggcctatacatgccgtaagaaaaccggactggcgtatgccatttccaccaactccgacatttatatctacgaccttgcctccaaggaaaccaaaaacatcacggaagaaaacaagggatatgatacgaatccccaatactctcccgacggcaaatacatcgcctggcagagcatggagcgtgacggctacgaagccgacttgaaccgcttgtttatcatgaacctcgagaccggcgagaaacgttttgtaagcaaggcattcgaatcgaacgtggacgccttcttgtggaacaaagattcccaaagcatctacttcatcggtgtatggcatggcgagacacagatttacaacatcgaccttgccggaaacgacaagcttacccggctcaccgacggcatgtacgactatgcttcgcttgccctttgcggagacaagattatcgccaaacgccactccatgagcatgggcgacgaaatctatgccgtaaacagtgcacgcaacggcgacgcttttgcagaagcagtgcaactgaccacagaaaacaagcagatttacgaccagctggagatgggtaaggtggaagcccgctggatgaagaccaccgacggcaagcagatgctgacctgggtgatttatcctccacagttcgaccctaacaagaagtaccccaccctcctcttctgtgaaggcggtcctcagagtcccgtcagccagttctggagctaccgttggaatttccagattatggcggcaaacgactatatcatcgtagctcccaaccgtcgtggtcttccgggcttcggtgtagagtggaacgaagccatcagcggtgattatggcggccagtgcatgaaggactacttcactgccattgacgaaatggcccaggaacctttcgtcgacaaagaccgcctgggttgcgtaggcgccagcttcggaggtttctccgtatattggcttgccggacaccatgacaaacgcttcaaggcattcatcgcacacgacggtatcttcaacatggaaatgcaatatctggaaacggaagagaaatggtttgccaactgggatatgggcggtgcttattgggaaaagaacaacgctacggcacaacgcactttcgccaactccccgcacctcttcgtcgacaaatgggacacccctatcctctgcatccacggagagaaggacttccgcatccttgccaaccaggcaatggccgccttcgatgcagccgtgatgcgtggcgttcctgccgaactgcttatctatccggacgaaaaccactgggtgctgaagcctcaaaacggcgtgctgtggcaacgtaccttctttgaatggctggacaaatggctgaagccggctaagtaaagcccctcaaaaacaataaaaacaaataatcccggactctttgtcaagaatccgggattatttgtttttatcgtacaccgcccgattcattttttatgactataatttgggcagttcaaataaagtcaatacatttgctttatgcacactccgaagaagtgtaaacaatatgtcctaatataacccgataaaagatgaatgaaaattggcctgagattgtggaaacactgataccgtattttgaaacaaattcggtagaaggtgattaccagcgggaaatagagaactgcttgaaatttcttggatggaaaaagaccaatggaacaatggtatcccagtatacattaccgataggcaatagtaactccatacgcccggacattgtactttggcgaaagaacgaacatgatacacaatcccccgtactcccaattgaaataaaacgtccgtctaatatacaaaatgagaggcaagaaaatcagttgatgtcgtatatgcgccaactgaaacttaatgtcggattatatataggagaaaagatacaactttactatgacattcccaatgatggagagaatcccatttgtgtatttacagcggaaattaaaaaagaagatacaaatggttccatcatctgtgacttattgagctacgacaaattcaatctggaaaaaatagaaacattctgtaatgagcaatataaaaaaatccaagcgcgtaataatctgcataggagggtgtcagaattcttatccgaaggcaatggggtaaagaatatgatttcgttgctcaaagacaagtttacagctgaaggatttgaggaatccgccattaatgaagaatttgccaatcttacgcttacagtacattacgaaaataagagcattctcccttcattacaacttaaaacgaggcaaacatctaaaaactcacaaaacgactataaagaaagtgactccaaagaccatacaaaattctcattggatggaatcaacttctatgtcaaaagacgttttgtattggaagtaatcaagcactatatcaaagaccatcccaacataaactatgttgaactggaaaaagtctttccatccaatttacacagtaaagcattgggtgtaatacgtaccttgatagaagtccaagaaaaaatcaaatctcatcccgatttaaagaaacgttactttcttaagcctgatgaagttattttattggcagacggaacaaaaattgttgtcaacaaccagtggggaacattatttccaagatttcttgaagcagcaaagaaactgtaccaagtaaccaatgatacggaaagcaatactccaatatcccgattaaagattacttttggtaatgggaaagtaattcaagaaacacaagcagccgagactttccggcaatttgtgatgacagtaggtgtggaacaagtgcaatctttaaatatcaaggtatgcaagattcccttgatatcaaacacacttcatgagaaataccagcgcgctcaaaaaccattaggcaacggacggtttcttatgacctgcagcaatacaaaaacaaagaagcgtgatatcgagcgtattgccaaagctttgggtattcaggtgaccgtggaaattgtataatggaagacagtaattcaagagatatgtcttgaaaaatactttttcatgaagagtacgtatattgcgctcaacagtaagatacaccctatcaagaagatatagccatactgttggtaataaatatatcctactattataaaagtctgtattgtcatataggccagagagactatgacatgaggaatcttcagttcattcgccataatctgatacagatgcttgcgatgcggtagcccgatattctcatgaagcatcaggcggtgaatgatagtcagtacactgtccacaccataaacggataaaaggactatccagctgaaatcttccgtttcaatgatgagcctgcctatcaggaaaagaaggataaaggcaatgctcaccgaacccacatcaccggcaaagcatttagcacgcttgcggaaattgaagaagcagaagacaagaacagaacagataacggtatagatgaaatccgcttccacaaaagtaaccacctccttattgacataagccaacgcagcaagaataaccagagagtaaccgccggttatgccgttaatcccatccataaaattgtaggcattgatgatgcccgtacagactatcaaggctatgactatccaccaccaggacaaggagaacagcccccactgataaaacatcatagccatagcagagaaatgaaaaagcagccttgtcatctgtccggtggattttatatcgtccacgaagctgatgaacgtcaccagtgtcaaggcaagcaggaaccagggatattcaaagtcactcgtcaggaaataggccaacgctccgaaatagaaaataatcccaccaccgcgtaaagtcactttcgtatgagaactccgctcattgggcttgtcgatgatattgcacctatcagccaccttaaaataaaaaagttctgccaaaaacagcagaaccaatattaacagataatacataacagtattttcctctttaatttttaattatcaatttttaattcttaacttttaatttgagaacgattttatcgttctcactatcccctcctctgccctcaccggcattctgtcaattcccagggcagcctttattttcgcattactcaccacataattctctgtcaacttgcgcagacgctctgtattcaaaggcaaatggagcagagtcccaagccgggcacagaactccatcagtcctctgtttatcttccagatatgcggcttacgctccaaagcccgacacatcaaagctatcagctcatttgtggacaaggcctcgtcatctcccatgtggtagataccactcgccacctctttagtcagcagtccttccagcacatagcaaagattgtctatcgaagtaaaagacctcctgttctcaaaagcccccaaaggccagggaacacctttcctcaccacattataaagaagattcagattgcccttattgccggaaccatgaatcatgcagggacgcaggatataaacctgcttgtcatcataaggattagctttcaatttcccattctcaaccttcaacttgtcaaggatgtaattctccgcagctatcttgctttccccatacggccttaccggggcaggcaccacatcttcagtcagcatatcacccaccacactgtcggcagcagcttttaccgaactgaagaatacgaacttcttcgcagacgattccagaaaaaaatcaaatatcttttgggtcaatcccgtattaatatcaaaataggcttgggcagcagaccggttcttcgtgtcatgggctttaccagccagatgaataatggcatcgaattcaggaagattccgcatcggaaaagaagctggttcaatatccttccaggagaaagtctttaccaccccctccttttcaggagcaacaatatccagcccgtaaaggctatgacgttcctttagggcaacaacgagattagaccccacaaagccgtggattccagtgataagtatgttcattgaaatatgctaaaaaatatactgaccggaaacgtggttattagttatgtatttaataaaataagtatctccaatgagagagaaaaaaacataccacgtcgtattagaattacgttggtaagtgatgtaatacatatccttaccataacgctcaaaaaaagcgggcgctttcttttttaatttagaatgaatgttctgttgaatatcagctatcagttcttctacataagaaatagcaaaaggataagtacccaaatactccttctcaacaagtatttttataagcccatacaaatcctcctctacttcgggagcgaatacgactctcatccaaacaaagcctttatacgagggcaaagcctatccaataattcttcaccggaaatagcatgcctaatgtcatcacgtccttccgtaacgatattcggattattctcattacccgtatatacaactaccggttcaccaacattcggcaccatcggttcttgttccttatatggcttaatcttcctcatacatccaatcttttcacaaagatacccggaaatatcaagttatcctaatcattgactgataaatatcgtatgttcataaagtttcaaccaagtctacatatttttgagttaccacatccttggaatataatcgcttaatcacctccacaccatttcgacccagtaaagccagttcactttttgagacggaattcagccaatccaccatttctcccaccttcttttccaaactcttctctgtaatcaattttgcacagccatgttcctgcaggaaattgatgataggcgtatcctttcccgagcagaccaataaaggcctaccacatgccatgattgtataaaccttggaagggaatccctgcatctccatttcagggttcatgaaaataaactggatgtctgaataggcaagaatggacggcatcaaacttctgggctgatagggcaaaatatgcacattatccagttccaactcacgtactttctcctcaagaacgggtttcatgactccctcaccgatgataaagtattcaatggaaacccctttcgtcttttctgccagacaaattaagggctcccaatcttgggcataaccaatattcccggcataaagcaatttcaaagaatctgtggcagggaaaaaatggggattcagacattctacatttccaccctgagaattatacaattctgtatctacaaaattaggtattatacaaagcttggacttatccttaaaccttccggctattacattataaaagacctggtctattgtcgttacggccgttgagttattataaacataccgttccatcctacgtagctgttctataacaagcccgtcctttcgtttcaagatgtcaggatatatttcctgcacattatatatggttttacatcccttgattttcgccagccaaatgttgattacaccgatagtcaaaggaggggaaggtgacagtatgacatctatatttctctgggacaaaccaatcaggaaagagataatatgccaatagacaaatcccaggacacgcagaaatgtatttctgaatttcttctggggtacatgaagaactctgattccatgaaaacagctttctttacaaatcccccaaaccttccatttcagaggttgtgctgccagttgtgattccacaacattgtaatgaggcgtagttgtcaataccaatacttcataaccgttttcttggaatttcagagcaatatcattataaagataggctgtcgaaactccatccggactgaaaatcaggctatgtatcaagattttcttaggcatgtctcaccattattttctccaaaccatcttgttcaccacccccgtatagctctgaatcaacttcacaaccttggccgatacattctcatccgtataattgggcaccggcaggccatcgtcctcattcctgttcatctccacggcagtatctacagcctgaagcaaggatttcccgtcaatgccggcaaggacaaagatacccttgtcaagagcctcgggacgctccgtactcgtacggatgcatacagcagggaaaggatgccccacagaagtgaagaaactgctctcctcaggcaaggtgccgctgtcactcacaacggcataggcgttcatctgcaggcagttgtagtcgtggaaaccgagaggttcatgctgaatcacacgtctgtcaagtgcaaagccgcttgattccagacgtttcctgctacggggatgacaactgtaaagtatgggcatgtcatatttctcggccatagcgttaaccgcgctgaaaagggacaagaaattcttctccgtgtcaatgttctcttcccggtgcgcggagagcaggatatatttccctttctggagattcaatctctggtgaatatcgctggactctatttctgccaggttcccatgcagaacttcagccatgggcgaaccggttacgtatgtacgttctttcgccacgcccgaagcgttcaggtatctgcgggcatgctccgaatagcagaggttcacatcggaaatgacgtccacaatacggcggttagtctcctcaggcaggcactcgtcaaagcagcggttgccagcctccatatggaagatggggatatgcaggcgtttcgcgcctatcacgctcaggcaggagttcgtgtctcccaacaccagcacggcatccggcttcacctgcaccatcagtttatagccggcgttgataatattgcccatcgtggcaccgaggtcatcgccgacggcatccatatacacatcggggtctttcagcttcaggtcacggaagaagacaccgttcaggttatagtcgtaattctggccggtgtgggccagaagacagtcaaaataactgcggcatttgttgatgacagccgccaggcggatgatttccggacgggtgcccactataatcagaagtttcagtctgccgttctcctgaaacctgacttgcgaataatccaatttcatatccatctgttcctatattctttaactcgtttcagactttttcaaaataagtgtccggacgtgccgggtcgaaacactcgttgcaccacatgaaggtcaccaggtcttccgtttccgaaaggttgacgatgttgtgcgtatagccgggaatcatctccacgacctccatcctcccgccgcttacctcgaagctgacaacctcctccgtacctatcttgcggagctgtatcagaccgtgcccgctcaccaccacaaacttctcgttcttggtatggtgccagtgctggcctttcgtaatgcccggcttggagatgttcaccgagaactgcccgcggtcggaagtacggataatctctgtaaaactgccgcggtcgtccacattcatcttcaggggatagctgaaccgttcttcaggcaggtatgagaggtatgtggaatagagtttctttgtaaaggcatcgctcaaatccgggacggacaaggtaccgggcatttgcctgaaagaccttatcagttccacaatgccgcccaaggtaatggtgtgtaccacgggcacttcgcaataatccccgttgcggtgttccctgccgctcagggcagagacaagctcgtccaccacatcgtctatgtaaaccaggtgcatcaccaccgaagggtcgttcacccggatgggcaagtcatgggcgatgttgttgcagaaagtggccaccgcgctgttatagttggggcggcaccatttgccgaaaacattcgggaagcggtacaccagtacctttgcacccgtttccctggagtactcgaacaacagttgctcccctgcccgcttcgattcaccgtaagggttgtcgagtgcggcctgcgtggaagaggaaatcattaccggacaggtattgccgtacttcttcaatgtatcaagcagcgtggaggcgaagccgaagttccctttcataaactcagacgcatcctggggacggttcacgcccgccagattgaagacaaagtcagcctgtttgcaatagacatccagttcggcagggtcactgtccatgtcatattcgtaaatggcaagttcctcacctgcaatgccgtaattacgggctttcccgtcacggatgttgtgcagctgggatacaaggttccggccgacaaaccctcgggcgccggttactaagattttcataaactaatgggattggataggatggaaaagttaacaatggctatactattcactcttgatttccgcgctcttcgccttttcctccattccgaggtcttcgcggatgaagcggagtttcaaaagaagctttttcatgccctccacatccaggcgggcggtgttatggctgtgatagtcctctatacgggcaatatcctcattgccttccgtgaagaacttgtcatagttcaagtcacgggtgtcgcaggggatgcggtagtagtcgcccatgtcgacagcctttgccatctcttcgcgggttaccagtgtctcatacagtttctcgccgtggcgcgtgccgatggtcttcacctccgtctcaccgtatttcggatcaacctgcgcgtatgtttccttcaaggcccgcgccagtacatccaaggtggcggcaggagccttctgtacgaataggtcaccgttatgcccgtgctcaaacgcatagattaccagatccacggcatcgtccagcgtcatcatgaagcgggtcatgttggggtctgttaccgtaatgggcctgccgttctttatctgctccacccacaacggtattacagaaccgcggcttgccatcacattgccgtaacgggtacagcagatggttgtaccggcttcctcacccagcgcacggcccttggctattgccaccttctccatcatggccttgctgatacccatggcattgatgggataggcggccttgtcggtagaaagcacc

SEQ ID NO: 4503 - DNA, 456 bp, Unknown
  gut microbiota DNA sequence
ttagcgttttctcccggacgaaccagtttccaaccgtcattagagaggaatgcacgttcattgtaatgttcgaatccaagataatcatgtccttcacgatgtccggtcttgaagataggaaccagactcttgccttccaatggaatgatgtcatttcctttatatttggtaggataagtagcgcctgccatatcgatacaagtagccatgatgtccatcacatgtccgatttcgggagtcgttttgccgacattcttcttgataccttttggccagtgggcaatcattggagtacagattcctccttcataagatttggctttccaaaaacggaacggcgtgttggctacgtttgcccagcgtgctcccagtgaagcataagttgtttccgggccaggcagcacttctttgttatgaggataaaccattttctcccctttacgtgtcatatcagga

SEQ ID NO: 4504 - DNA, 324 bp, Unknown
  gut microbiota DNA sequence
ctcaattcttttgtctatatctgcaacatcaagcggaatgcctagcctatattacatctccatatcacgagctggtgatgtaacaggcaatcctaatctaaaagtcaaagtcctctcaggtagctataatattaagattaaagctaagactgaagctgatgggaagtgccgtgtttatgctgaacggctgcaatatacacctattttggatgcgcttcttatgagttcttttggcatatcaatgaagatggaagcagcggataacagtgcattcgaaggaggatttgaagctacatttgatttgtagaaatgctcagtaacttt

SEQ ID NO: 4505 - DNA, 1326 bp, Unknown
  gut microbiota DNA sequence
agggctgcctatttgcttatttcgtttcaaatcaatacttttaggctttcgttcaaccttttaatacgaatcatgctatggaccaattacttttctggctggttccggccgcttccgttctggcactttgctttgcctggtatttccaccatgaaatgatgaaagagagtgagggtactcctcagatgattaagattgctgctgctgtgcgcaaaggtgccatgtcctaccttcgccaacaatacaagattgtgggttgggtgtttctgggactggttatccttttctctgttatggcatacggattcggggtgcagaactcctgggtgccgattgctttccttaccggaggattcttctccggactctccggctttctgggcatgaagacggctacatacgcttcggcgcgtactgccaatgcagcccgcagttcgctgaatgccggattgcgagtggctttccgcagcggtgcggtgatgggactggtcgtggttggccttggtctgcttgatatatctttctggtatttgttgctgaatgcagtgattccggaggatgtgatgacacccacccataaactctgcatcattaccactaccatgctgactttcggtatgggcgcttccacgcaggcactgtttgcacgtgtgggtggaggcatctatacaaaagccgccgacgtgggtgccgaccttgtgggcaaggtggaagccggtatccccgaagacgacccgcgcaaccctgccacgattgcagataatgtaggcgacaatgtaggcgacgtggcaggtatgggcgccgatttgtacgaaagttattgcggttctatccttgctacggctgccctcggtgctgccgcttttatacactcgggtgatacgctgatgcagttcaaggccgtcatcgctccgatgctgattgcagccgtcggaatattgctttccattatcggtatcttttccgtgcgcaccaaagagaatgcaaagatgaaggacttgctgaactcgctggctctcggtaccaatctcagttctgtactgatagtcgttgcgactttctttatcctttggctgctgaagctggacaactggctgtggatttcctgttccgtgatagtgggcctgatagtgggtatcatcatcgggcgttctacggagtactatacttcccaatcctaccgtcctacccaaaagctgagtgaaagtgggaagaccggtccggcaaccgtcattatttccggcatcggcttgggaatgctctccacggccattccggtgattgctgtggtggtgggcatcattgcttcctacctctttgcttccg

SEQ ID NO: 4506 - DNA, 58518 bp, Unknown
  gut microbiota DNA sequence
ttgggcatcacgcttgccacagatgcttacggaccgatagccgacaacgcgggtggcaatgcggagatgtccggtctgggtgaggaggtgcgcaagcgtaccgatgcgctcgactccttgggcaacactacagccgctacgggcaaaggctttgccatcggttccgccgctttgacgggattggctttgcttgcatcatacgtcgaggaaatccgtatcgggctgacccgcctcgggacaaccgaactgtcgcttcctcatggcgatgccgtgtctcttcaaaatgccactttctttgactttatgcaccactatgacgtgacgctgatgaatccgaaggttctttccggcatgttcctgggttcgatgatggcatttcttttctgtggattgacgatgaatgcggtagggcgtgcagcggcccatatggtagacgaagtgcgccgccagttccgcgaaatcaagggaatccttacgggagaaacggagcctgattatgagcgttgtgtggcaatctcgacgaaaggggcgcaacgcgagatggtggttccgtcactgatagctatcattgttccgattgctacgggacttattttcggtgttcccggtgtgctcggcctgctgattggcggattgagcagtggtttcgtgcttgccatctttatggcaaatgccggtggtgcatgggataatgccaaaaagtatgtggaagaaggcaactttggcggcaaaggcagtgaagtccacaaggctacagtcgtgggtgacaccgtaggagacccgttcaaggacacatccggtccgagcttgaatatcctaatcaagctgatgagcatggtagccattgtgatggcagggcttacggttgcgtggagtctgttctagaaagagtttttccccgtatcccaccaaaggcgggtggcgccgttatctgcgccacccagtttttccgtgagggtggcgtattgtgccgggtcggcagtggcggcgtccgtcgagaacggaaggcggcggatcatgatatccgtatcaatcacttttccggtgttgctttggaccttgaaaagtttggggtatccggtacggcgttgctcagcccatgcctcataactttcgggccagcatgccagccacttctgggtaataatcttttcgagtttcgtctctatgtctgcatcttcttcccatttgggggatatggtaatcaaggctttcatgtccttgcctaccttgccgcccgagactacatctttataatcggcaggggttttgtcgctttccagatattcggaggcaccagcacagtcccactgtgtaaatgaagtacttaccccgtattcatagcatgtgcggggattctctttggtatagccacggagggctgcttcggccctgagcagccagacttctgccgcactcatcaatacggctccggtcttttcgccgatggtacttgtgttgagggaagagcaaaaactgtaaatgttggcgtcaccgtctttcatgggtaacccgatgggaatgcctaacaactgtttttgataaccttcgagaagggcggtgttataccatttcttgccacgcgggtcctcataaccgttgacaatggattccatcgaggcattcatgtagacttcaccccaaccggcaacggcacacaaaggattgatatagttcttgcccattacagcgatggtttcccttgcaccttccagtacaccttgattgtcattcagtgctttggttgcttggtctttggcaagtgttgcatctacattggagatgcgcatggcaaggcgcaaacgtagtgagttggcaaactttaaccactccttcaaggtcttgccgttggtcagcatatcatactctttgaatttgttgttgtcaccgccctcgtccaggtattcccttatcaattgctgcccttcgtccaggtctgcaaagaagcgtgtataggcttcttgctgtccgtaaacccggggtgtctcacccagttgatggtagaccagcggaccgtatgtatcggcaatgcggtgcatcagttccactttcaaaatttcggtaatgccgaggtagcctttcaagttgtcattgccataaaagttcttttctgccttctgcacctccgtgtagacatatccgtaagtacattgccatgcggcattggtccagcctgagttcaggttgtagcaggcgttggatttcatgaatttaggaatagggtccatgaagtagccggagaacatgtcatggttcagggattgtgtcatctgccatacccaatttaagcctacagaacctatattgaagtagatgcccgactgtatgggttcgaatggagcagtcaggttctggaaatctatttcctttttgtcgtccgagaaacctcccttgatttcgttgtcgttctcaaaaccgccggtgcaagctgcaagcagcaatatgctatggcagaaaaggaatatgatgcacttgtttttcataaggtattcattttaaaaggttaatcttaggttaaagccgatattccgggtagtaggcatgccaaacacgtctactccttgattgttgttgcctacggacattactgcatcggggtcgaacggtgcttccttctttaagaaacacaagttgcgcgctgccaatgatacgtcgattccctttatgaatctactgttttccagtatcgttttcgggaaagaatagctcagtgatacttcacggagtctgatgcaggttgcgtcgtacatataatattcggagatggcatttctgccgcctactgcgctgtaaaatgctctcgggtcgttgaacttctgtccctggtattctacatatccccgggtgcgggcatcttcggtgactttggtcacgccgttggcatccaactcagactgtgtcagtgacatgacttcgccgccaaagcggaaatctatcaggaaatagagctccaggttcttgtaggtaagtgtgttgctccatcccatggtgaagtctggattggcattcccaagcaaatccttgtttccggtatttcccaaaggccttttgctggtttcatcaaccatgatgctgccatcctcgttacggcggaaagcatttccataaatatcccccaggctgcctccttctttgacgcgcatctgatagcctgcgttgaaaccttcttcgtagtaggaaaattccggatagtcaggatgcagggtcactactttgttcttgttggcggacatgttgatgagactcttccacgaaaagtttctgtatagtagcggagtggcgtctaccgtcagctcaaaaccctggttacgtatttttccggcattgacataccggtatttataggtggagcccgtaggattgtccattctcaacaactggttcttggtattggtctgataccaagtgaagtctatcccgaagcggtgatggaagaagcgccattctgtaccgaattcgatggagctgctgatttccggttttaggtcaccgcgctgttctacggtatttacattgatactgccgcctaccatgatgatgtctaccggattggtgattcctatcgggaggtcattaccgacttccgcccatgaagcgcgcacttttgcaaaacttatccatttgggcagggagcaggttttgttaagaatccaggtagctcctatggagggatagaagaatccggtattcttgctgtctgtgtgggctaatgtggatgaccagtcgttacgtgcggtaatgtccaagtatagtagtcctttccagccccactgcatggtggcaaatactgattggagcgtgcgtttgctgtcgatgctctgatttacggctgctttggagtccatcactacattggggacggtaaatacattcggtttgtagagggaagcaagccttgagtctatcgtcagtgaattgactttactcatgttgatgctggctcccagtgccgtattgagggaaaagtcatcaaattccttgttgaacaagaccattgcgtcaccgtagacttggatttcctggctgtccgaccagatgtaacgtccgttttccttgtcctcgtatttgccggcgatgttgggagctgtagtggcatacatcttattgtcgaatttatcactgatataatccacattaccccgtacctgcaggttgaagtagtccgtaatgtgcagattggctctggccgatgccacagcgcgataacgcttgtagccactgagcacgcggtttttcagccagtagggattctgtccccattcactgacggtaccatctccattcttttcaatccagttttgtgtcatcatattgcggtcggcattccacgtttcaaagttttctctgtaagtgctcatgtctacgccacgtgggaaactgtacaagctgaccagcggattcagataatagccgccggtagcaggggagttcttgacggtttgggtcattagtgttgcaatgccgtccagtttcagcttgttgttgaagaggctggccgtttcgtgtaggttcaggttattcttctgtagtttgttattgtccacaattcctttagccgtggtgttggcgtatgagaaataagtttgtaccttttcatttccggtagtgatggccagcgaattgaaagtggtgatgccattgctgaagaattcgcctatgttgtcatagtccgttacattgccttttgtaccccagcttgccgtaccgccatcttcgttccggccgtatgtattttggaattcgggggtactgatggcgtgacttacggtcaggttggaggagaatgtaacgcgctgcagtccggcctttccctttttagtggtgatcagaatgacgccattagctgcctgcgaaccataaagcgcggcggcagaagaacctttcaggatgttgatgctttctatgtcgtccggattcaggttggaaatcccgtcaccggcatcacggttcaatccatcgtagttaccgccgattacggtggaggtggattctgttgagctgttcagcataggaacaccgtcaattacgtacaagggctggttgttgccgctggcaaatgcagagcgtgcaccgcgaatgacgactttggcagaacctcctaaattggcggttttattgatttgtactccggccgtctttcctgccagtgtattaatcatgttcggctctttggcacgggtcagctcactgctgcttatctgttgggtagaataggtcaatgaggacattttcttctggatacccatggcggttaccactacttgctccagggcgaggctcttttcttccatccggatgtggagattatttctaccgttcagggcaatggtttgcggttcataactgatgtaggatacgacaatagtggcataaggagggatattcatactaaattctccttcggtattggtgataacaccattggcggtccctttttcaagaatgttggcaccgataatcggttcgcctttggagtccgtcacctttcctcttacagtagccatttcctgcagagtgtctgtcttatcctcagcactcctgctgtttttggttaaaacgatgtttttgccttccatcacatacttgatgtctgtccctttgaacatttggtcaagtacttcggaaacagtttggttgcttgcattgatgtcgacggtacggcgtacatcgacgttctgtttgttatatacaaataagtattctgtttgcgattcaatttgctcgagaacttgccctactctcagccgggcattttgaatgctgaccctggcattctgagagtagcagttcccgctgtacacctgaaatataacaaacaggagaaggaataatgtgattttcataggtttgcaataattgcttaaaatctaatttttttagataaaaaagcctcatcaacaaaatttttctcatatctttgtcactgtgttaagttaataaattgattaaggtcgatttttgactgtttcggatcggaaagtatgggggtactttccgatctttttttcttactcatatataacaattgaatccttttcttcgttgatgcggaacttgaaaggatggtctttcgagatggtccgcagtatatgttcgatgccgtcctgctctctgaacttgccggtaaagctgccgtagttcagcagttgaggactggcaacggttatctttacattatagtatttctccagtctaccgaggataccgctgaatggagcgtcgtcaaaacagtatagtccctctttccagcgtagatattcataggaaggaaggacggcctttctacattttccgttttcattgagaaatacctcgtctttctgcaacctggtgattatctggctgctgttggccggatagatatcgacgataccttccaccaatgtggttccgaactcatggctcccactgtaggcacagacgttgaaactcgttcctacaacttttaccttgttcgtttctgtatgtacatagaatgggatattcttgtttttggctacttcaaagtaggcctctccgtccaattccacatttcgttcgttgcgtccgaagttggcggcatatttcatggtggacttggagttcagccatacgcgtgttccatcggcgagggtaatttgggcccgttgtccggcaggcacagtgactgtttgcaactgcacctccttgttatataaaaagtcggaggtgatgaaataaccggcaatggcgacaatggtgacggcggctatacgggccgcccagcggagcatcggcatgatgcgcaccgttttcttttcattgtttccctgcttgtccgagaacaaggaaatgtcgtatatcatgcgctctttcaggaagatgtcccggttttcatccgaggcgtctatccagtcgagtatcatcttttcttcttcaacggaagtaatacctttgaaatatttatataatagctcttggttcattgtcaataatttatttcttttctaaaacgtgctctttttaccttttgtatatataaccggaaagtgggcggtaaccctattccgtagaagcattttttaggatattaatattatgagtatggtaacaagataatctttcagtctcagccggagaatccgcagcactttggtgatgtgtgcctctacggttttaagtgatatgtccagactatcggcaatctgcttgtttgccaggttctggtatcggctcaacatgaatatcttccggctttgctcgggcatttcctgtaaggtcttatttacgatatgctgtatttccgtgttgaatatctggtccggttcgcaggctttcaaggtggagatgcgtaagtccagttcgcgcaggttgtggctgctgatggtttcttccgctcgcagacgcacctgcttgtgctcgagtacgtgcagggctttgttctttatgatggtcagcagcagggcatgcaggttactgttttcttcccagcggtctcggttttcccataaggcaatcatggattccatcacaacgtcttccgcttctgctttatccctgagataagaataagcaaaagccaaaaacttttcttggttttcctggaaaaagcgtgagaaaagattcatagtatgtaggctccttaaaccggacattaattgaggttctttatggaatataaggctttacatagcaaaaaaacataatctttttggaatatgcaagcattatgccttgttttttcagagccatttctggcagtattgacaaaaagaaagcctgatggggttccaccaggctttatatacttaaagaataagagatttcttatttcttttccggtctttcttgtctttccggtctcggaagcaatactttgcgtgacagcttaaattttccggtcttcgggtcgatgtcgagaagttttacgtcaatttcatcaccttccttgataccggcttcttctactgtttccagacgtttccagtcgatttcggagatatggagcaagccgtccttacccggcaggaattcaacgaatgcaccgtaaggcataatggagcgtaccttgcctttgtagacttcgcctacttcggggacagctacaatccctttgatgatacgcatagcatcatcgatgctcttcttgttggtaccggcgatttcgattctaccgatgttgtccacttcttcaatagtaatggtagcaccggtttcttcctgcataccttggataatctttccaccagggccgatgacagcaccgatgaattccttgggaatggtcattgtctcgatacgcggagcgtgaggtttcaggtcttcgcgaggctcggcaatgcactcggtgattttgcccaagatatattcgcggccttctttagcctgcagcaatgccttttcgaggatttcgtatgacagaccgtccactttgatgtccatctgagtggcggtgataccgtcttttgttccggtcaccttgaagtccatgtcgcccaagtggtcctcatcaccgaggatatcggacaatacggcatatttgtcttcgcctgcattcttaatcaatcccatggcgatacctgataccggtttcttgattttcacacctgcatccatcaatgccagagttccggcacatacggtagccatggaagaagaaccgtttgattcgaggatatcggataccacgcgtactacatacggatagtttgcaggaatctgacccttcaatgcacgccatgccagatggccgtggccgatttcacgacggcctacaccgcgctgtgccttggcttcgcccgtagagaacggagggaagttgtagtgcagaaggaaacgttcttttccgtgttccaatacgtcgtcgataatcttctcgtccaacttggtgcctaaagtcacagtagacaaagactgtgtttcgccacgtgtaaagatagcggaaccgtgagggccgggcaggtagctggtctcacaccagataggacggatttcggtcgtcttacgcccgtcaaggcgcttgccttcgtccagaatggaacggcgcatcgcctctttttccacatcgtgatagtaacggtcgatgagggctgccttttcttccagttcttcttcggagaactgtgccttgaattcttcgcggatggcatcgaaagcatccatgcgttcgtgcttgttcttgtttccggaagcggcaatggcataagccttgtcgtagcaagcgttgtgaacggccttacggagttcttcgtcgttcacttcgtggcaatattcgcgtttcacggtagagcctacttcttctgccagttccatctgtgccttgcactgaatcttaatggcttcgtgtgcggccttcatcgcttccagcaagtcctgctcggaaacctcgtccatttcgccttccaccatcatgatgttttcataagtggcgcccaccatcaagtccatatcggcttgttctagttgttcgaaggtagggttgatgacgaattgtccgttgatgcgtgctacgcgtacttcggaaataggtccgttgaaggggatatctgaaactgcaagtgcggcagaagctgcgagtccggccagagcgtcgggcatatctacgccgtctgctgagaaaagaatgatgtttacgtatacctctgcatggaaattatcagggaataaggggcggagagcacggtcaacgaggcggcaagtgaggatttcgtagtcagaagcgcgtccttcgcgctttgtgaaaccgccggggaaacgtccgaatgcggagaatttttctttgtactctacctgtaatggcatgaaatctgttccgggaactgcgtccttggcggcacaaacagtagctaaaagcatggtgttgcccatacgaagcattacagaaccgtctgcctgttttgccagctttcccgtttcgagcgtgatggttctgccatcaggaagctcgatcgtcttaacaattgggttaatcataaaaaatgttttatatctaattttctttcaaaattcgtgcaaagatacataatttattcatgtaaaatggtgggaatgagataaaaagtttgtatttagttgttttttgcagttttctatatggaagaacgagggaaaatgctttgactgaacttgaaaagaagtatatttgcaggcacgtttgcaaaacaaaactgaagatacgatatgaagaaaatcttttttatggcacttgctgcaatagcattgggtgcatgtaattccgaaccgaaattcaaagtagagggtgaagtgtctggtgccgacggcaagatgctttatttggaagcctcggcattggaaggtattgttcctttggattctgtaaaactggaaggggatggctctttccacttcaagcaggtacgtccggtgtctccggaattttaccgtctgcgggtagacgacaaggttattaatttctcggtagattcgacggaaacggttttggtaaaggcaccttataccgatttcgccactgcctatacagtggaaggttctccgaatagctcgaagataaaggacttgacgctgaagcagatgaagcttcaggataatgtgaatgcattgctgcagtcggtgcaggcacataagataggtgccgatgtttttgaggacagtcttgcctctttattgaagaactataaggatgaagtgaaaatcagctatatttttgccgctcccaatacggctgctgcctatttcgccttgttccagaagttgaataattatttgattttcgaccctctgaacaataaggaagacattaagtgttttgcagccgtggcaaccagcctgaacaattattatccggatgccgaccgctccaagaacctctacaatattgtgataaagggaatgaagaatacccgtactccgcagcagaaggtggtggaaatccccgaagaggcaatttccgaaaccggcattatcgacattaacctgcgtgacatgaagggcaatacacgtaagttgagcgaactgaagggcaaggctgttattgtggacttcactgtttatcagagtgccgtttctgctacacataattatatgttgcgcgacttgtacgacaagtatgccgcccagggattggaaatctatcaggtttctctggatgcagacgagcactattggaaaacaactgccgacaatctgccttggatttgtgtgcgcgacggcaatggaatttattcgtctatagcggcttcttataatgtgaagaatgtgccttctgtgttcctggtcaacaagaacaatgagttgagtgcccgtggagagagcattaaagacctggaggcggcagtgaaagcattgctgtaacatgttataaataagaagttttcgtttaaatatgttacaaagcagccttttatgcttgacacgcattgtataaaaggctatctttgcaaaggaaaatcggaaagagggttccagcatgctgaccatgttggaattcttttttgtttatagtaccattaaaaactaacataacatttaaggaggaaaaagtatggcttatatgtcagaagacggctacaagaaattgatggccgaattgaaacacctggagacggtggaacgtcccaaaatatcggctgccattgccgaagcgcgtgacaaaggtgatttgtcggaaaatgcagagtatgacgctgccaaggaagctcaaggtatgcttgagatgaaaattaacaacttgaagctgaccattgccgacgctaagattattgatgagtcgaagttgaaaaccgattctgtacagattctcaataaggtagagcttaagaacgtgaagaatggcatgaagatggtttatactatcgtttccgaaagtgaagccaatctgaaggaaggaaagatttccgtcaatactccgattgcacaaggtctgcttggcaagaaagtaggtgacatcgcagaaattaaagttccgcagggcatgattaacctggaagtagtgaacatatccttttaaaggaaggcaggtccgcatacgggcttgccttattttataatttatagctatggcaacaatattcagtagaattatcgcaggtgaaataccttgctacaaggtggcggaggatgacagattctttgcgttccttgacatcaatccgttggtaaaaggtcatacattagtcattcccaagcaggaagtggattatatcttcgatttgaacgatgaggatttggcggcgatgcatgttttcgccaagagagtggcacttgccatcggcaaggcctttccgtgtagaaaggtaggagaagcggtattggggctggaagtgcctcatgcgcacatacatttgattcctatgcagaacgaaaaagatatgcttttctccaatcccaaactgaaactgacggacgaagaattcaaggctgtggcagaagctatccgtgcagtgctttaatcggtttattttcctcccctaaataaacggaagcgggagttggacttcatccagctcccgctatttttttgccttcggcacctatcctttaatttttaatttaaatgtattcctctcccagttttatctgggcatcattcacatatttgcggatggtatgttcttcatctttcttgcaaatcagtaatacattgtccgactcggctatgagataaccttccaaaccgtcgataactgcaagtttgttgtcgggcagcaccacgatattgtctttgctattatagatgagggatttacattttaaggctacattgcctgcttcatctttgggagacaaatcatacaaagacccccaggttcctaaatcagaccagccgaaatcgcctaatgacacatatacattgtctgccttttccatgatgccgaagtctatggagacattggggcaagcagggaagttctcatcaatgaattgtttctcttggactgttccatacacatctttgccgggggccagtttggaagtcagctcgggcagcagggcttcgtttgccttgatgatggtatttacgttccacatgaacagaccagagttccaatagaattctccactttccacgaatacttttgccagttccagttcgggcttttcagtgaaggtttttaccttgtagaaattatcaccggcggcttcggctatttgtatatagccatatccggtttccggacggttgggcttgatgccgagtgtcagcagattgtccgattgggaaacgaagtccagccctttttcgatagctgccagaaattcgccttccttcaggattaagtggtccgaaggagctaccactatattggcgttcggattcaaggcgcagatatgataggaagcccacgcaatgcagggggctgtattcctgcgtgtcggctccagtagaatctgttcgggtttaagttcgggaagctgttcttttacaaggtcggcatacaagtcatttgttacgataagtatattttccatggggattacctgcttgaagcggtcgaaggtttgctgcagcaaggaacgtcctgtaccgaagaaatccagaaactgttttggaagtgtcttgcggctgaatggccagaaacggctgccgattcctccgcccataattacacagaaattatccttattggttaccatgctattgattttaaaagtttctgctaatgtactgcatattttacaaacaaggaatgattcaagcaggttttatcgtttttttcgcctttttttaggaaaagtattgcaggtttagaaaaaagctgtatctttgcaccgcatttgagaagtcaaacatgcccagatggcggaatcggtagacgcgctggtctcaaacaccagtggattcacttccatcccggttcgaccccgggtctgggtacgaaataaagaagcggggaaagttttaatgcttttcccgctttctttttatacttatcttttatgccctttgctcatgggaacagatatctggcaagagatagaagtactgaatcaagaatttgtgaggcttggtatcagtcagtcggtagactatgaaaagtactacctctattcgcttattacccattctactgctattgagggctctacacttaccgaattggatacccagttgctttttgatgagggggtaacagctaaaggaaagccgttggtctatcatctgatgaatgaggatttgaagaaggcatacgaactcgccaaagaagaaagtgcacaaaatgcggaaattacgcctgttttcttacaaaaattgaatgctgctctaatgcgtactactgggagtgtatataatgtaatgggcggttcttttgattcttctaaaggtgaatttcgtttgtgcggcgttactgctggggtgggcgggtgttcttatatgagctatcctaaagttcccgctaaagtagaagaactttgttctatattgagagaaaagcaaaagaatatggaaacatttcgggaacgatatgaattgagtttcaatgctcatctcaatttggtaaccgttcatccgtgggtagatggcaatgggagaacggctcgtttgttgatgaactatatccagttctgccatcatctttttccgacgaaaatctttaaagaagataggggcgactatattctttctttgcggcagtcgcaagaagatgagaacagtcagcctttcttggactttatggcagcgcagctgaaaaaatcatttgcgtcagagattgagaaatacaatactggacgtaaaaaaggttttaatctcatgttttgaaaagcgacgattccttcctgataagctcatataggcattagctgattgtgctgtatcatccttttgtattgggttattctcaaaatattctcttctcggcattaaatacaaaataatgggtgtaaaatgcaaatttatttcgtagatactgttttcgcatttatttttttctaaatttgcagtagctggaatcttatctaactatttaattattaaatgtttgccaattatgacaaaacatgttcctctttttttacctctcggaagtattcggttactgacgatattcttctctttttgtataatctttgttcatccggcattggctgacaaaatggctgaaagccccgaacttttcgatactgctttcaccttgcaggaaaggcttgatattcccgacgggtttgttcaaagagagatggtctatatttccattcttttaggtacattggtgctgtgcctcttctttttcttcatgcagaggcggatgaagaaattgagggaaagggaccgggagaggtatctgcaactgttggaaggcattcttgataatcttcccattgcggcaaaagtgaaggatgtgaatgatgggatgcgctatactttttggaataaaaaggcagaggaactctttgaatgttcggccagagaggctataggcaagacggattttgaaacaatgccagaggctgcggctttaattaggaaggaggatgaagagttggtcaagacggggattccacaagaaggtatacgacgtttttttaccaagaagaacgaggagcggtttaccttccagaacaataattttataaagctttctgatggtcgcaagtggattgtttatactgcttgggacattactgatttgaaaatcatggagcgcaagctacgtctggccaaagaggaggctgaggagtccaaccggataaaatcggctttcctggccaatatgagtcatgagatacgtactccgctcaatgcaatagttggtttttcgagtattttggccacggaagtgtctgaggaagaacgggtggagtatctcgatattatagagcggaataatgaactgctgttgcagctcatcaatgacattctggatttgtcgaagatagaagccggtacattggagtatgtctatgctaacgtggatatcaataaaatggtgtccgagatagagcaggctacaagtatcaggctgaccaataaagacgtgcgtctggtcacggttacgccattgcccggtttgctgctgtataccgatcagcgcagaattactcaggtattcaataacttcatcagtaatgcgctgaagtttactgctgccggtagcattaccattggttacggaatgcccgaaaatagctatatccgtttttatgtcaccgataccgggacggggatatcatctgagaatgcgcaggggatttttaaccgctttgtgaagctggattcctttaagcaaggtaccggactgggactggccatttcgcaaaacattgtgaaggaactgaaaggagagataggggtggagtcacagttgagcaagggctccactttctggttcacgttgcctttttataagatggacgcgcaccgttctatctttccttgatgctgcaagctcaatccaatgaagggacatcgattgtctggctttcctcgttccagttgtcaagggtgaattctccggatgattcttcggaaaagatgtctcccagagtgagggtcagggtcagtttggagtttgcttccaaaggtccgttcaatgtttgcttgaaacttttcacgtttccatttttcagtatgatgctcatctggaattccggtttcccgaaagaagggaagagcatgacggtggcgttgctcatttgtgtaccgtcgacggaacggaccagagggaaggctactgtgcgtgggcttccttgaggagcggcggtgtagaaattcagttctccagcaatattggtgatgcgcaccaccatgctgtcgatgctcgaactgaggatgccgttgttcttgtccttgatgattactttcagtccggtcactacccgtttgagggatgctttcaggtcctcacttccaatgttggcaggctggacggcgtgtaccaggtcgaataccggataataggttgtgtccgcttccattttgaatagggagaagtgttgccgggacatgtcttcgcctaagatgtagaccgggtccctcatgagaggatgtgcataaatcggctcctcgtatttaggggttccccaataaatcatgttatagagacctgcgggtaaggataactctcgattgacgccatcgttatagaaagctccgtctttaacttggtagtaaccgtaaaaaggtgtcagcttccggtttatgtagtttccataataaatagaggtgcccgccttgcagggcatgatggtcagtatgccggtcagcgggctttgtccgctttctgtggacacgtccatcaaaagtcgtggtgataccaactcactgcttttttctatctggggcggattgtcatcggcgcagcttgccacgattgcggcaagtactgcaaatactactaattttttcattatctgttaagctttaggttgttcttccttgagaacgtttttagaaagaaatggttctttgtactccggagaaagtatattggggatggaaaagtgaggtgaaaccaattccggtattgaggggaatgggaagaatagcccctcttcaaaaggcttagagaagggacggaaaacaaattataccttttttagtaacattttagaagccttgattaacgaaatcatatactcttcgtaacaatttctcgacattcttttcttgttcctccatacatttgcatccgagttctttggtattaattgaagaacacaatgaatctttgatattaaccattaaataatgtacaatgagaaaaacattcttggaaaagtgcataaatctgcgtttatgccgtgttgcattggtacttttgtttcttgtacctgcaatcagtagcctgcaggctaatccttctcaaaacaagaccatttcgggtgttgtgacatcggctacggatagtgagccgttgataggtgtcagcgtgcaggtgagagaaaccgctacgggtggaattaccgacattgatggccggtattcggtaagtgcccaacaaggacagacactggtgttttcttacatcggttatcaatcacaggaaatcaaggtaggtacttcttccgtcatcaatgtggtgctgaaggaggacacggaaatgttggatgaagtggttgtagtgggctatggtgtccagaagaagaaattggtgacgggtgccactgttcaggtgaagggtgacgaaatagccaagatgaatacaaccaatcccttgcaggctatgcagggacagacaccgggtgtaagtattgcttcgacttccggtcaaccgggtgctgacatgaaagtgagtatccgtggtcttggtaccgtgggaaatagtgctcctctttatctgattgatggtgtgggtggtgatatttctactttgaatcctgccgatattgaaagtatagatgtactgaaagatgcggctagtgcggctatctacggttcggccggtgctaatggtgtagtgcttattactaccaagcaagggcgcgaaggtaaagcgcagattagtttcgatgcttattatggaatacagaatgtagctcgtaaggctaatatgctgaatgcaaaagagtatatggccattatggatgagcaggctttgaatagcggactttcggcttacgattggagccaataccagtctatttacgatgccaatggcaatgtgtatgatacggattgggtagatactatgttcaaagataatgccacaacggagagctatacgctgggtgtcactggtggaagcgcaacttccacttatgccctttcgttaggatatatgagtcaggaaggtattgtcggcggttcggatgtgtctaactattcgcgttacaatttccgtgtgaacagcgagcacaaacttttcaaggatattttgaaagtgggcgagcaggtgagttttgtatataagatgaataacggtatcagtgtaggcaaccaatataataataccttacgcggtgcattcggaacatcgcctatcgctcctgtctatagcgataataatctttatgattcgccttacaatgacaccagtaccagtgactggaataaaggtgatggaaacccttatggtttaatgatgaccgacagcaacaatgagaacaaaacggctactttttccggtaatgtttatgctgaattgcagcctgtcaagaatttgaagataaagtctgtattcggtgtggtttatggttccagcgaataccgtagtttcaagcctctctacaagttcagccaatatatatataatgaagaacgtactaccgtatctcaaaatgccaatcactctttgggtatgacatggaccaatacggcttcttatgactggactatgggagaacattcgttcaacgccttgctgggtatggaagcctatcgttacgagggcacttatatcgaagctaaaaatggtatgttgaaagaaggttttgatgattgggagcatgcttttgtgggcaacggaacggcctccgattcgaccaacggcttgggtgccagtggcaatccgcataccgagagccgcaaggtgtcctatttcggccgattgggttggaactggaaagaaacttatatggtcaatgctactttgcgtgcagacggttcgagcaactttgccaaaggcaaccgttttggttacttcccttcggtatcggcaggatggaccattactaacgaaaaattcatggaaagtacgcaaaactggctcgacttcctgaaaatacgtgccagctggggacaagtgggtaatgccaacattgacgcattccaatatctggctcctatcaagagtaccaatacacactatcttttcggcagcggttacggcgactcggatgctgcggcacagctcggaaccaactggggagcttaccctagtcgtctggctaatgctgacatcaagtgggagacttcacagcagaccaatatcggtcttgatgcccgattcctcaacagtcgcctgggtgttaatttcgatttctacattaaagatactaaagactggctcgtggtggctcctattcttgctactgccggagcaggtgctccttatattaatggcggtggagtgaaaaacaccggtgtggaactcaatcttacttggaatgaccaaataggcaaagactttagttacaatatcggtatcaacggtgcctacaataagaataaggtcggagagattcctaacgacgatggtatcattcatggctctaccaaccagttgtatgacaatactcctgaattctatcgtgccgagaatggtaagcctatcggttatttctatggtttcaagacagcaggcatattccaaaacaatcaagaaatagaggattggattaaggctggtaacggtgtgctgcaagctgacgtacaaccaggtgacgtgaagtttgtggacatcaaccatgacggacgggtgaacgagcttgacaagaccgatcttggtaacggtattcctgatttcactatgggcttcaatctcggtttcaactggaaaggacttgatttctctgtagtggccaacggtgctttcggacagcagattgtccagagctatcgtaaccatacctccaagcaagccaattatactactgcaattttaggacgttggacaggagagggaaccagcaatcgcatacctcgtgtcacagaccagaatctcaactggcagttctcagacctctatgtgcaggatggtgattacctgcgaatcagtaacattactttgggctacgactttgccaagctactgagatgtaaggtcatcagccagtgccgtatctatgctcaggtacagaatgcgttcacatttaccaaatatgacggcatggatccggaaataggttatggtcccgaaggagataacggacaaggttgggtatcgggcgttgatttaggttattacccccgtccccgtaccgtattgtttggtgttaacttgaaattttaaaatatagactgatatgaagaaaaacaaaaatatatttatggcaagtgtcctgctcctgagtttgggactggcttcgtgtaccgacagttttctcgatgttacgtcgaagactgaatcttcaaccggtacattctataagactgaaaaagatgcttatcgtgctctgataggttgttatgatggttggcgccagacttcatcagccatgatggtagggttttatatggcttccgaggtgatgagtgccgagtgttttggcgctaccggaaatgccgatggacgtggctatcaggccattgaccgttttgacatctcccaatcgccggctgacctcaacctatacgaaggtgactggaaaaattattatgcgggcgtctatcgttgcaacgagctgatagctcatgaagagcagattgtatggaatgaatcggatagcaaacgtggtatctatatgggcgaatgtcgtacgttgcgtgcattgctttatctggatatggttcgtttatgggggaatatcccactctttctggaaccggtaaacgaaaatcgcgctccttcacctgccaaagaggtgttcagtgccatatttactgacttaaaatatgctatcgagaatattcccggtgacgcttatcccaaggccgactataccaagaacgacggacatattacaaaatatgccgccgaggctttgctggcacgtgcctatcttttctataccggatattacggtgaagaacctgcagaggtgactcgtgccgaagctttggctgctgtagaagacgtaatcgcttcaggagaatatggtttggtaccgcaattcaagaatttatggccggcttcttctgcaaaagtggccgaaaaaggagactatgaaactttgaagggtacatatgctggtgatggaaacaaggaaaccattcttgcgttgaaatttaccgctactcaggattataacgggaataatgactccaaccgttggcaggtgatgttgggtatgcgccagcttaatgctgctccctattgcaagggatggggcgcattgacggtaaatcctgattttgtggaagcgtttcccactggtgacctccgccgttcggcttctatcattgatttggtaggggaaggaatcaccggttcggccgactttaccaccagttttaatgactggcgtgaatataccggctatgctgtgaagaagtatgctcccctttgctatgccgatggaagccatgccggtaagcaggatggtagcggtgacttccagacacagaaccgccaagactacgttattatccgttatgccgacgtattgttgatggccgcagaactgggtagccccaatgcgcaaacttatttcgaccaagtgcgtaagcgtgcttatcaggttgatgacaacggaacagtatcggccaactatcaagctaagagtgtgtctcaacaagctattatggaagaacgtcgtcttgaatttgcttttgaaagcattaattattgggatctcctgcgtcaaggtatagacgtggcagccgagaagctcgccttgaatggtgtcaaggtgaagagtggaggcgctgatgatgcaataaccatacgggtcgaccgtgtgaaagccaccaaaggcttgagccagattccttataatcaaattaacctttcacagagtgtacttgtgcagaatcccggatggtgagtaccattaatagagtaaataaaaaataaaaacaataagatatgagacttaaatcattcttttccatattggcaggagcggctttgatattttccgcttgctcgcccgaagagtacgagatgggggcaaaaacctatgtttccgatgatttggtggaaggtatcgcctatacggtgacccctgatgccaatgatcctaatacgattcatctgacttcgctcatcaagggagccactcccttgtgggtcactccaagcggtccttctcaaaagaccactcttgacttggcacttccttttgccggagaatatagcgtgactttcggcgcttccacaccggcaggtccggtatatggcgaaccatataccttcaaggtagagaccaataactttgccatgctcgaagaccctatctgggctaaccttgcaggtggagtgggcaagagccgtaagtgggttcccattgacaagaactttggtattggccgttgttcgggaccggtgatgtacatgagccacactgatgtgaaaaatgatggaagcaatattaccgaccttatgattggtagcgccaattgggctcccaactgggatccgggtatccaatcgtggctcattccggcagacgacccctatttccagtcgtacatcactttcggcctggatgctgtgaaaggctgtacggtggaacttcatcgggtggctgcttcgggcacgacggatgccaccggaactttcaacttgaatgtgtctgacccgaaacgccctgtcatatctttctatggcggtacctattcattgcataacgagggttttgatgatgtctgttccaactataccaacgacatcaagattatagaatgtactccttatctgctgcaggtagctacgatgcgtaccaatagcgaaggtccgtggtggctggtgtggaacttcatttccgaagaggcttataatgaccccagtatcataccgactgaagatccgggtttgcttcagcctgccgaagtacaacagcctgccattgaagatttggcaaccaaactgttcactactgaaatcaacggtgtcacctatgtgggcaatgaggcacgcttcctcatcaatgatgaagaaccttatgactggacatggtggaatggtggctctgctgcttgggaaagcgtagtgaagggacagtacggttcttcatgggcacctgtggccgatgcttccattgccgactatgagctggtattgagcagcacggccgatggctacaaatgggatgacggtaccaatgccggtaagcttgccattgaagacggcaaattgaaatttatggatgccgacggcaatccggttgagataaccgtcctcaccgctaccggtgataagcgcacggtggaagtgaagggaagcgagtttaccgtaatggcttgcgatgtcaccagctctttccagatgggtgtgcctgcaacgaccaatgacaagggagccgtggattcttatctttgtgccaacctcaactacaaacctatcgctaccggacctaccgggcctactgaaatcaaggtagacaacagcaaggtacaaattcttttcggtgacggaaatcccgatcgtttgcgcttgcagttctacaatccttggggcggtggtgacgcgggatggccgatcgacatcacgaaggtgaagttgaaaaagaaccagacgctgaagatacagtacaaagtgctgagtggaatcacttggaacgagggcgcgactcctaagaccgtgattatggacaataacatcggaaatgcttgggaagatgactgctacaacctggctcatgccgtggcctttgatactgccgaaggagctgtacagactgtgtccgtgaccaataccaccggtgccactgtgacttacgaaggaagcagttgtatctgtatcggtatccagaataagggacttgctactgtggctgccaccgaagacggacagccggatgtgaaggttgagataatttcgatgaccattgaataaccacttaaatgaatttagtatatatgaagacaaagatatatttaggaatactttcatttgtactgggtctttcgctggcttcgtgcagtgaagatgacgactatactatccacaccaccccgattctgaacgaatcgtcggtggtgacggggtcgtccgatgtgaccgccactaccgctacactccatgccacgctctccgggttggatggcatggatgccggaagctataagaccggcttcttctatggttttgcgcaagacaacctgcccgaggacgtgcaggctgcttatgacggcagcgccttcagtgctcagttgaacgggttgaacaataactctacgctctattatcaggcttatgtatgcttgcagggtaaggtgtattacaaaggtgaggtgaaaagcttgctcaccaccgatgccaaggtggctactgccgatgccgcatctgtcgacttcgcctcggctgtattgggtgggacattgaccgatgctacggccgatgctacttgtggtgttgttatctctacttcatccgatgtagaagcggttcgtgcaggccttatagtgaagagtgaggaacttaaggacagctattcattcgtccatgaagggttggtgcccgaaacgcaatactattatgcggcttacctcaatctgggtagcggcattgtgtatggtgaggtgaagagcttcactactcctgcctatgacttcgatctcgacaatgaccttgtcgacctgggactctccgtgaagtgggctcgcttcaatgtgggtgccaagagcgagactggactgggtggccttttcggattcggtgacctgaccggatgcaacaatagcatcgaccctgccgactatgcttcggccgatacttataaaacggcttccgacttggctttccgtgcatttcaagggcgtgccacactgcctactgccgatgatttcgaggaactcttcacgttgtgccagaaagagtggactgagcagaatggagtgacaggtttcaagttcaccggtcctaatggtaattccatcttcctgcctgcagccggtacgcgtgtggcaaacgatgtgacagcgctgggtactgaaggatattacctcaccggtactgtcaactcttccaatacagaatttgcggtaggttaccagtttgcagcttctgtcaatcaccgtatcactgccgcagtttatcaaggtatggctgtacgcgctgtttccacagccaagaacgtaccgttcaacaaggctctgctctatcagaagtggtatcttgacaatggccaggacggtaagcagcacgtgtttgaaggacctttcacgcagtggggtgttacggacaactggagcacagtttccaacggacaacccaacattgaacagcagattcattgggagatgggtacagataatggctggataggttatacctacggaaaggactacggctatatggaactcaaggaagacggtacggtgaacattcatcgcattgccgaagacggcaccgtgaccgatgaaaccggtaagtttacgattgacgaggcgaataaagtgattgacatcgacatagatgtgctttgtgccaatacttggattggcacgaagagtggtaagctgaacattctgtcgttgactgccgacggcttgcagattgccctgcccgatggcgactatggctattcgttgaactattacagccaggccaaggccgatgccgatgcgcaggttcctgtattgctcaatatcgccgattcatcatgggcaggaagttgggatgcactgcttgtagccatttcacccgaagacttggctggacagcacacgtttgttttcgagggaacttgtaccgatgctatggtgtttacgcttgactttgccggtatggcgaagcgctatcccaattcgtttgtacgcattgacgacatcaagctggacggtacttccatccggtttgatgccaaccgcttctattatggcgacattgaaggaaacggcaagtaccgtgttcagttgttcaatgcttatggggcgggttctgtaggcaatgctgttcctctcagtccgttcagcaatgtagaaaatcaaggtaccgagcctgccatccatttcaaggagaagcttgagattgtctgcaccgtcattaccgacggtaccggtgcaggtatttatacgcccaatctggttactgtcaatccggattggggaagtgcatggggatataacgcaggagctacgttcgaggtgaaatacgagaacttccagtacagccttgtggcttctcagttcgacattaagtacgaatctgccgactatgcggcaggttccatcatgaccttcgttgaagtggctgacatttacaagtatttccccggtttacatgccacacttgacaacctctatctggatggcaaggaagtgacatttgatgcatccaaagtgctcgatgccaatgaatccccgaagtatcgtctggaactttggaattgctatgggacaacaaaggataaagggtgcgctttcggtactcctgatggtgatgttatcaaggaacttggtttcagcagttctatggaagtgaagttcacgttccacactcttttctctgttcctgaatggtaagagggatagacggaaatatactggttagataggaaatccgggatgcaggccatcccggattttttgttttgccctcaccggtgtgcatcgttctgatatagattgaagaaccatagagagaataaaataaaggaggtggtccgtaaggcggcgctttgatagctctttgccttgtactttgttcggacgggatgggtacttattgcgataaacatagtgattttatggtatctccactaaagtggtccgccttgttcatagtagtgaacaaatcagcccacttaggtgaacaaacttgttcacctaagtgggccgttcatgaatctttgtactgaaccggacagacaaaagggcggaagcggagaaaagcaggggctttctctaagattggctgctattttccttcgtaatcaaagtattcaaagtctgcatatgcttttgaggtttgagaaccggagacggcatacaatcccagcatgattcccgtaaagccaccggcagtttctgtactgatatagcgcgtattcattcggcccagttctttgaagtcctttccgtttgtggcatactcgaacgaatagatttcgttgctgccttttacacggagttgtactttcccctggggcagaataacttccttttccgtatgggtcaattcattcaattggtagcgcaatactacagcttgtttcccgtctgccaattgcttgactaataaatcgtaatgggacgattcgaacatgtagaccgtcaggccggcttcgtcgccactggcggcttttttcagttgcatggaagtggtggctgtgaagtcgatatgttcttgccggcggccggcaaaagtaggactgcctttcccgttgttcaggtttacgggggttgctttcagacggaggttaccggaagcaaaggtatagttttccggatgatagtttctgatatgaacccattcgggacctaatttgccgtttttgaaatcggtgcgtgcaggcttgggggcaagaggatattgcggtagggttggcacatccatttgcagggctattgtgccatctccgtttactaccggccaggcattcttgtcccagcgcacgggagcaaggaacgtttcgcgtcccagcaggtgatggttgccgctttgcggacggaaagcgagacacaccatccaccacgaaccgtcaggggcttgtatcaggtcggcatggccggttccttgtatcgggctgttttgtgcattcttgttgatgtgggtcaggatgggattggcggggttctcttcgtacgggccgtctatatcgcggctacgggctattgtcactttgtggccgtattccgtgccgccttcggaaatcagcagataataccatccgtctttcttgtaaatatgcggcccttcagggtgccgtccgcccgtgccgttccagatgcgtttggactcgttgagttgttcgccggttttggggttgatttcgcacagatagatacctacgcccggattgctgacgaggtaacacttgccgtcttcaaaatagagggacgggtctataccgccttgcttgagccatacgggttctgaccattcgccacgcgggtcggtagtgtgtacaaggaagttgcctttgtcggacacgttggtggtaatcatgtagaatgtaccgctgttgtagcggatggtaggtgcatagattcctccccatgggccggcgtcgtgaagcggcagttgtgaggggcgcgtcaggcagtgtccgatttgttcccagttgatgaggtctttgctgtggaacaacggtacgcccgggaaatattggaaactactgttgaccagataaaagtcatctcctgcgcggcagatactcgggtcgggatggaaaccgggaataacgggattttgataaccttgccggttttgtgaaaagcaggacaggctgagcgccagtcctaaaagtaacatcatctttctcataaatgcattgtattttaaatagtttatcagatatatgaatcagggtagttgaaggaagtgtttatacacaaaaataaagtattctttcggttcaagcaagccggatgtgtctgatgtcattcaatgataacttttgagccctattcggaaacaaatgataccgttgcagataacatggcatcggtgtgttttccgccttttccgctacttttgctctcactgatttaaccattatttttaatacgtaaagacatgatgaagaatatcattgaaaaattccaaatttgcctggtgctgtcggcactgcttttctcttctttcgttgccgcatgttccggcaatgatgatactgtgactccagaaataacgattcccgcgaacattctgacggatggaatgactttctccaagaccggaggaacaagtacgctgaacatcaagtcgaacgttgcattggaagttaccagcagtgcaccggagtggtgtaaggttactgccgaaagttctgcttcgagtagtattttgaagtataccgttatggcagaagccaatacggacacgagtgaccgtgaagccaaggtaacggtgaaagccggaggcagcgaagtagggagcttcacagtgaaacaaacggctgcggacggattaatcatatccaactctacctctttcgacctgccagctgcgggaggagatgtttctgtggtggtggaaaccaatggtgacgtacaagccgtttccgatgtttcttggataaaggcggtcaatacccgtgccatggaagacaagattttcaagtttaccgtctctcccaatcctttgggagcgcgcgaaggccatatctcttttactttgggtagcctgacggagactgtggccgtaaagcagggtgcgggcgaaaccggcaatatggaaagcgatgccaggacacttgccgccaagatgtatgcaggtatcaatatcggcaacacgctggaagcttgtgataacaagaacaagatagcgagcgaaacgttatggggaaatcctaaagtgagtgaggcatatatcaaagggctgaaggcattgggatttaatgcggtgcgcatcccttgcgcgtgggattactacattgtgaatccatcgacctatgagatagatgctgcatggctcgaccgggtgagcgaagtggtgggctactgtgtagccaatgatatgtatgccattgtcaatatccattgggatggcggttggcttgaagagagtatcacccatggttacagcagcgaagtagatgccaagcagaaagctatctggacacagattgccaataaactgaatgcttatgacgaacacctgctctttgccggatgtaacgaacccggacagcaagaccaggggaacgttggcacatcggccatagatgtcatcttgaaatacgaacagaccttcattgatgccgtgcgtgccaccggaggaaataatgcgagccgttgtctgattgtgcaaggtccttataccaatattgacaagacggtgaatgactacacgatgcccaaggatgaggtacccgaccgtctgatggtggaagttcacttctatgatccctatcagttcaccatgatgaaccatgacgaaacctggagcaatgtattcctttattggggtaaggataatcatgtatccggttccattcataatgccaccggttacgaagaagattatgtgaagcagcaattccagaagatgaaaacggcctatgcagataagggaattcctgtgattgtaggcgagtatagtgccatgaagcgggcaaaagaagacaagatagaggggacttctgaacttgcctatcctgatattgaccaggagatgcataacaagagccgctcctattggaatgaggtagtcacccgagaggcgaaaaaccacggttgtgtccccttttattgggaaaccggcggtgacatgaaccgtggtacgggtacggcgaaggaggcttatgccattgagggcatcatgaagggagccgcagccggtcaatacccttattgattgagtggtggatagaataaaagacagtttttaaaagtatcatacaaataggttttataggttacaaggattgttgatatagtttttttgattggttacggagaagtatgtccgcgagggatatgcttctccttctttaaaaatccttgtctttccttgcttttctgttcgtttttcacttcatttgcaacaaaaataacttcccttagctctgatagtatgaaaagactgcaactactgctcttgtgggtttggatggtatgtttctctgctgcttcacatgactacatgtttaaacatttggaagtgaaagacggactttccaataatcaggttaatgctatttataaagattcaaacggattcatgtggtttggtacagcttcggggctgaaccgctatgatggttacaatataaagatttatcgcagccagaaagatgacgagaaatctcttcccgatagttatgtcgaggatatacaagaagatgcgtccggtaatttgtggatacgtacgggaagtgggtatgccatttacaactcggcttccgatgtttttgaccgtaatgtggaagcttggatgtggaacgtcggtctgaccggaaatccttcgcttatctatattgataaggaaaagactttctggatctatattaatggtaaaggtgtttacagctatagagaaggacagaaaaatgccgtggcagtaaaggaggcggatgaactgcttgcgaaagccgaagtgtccgacatgaaagaatgcggcgaaggaatcctgttggttttgagtaacggtatcttggtttgtatagatgaggaaaagcaaaatatcaagtggaccaatccggacattgccgaagattgcagggaagtaaagaatgctacctttgatttgtttgtcgaccatagtgggcgggcgtggatattcagtgtggaggggatgtggatttatagcctttctcggaaggtttgggaacagcgttctccccgaacggacacctacaataccgtacgtgcagtggcacaggataaatacggatgtatatgggtaggcagggatcaggatggcattgaattgatagaaccggcgggacggaaaatccgtctggcgaacgatcctaataacgggcgtactctgtccaacaatacaataacggctctttatgaagatgaggccggtacgatgtgggtgggaacctacaagaagggtgtctctttctataatgaaagtgtcttcaaattcggcattgccgatgtaggcgacatcaattgtgtggaggacggaggcggtgatatcgtatgggtggggaccaacgaccgcgggttgattcgctggaatagcgtgacggatgaacgtatgtttttttcgcatacggcagatccccgctctatctcgagtgatgtcatagtctgccttcttcgggacagtagcggcagagtgtgggctggtactttctggggcggactgaattgctatgatggaaaccgctttatccattaccggtcccgtaagggagacagtaactcgctggtctatgacaatgtatgggcattggcagaagatgcggacaaaaatatctggatcggtacgttggggggaggattgcaatgcctgaatcctcagacggggatatttaccacctattctacaggtaattcaaaccttgtgtcggactatatctcatccctctgcatcagctgtgacaataatctgattatcggtacttcggcagggatggctttcatggacctgaggaccggcgagattacaaattttgcaggtacaaaatcgggtaagaccagactttccaaccaaaatatcaatcaagtttacgaagatagtcgcggtttgttatggatagccacgcgtgaaggcttgaatgtatatgacagcaaacgggatgaattgtacgaagtgcctatcaaacccggtttctccaaactattgatattaggtattacggaagatgaaaacaaaagtatatggatcagcaccggaggagaactgataaacgtggtgttgtccgttgacagcaagacggagcagcccgtgttccgttgctatacctataatgacaaggacgggttgcagagttgtgacttcaaccagcgttccctcaaacgactgcatacgggcgagattgtagtgggaggactgtatgggctgaatcgcttccagccgggcaacataaagtataaccgtacgttgcccaaggttatgtttaccggtttccagttgttcaatgaagacgtgaaggtgggcaaggagtatgcaggacgtgtcatcttgaaggaagctttgaatgaaacagaagaagttgtcttggcttataagcagaatgtgttcacggtgctgttcgcgtcggacaatttcgtgctgcccgaaaagacacagtatttctataaattggaagggtttaatgagaactggctgacgagtatgtccgatatgcatcgcgttacctataccaatctggctccggggacttacattttaaaagtgaaggctacaaacagtgacggatatgcgggtactgaagaggcttcgctcaagattgtcattcttccgcctttctggatgactccgtgggcatatatcgtttatgctcttctgatagtaggagttgtttccttttcactttatgccgtacaacggagggaacgtaataagttcagaatccgccagatagaggaagatgcgaagaagagggaggagttgagccagatgaaattccgcttttttacgaatgtcagccatgagttgcgtacgccgcttacgctgattatatcgccgatggaaagtatgatgaaggagattacggacgaaaaactgcatggcaagctacaactgatgtaccgcaatgcgcagcgtttgttgaatctggtcaaccagttgctcgatttccgtaagaatgagatggcaggattgcatctcactttgtccgagggggatattgtggcgtatgtgcgtagcatctgtgcttctttcctgatgctttctgaaaagaaacatgtgcatctgacattcttttcggccatggaatcgctgaatatgtcattcgacgaggataaaattggtaaagttgtgatgaatcttctgtccaatgctttcaaatttactccggacgggggacgtgtggatgtggcattggaaatgtcgaaagagatgtccggaagattgctgataaaggtatcggataccggtgtcggtatcagggatgaagacaaggagcggatttttgaacgtttctatcaggtggagcaggaagaaccggagcaccagtcaacgggtagcggtattggcttgagcctggtacgcgactttgtgacgctgcatgagggtacggtgcgcgttgtcgacaatgtgggttccggtagtgtgtttctggttgagctcccggttaaacatgtacgtgtaagtcctcccaagcctgcaccgcttacagaagaggtggaagagcatgaggaacttttgccgggtatggaagaggaagcgctttcggttgatttgctggacgatatggaggataatgaagatgaaaaagaaaagccgttggccctgattgtggatgataatgaagatttggttgccttcatgaaagatagtctgagcttgtatttccgtatacagtcagcttccaatggtcgggaagcttggcagaaaatatcggaactgatgccggatattattgtcagcgacgtaatgatgcccgagatggatgggaatgaattgtgccgctgggtgaagaccgataaacgcacgagtgacattccgatgatattgctcactgcacggcaggctgtggaagataaagtggaggggttgaccatcggtgcggatgattatgtgacgaaacctttcaatgtggaaatccttattctgcgtatgcgcaagttgattgacctgagcaagaagcgcaaggcaaagtcgctcattgaccccgaaccaagtgaaatagccattacttcgttggatgaaaagctggtggaaaatgccatcaaatatgtggaggcgaacatcggtcggtgtgacttgtccgtagaagagttgagtcgggggttgggtatgagccgggtacatctttacaagaaactcttgcagataaccggtaagacacctattgaatttatccgtgtcatccgtctgaaaagagcggcgcagatgctgcgcgagagtcagcaaaatgtatcggagatagcgtatcagttgggctttaacaaccccaagtatttcagcaaatatttcaaggatgaattcggtgttttgccctctgtttatcaggaaagagagggtagataacaaaagataccccttacggaaacatattgtcttttagggtaatcaaaagcgcccttttgtttcaacatcgggaggactcgtttttgaagtaaactttctatttttgcattggagaaaattcactttaaaaacagtaatatgaaattgaaaaacacttcagtttatttgcttgccggatggatgctcgccgcatgttccggaggcggattccaaaagaccgagaacggtgttgttgtggaagtcaagcagcagcaaccgacggatgtgcgtaaagtaagattagaagtaatgggcgagaagctcattcatgtatcggctactcctgagaaggaattttcaaaggagcagagtctcattgtgacccctcaacagaataagaccgactttaaggtcgaagagcagggcgatgaagtgactgtcaagacatcggaattatgtgccattgtgtccaagacaacgggtgaggtacgcttcacggatgccgacggcaagcagattctggctgaagactctgacgggcggacctttactccggtggaagtggaaggtacgaaaggatatacagtacgtcaggtattccagtcggcaggcaatgatgaggctttctatggcttgggccagcaccaggcggatgagttcaactataaaggtaagaatgaggaactgttccagtacaatacaaaggtgtctgtacccttcatcgtgtctaataaaaactacggtgtgctttgggacagctattcgctctgccgtttcggtgacccgcgtgactactcacaactgggtgatgtcttcaaactttatgataaagagggcaaggaaggtgctttgaccggtacatatattccgggcaagaaagacgtggaaacccttgtacgtcgtgaggattctctttattttgaacatctggaccgtgccgcacatctgagtaaggtggttaatttgcctgcggagttcccgttcggagggtccgacgtagtttatgagggagaaatagaaccggcagaaagcggcttgttccgcttcatcctttactatgcaggctacatgaaagtatatattgataatgaattggtggttcccgaacgttggcgtacggcttggaatcctaacagttataagtttgctgttaatctggaagcgggcaagcgcgttccgttgaagatagagtggaagcctgatgccggtgtttcttactgcggtctgcgggtattgagtccggtggctgatgaagaacagaacaaactctcttggtggggtgaaatgcagaatgaaatagactactacttcgtttatggtgatgatatggacgatgtgattagcggctaccgtacattgacaggtaaatcccagattatgccgaaatgggcgatgggttactggcagagccgtgagaagtacaatacgcgtgaggaggttctctccaccttgaaggaattccgtgaacgtcagattcctatcgacaatatcgtaatcgactggctgcactggaagcagaatgcatggggaagccatgagttcgaccctgaacgtttccccgacccgaaaggaatggtcgactccatccacgccatgaacggacgtctgatgatttccgtatggcccaagttctatgctacgaccgaacacttcaaggaatttgacgaaaaaggttggatgtatcagcaggctatcaaagacagcatcaaagactgggtcggtcctggctatctgggctctttctatgacgcatacgatgccgatgcacgcaagctcttctggaagcagatgcaagaccactactatcctctgggtgttgacgcttggtggatggatgccagcgaaccgaacatacgcgactgtacggatttgcaataccgcaaggacctttgcggtccgacagcactcggcccctctgccaagttcttcaatgcatacgcactgatgaatgcagaagctatctatgacggacagcgcggcgtggaaccggacaagcgcgtcttcttgttgacacgttccggctttgcaggattgcagcgctattctaccgccacctggagtggtgacatcgctacccgttgggaagatatgaaagcgcaaatctctgccggcttgaactttgctgtcagcggtatcccttattggactatggacatcggtggattctgtgtagagaaccgttatgtggctggtcagatggaattcaacaagaccggacgtgaaaatgccgattataaggaatggagagagttgaatgcccgttggtatcagttcggcgctttctgcccgttgttccgtgcacacggccagtatccgtaccgtgaggtttggaacattgctccggcaggacatccgtgctacaactccatcgtttactatacgaagttgcgttacaacatgatgccgtatatctattctttggctggtatgacttacttcaatgattataccatcatgcgtccgctcgtaatggacttcacagctgatgcaaatgtcaacaatataggtgaccagtttatgttcggttctgccctgatggtggctccggtttacgaatacggtgcacgcagccgcgaggtttatttcccggtaagctgcggttggtatgatttctactccggtaagtatgtgaacggtggccagaagttgacagtggatgctccttatgaacgtattccgctctacgtttgcgaaggtgccattgtaccttatggtccggatatgcaatacagtgatgaaaaaccggcttcggaaatcactctctatgtttatacgggtaaggacggcgcgtttacgctctatgaggatgaaggtgtgaactataactacgagaagggacaatatgccactataccgtttgcctataacgatgctgagggtacactggttatcggcgaccgtacgggtgacttccccggtatgctgaaggaacgtactttcaatgtggtgaaggtaagcaaagaccagccgcaaccgttcgatttgaaggcgaaaggcacaacggtgaagtatgacggaaaagcacaaaccgtaaaattataatcagaatgatagacgacggtgccagggagagaaatcttcccggtaccgttctcgtcgttcctcggtgccgaacgatgccttccccggtgccaggaacttccctacttctgaatagctgtgagagaggaataggcactcgataatcttttagatatttattactatgaataaaatcatattgtctttggccatcgggctgtccctgctggccggttgcaatgctcctaaagaggtagctggcgatgaccgtagcttggattttactgccgactgggcctttcgcttgggagacgatacggcggcagcccgtccggattataatgacgcagactggcggaaactgaacttaccccacgattgggccattgaaggagaattcagtaaagacaatccttcgggaacgggtggaggtgcactgcctggtggtataggctggtatcgcaagacttttactgccgataaggccgatgagggcaaacgctatcgcatagatttcgatggtgcctatatgaactccaccgtttatatcaatggccatgaattggggacacgtccctacgggtacatctcgttcagttatgacctgactccctatatcaagtggggagtggagaatgtgttggcggttcgtgtggacaatgccgaacagcccaattcgcgctggtattccggttgcggcatctaccgtaatgtatggctgacaaagctgaatccagctcatatagcgcaatggggtacctatgttacggcagaagatgtgtcgaagaacagtgcccagttgaagatacgcaccaaactacagtacgatgcagaagcacagatggccgatgtcgtcctgcaatcccggttagtggatgctgacggcaatgcggtgggtgaggctgtgtcggaagcgcagttgatgcctcttactccggcagaagtggagcaggagatacacttgaagaatccccgtctttggagtattgatacgccctatatgtatagggtagaaagcatcctcaaggataagcagaccggcgaggtactcgaccgttactatactcctaccggcatccgtactttccgcttcgatgcacaaaaaggatttatcctgaatggtgaacaagtgaagataaatggtgtctgcatgcatcatgacttgggttgcctgggagctgcggtgaatacgcgcgccatcgagcgccagttggagattctgaaagaaatgggttgcaacggcatccgctgctcccataatcctcccgcaccggagttgctcgacctttgcgaccgtatgggcttcatcgtgatggacgagactttcgacatgtggcgcaagaaaaagacccgccacgactattcacgctatttcaacgaatggcatgaacgcgatttgactgaccttatcgtgcgtgaccgcaatcatccttccatcttcatgtggagcatcggcaacgaagtgctggagcagtggacggatgccaaagccgacaccttgagtctggcagaggccaacctggtcttgaacttcggccatagtgcggatatgctggcaaaggacggagaaatgtccgtcaactcactgctgacaaagaaactggcggacatggtgagaaagctcgatgccacgcgccccgtgacggcaggctgcaacgagccgaatccgaacaatcatttgttccgttccggtgcgcttgatattatcggcttcaattaccatgacgactggtttgcaggtgttcccgtgaacttccccggtaagccgttcatcgtaacggaaagtgtttccggcctgatgacacgcggttactaccggatgccgagtgattcgatgttcatctggcccgaacgttgggacaagcctttctatgatgcctcgttctcttgctcctcctacgacaactgtcatgttccttggggcaaccgtcacgaaggtactatgcgtcatgtgaagaacaacgactttatcagtggacaatacgtctggacgggcttcgattatatcggtgagcctactccttacggttggccggcacgcagctcttactttggcattatcgacttggccggcttcccgaaggatgtctactacatgtatcagtccgagtggcgtccggataaggcggtgttgcatcttttcccgcattggaattggacggagggacaagacatcgatttgtgggcatattataacaatgccgacgaagtggagcttttcgtgaatggaaagtcgcagggtgtgcgcagcaagggaaaagacgatttccacgtcatgtggcgcgtgaagtatgagccgggtacggtaaaggctgtttcccgcaaggaaggaaagactgtggccgagcaggaaatccggacagcgggcgaacctgcgcagattcgtctcagccccgaccgcagtaccattcaggcagatggcaaagacttgagtttcattacggttgagattctggacaaagatggaaatttgtgtccgaatgccgaaaacgatgtgacctttgccgtagaaggtgccggcttcattgctggagtggataacggaagccccatctctatggagaagttcaaggacaaccaccgcaagactttctacggaaagtgcctggtggtactgcagaacaacggtgaaccgggtggtgtcaaggtgacggctacggctgatggactggagaaggcgacgacggcgattaaagttaaatgataatttgatgtgctaattggcacattagcatattaaccaattaagacatgaagaataaatttttagcaaccttatttcttgcatgctccatcagtaccgtgtctgcacagacaccggtctatatggacgatgcgcaacctattgaagcacgtgtaaaggatgccctcagccggatgacgctggaagagaaggtagccctttgccatgcgcagagtaaattcagcagtgcgggtgttccgcggctcggcattcccgagctttggatgagcgacggccctcacggtgtccgtgccgaaatcaactggaatgactggggatatgccaactggaccaatgacagcattaccgctttcccggccttgacttgtctggccgctacctggaatccggacatgtctgccaagtatggcaaggccatcggtgaggaagcgcgctatcgtgaaaaggatgtgttgctgggccccggcgtcaacatctaccgcactccgatgaacgggcgtaattttgaatatatgggcgaggacccttatctggccagtgtgatgtgcgtaccttacatccaggagttgcagaagaacggagtggcagcttgtgtcaagcactatgcgctgaacaaccaggaactgtggcgcggacatattgatgtgaatcttagcgaccgtgctttgcatgaaatctatctgcctgcattcaaggctgcggtagaagaaggaggtgcctggagcattatgggcgcttacaataagattcgcggccagcacgcctgccataacgatttcacactgaacaagattctgaaagatgactggaagttcgacggctgtgtcattaccgactggggcggtgcccacgacacctatgaagctgccgtcaacggtctggatattgaaatgggttcttacaccaacggtctgacgtccgagagtgtatttacctataacgattattaccttgccaacccttacctccagatgttgaaagatggcaaagtgccgatgtctacaatagatgacaaggcttcccgcattcttcgcttgatattccgtacggcgatgaaccgtcagaaaccctatggttcggtagctacggaagagcattatgccgctgcccgcgagataggcaatgagggcattgtgctgttgaagaatgctccggtgataaagaaaggtgccccgttgctgccgattgatgcagccaagtatcagaatatcctggtggtgggcgataatgccgtacgcttgctgaatcagggaggaggctcttccgaactgaaagtgaaggatatggtatctccgctggatggcttgcgtgccgtttatggtgataaggtagcctatgcgaaaggctatgccgccggtcgtccgatgtacggccgtgcagatgaaattccgcagaatgtggtagactcactccgtgcagaagccgtggaaatggcgaaaaaggcagacttggtggtactggtaggcggattgaacaagaaccacttccaggattgtgaaggcggcgaccgtctggaatacggcttgcctttcgggcaggatgaactgattgaagctttgctgggggtaaacaagaacctggttctggtgcttctcagtggtaatgcggtggaaatgccgtgggtatcccgggttcctgccattgtgcaaggctggtatttaggctccatgggtggcaagtctctggctgacatcctgagtggtgcggtgaatccaagcggaaagttgcccttttctttccctgccaagttgacggattgcggtgcacatgcttttgatgaactcagttatccgggcgacagcattaagcaggagtataaggaagatattctggtgggctatcgttggcacgacaccaagaaggttccggcactcttccccttcggtcatggcttgagctatactacctttacatatggcaaaccggtggcttctgccaaggccatggctgccgacggtacgctgacggtgacagttgccgtgaagaatacgggtagcattgccggaaaagagattgtacagctttatgtaggcgatgataaatgcagtgtgcttcgtcctgtaaaggaactgaaacattttgcaaaagtcggtttggcgccgggcgaggagaagagcgtgactttcacccttactccggatgatttgaagttctacgatgaggcttccgcagcttggaagtacgaaccgggtaagttcaaggcatacgtttgcgcttcgtctgccgacgtccgtggtgtagttttgttcgaaatgcaataatcttataatcagtgcgtaaccactgcaaaatcagtacaactgttttgcagtggtactgcataccttttgcagcgctactgcaattgctttgcagcgtcactgcaaaaggtatgcagcaatgctgcaaagtgtatgcagtaagtttgcagcctgaaatcagaatcaaaaaacaatatgaagacacttgccactctatttctgcttgcagcctcgttgctgcttcgtgcagccgatgcgcctgccgacagttgtaatcatcagttgtattatacgtcacctgccgctatctgggaggagactcttcctttgggcaacggacgcttgggcatgatgcccgacggaggcattctccgtgagcacattgtgctgaatgaaatatcattatggagcggaatggaggcggattatagcaatccggatgcttcgaagagtctgcctgccatccggcaactgttgtttgagggaaagaaccgagaggcacaggagctgatgtacagcagttttgttccgaagaagcaggagactgacgggagatatggaacctatcaggtattgggcgatttggatatagattttacctacaattcttcattatccattctcaactctccattaaacaactatcgccgttggctcaacttgcgcgatgcggtggcatatacggctttcaggctggaagatgtcgattatcgccgtgagtattttgtttcccgtgaccgtgatgtcatgctgattcatctggttgccggacgtgaaggagctctgaatttctctgcccgtttgagccgtgcggaacatagctcggtgactgtccaagggaacacccttttgatggacggcatgttggaaagcggtaagcccggtttggacggtatgaaataccgtgtggccatgcaactcgtgcagaacggtggtgaatcgtctgtcagcccggaaaacggtatccgcttgaagaacgggcaggaagcctggctgatactttctgccgctacctcctatgccgctgccggtaccgacttcccgggcgaacgctatgcggaagtctgcgacagcttgctccgtcctttcaccgcccccgctaattctccatgttccattctccattcttcattctccagccatgtcactgcccaccgtttcctctacgaccgtgtttccttgacgcttcctgccacgccggatgatacgctcccgacgaacgagcgcatcctccgcttcacacagcaggagtcgccggcattggctgctctgtactataactacggacgctatctgctcatcagcagtacccgtcccggcagcttgccgcccaatctgcaaggactctgggcaaatggagtatcgactccctggaacggggactatcatacgaacatcaatatccagatgaaccactggcccttggagcaagccggcctctccgaactctatcagccgctgacgacgctgatggagcgccttatcccttcgggagaggcaagtgcgcgtaccttctatggcgatgaggcagatggctgggtgctccacatgatgaccaacgtatggaattataccgctcccggcgaacacccctcctggggagctaccaataccggtggcgcttggttgtgtgcccatttgtgggaacactatctgtatacgcaggacaaggattatctgcgccgtatctatccagtcttgaaaggtgccgcccggttctttagttccaccaccgtgcaggagccttcgcatggctggctggtaactgcccccacttcttctccggaaaacagtttctatgtgccgggtgacagcgtgactcccgtcagcatttgtatgggtcccactatggatgtgcaactgctcactgagctttatactaatgtcatcgccgccgctcgcctgctggattgtgatgcggattatgtggcgaagcttgaggtggacctgaagagattcccacccatgcaaatcagtaaggaaggatacttgcaggaatggctggaagattataaggaagtggatgtgcaccaccgccacgtttcccatctctacggcctgcatccgggaaacctgatttcgccggagtccacccccgagcttgccgaagcctgccggatgaccttgaaccgtcgtggagatgagggtactggttggagccgtgcttggaagataaacttctgggctcgtttgggtgacggaaaccgtgcttggaaactcttcaagagtttgctgcatcctgctgtcgatgctgcgacgggaggtcatggtagcggcactttccccaacttgttctgttcgcatccgccttttcagattgatggcaactatggtggcgcggcgggagttggcgaaatgctgttgcaaagtcatgaaggctttatccatctgcttcctgccctgccggatagctggactgccggcaacttccgtggaatgcgcgtacgtggcggtgcttccatagacctggattggaaggatggacgggcaacgagggctgttgttaccgctcttgttccggggaaatttacagtaaagatgcccgcaagtactgtccgtgccgaggtgaaggtaggaggacatacgcatacttacaagaaaccggcattctcgttggacttgaacaagggagaggcggcgaccatacatttcttataagaacgttcccttccgacaaaattatcaagttatttgtctttcgcgcccgaatgctgtacatttgcagcgcatgtagaacaaatatcttagataattatgaaaaatagagtacgttttttcttcttgtttctcggcttgctgggagcgttggcagctcatgcacaaatcaatgagttgccacgttccacacccgaggcagaaggagtcccttccaaggctgtcactgccttgtttgattcactgatggcattgccgaaaacagatatccacagcgtggtggtgctgcgtcacggcaaggtcatcggagaaatctatccggctccgttcgcgccggaatatcgccataccatgtattcctgctccaaaacctttgtcggggctgccgtaggacttgccattgcagacaaccgcttgcgtttgacagaccgcgtcgccgctttcttcccggaacttcttccggattcggtttccgctaatctggcagacatgactgtccgtgacctgcttaccatgacgtcgggtatcactcccgactggaatatgcgcaacctcacttccgactggatacgtaccttccttgccaaaccggtgaaaactccgggcaagaagtttgaatatgattcgattagtacctatatgctttctgccattgtgcagaaggtgacgggcatgaccttgctggattatctgaagcagaagcttttcatcccgatgcatatcacggacgttgcgtgggagataagccccgaaggcatcaataccggtggctggggactgcatatccagagcgagtcgttggcaaaattcggattgttgctgctgaaccggggtgtttgggaaggcaagcagttgcttccggcttcctgggtggagcagatgatgaccagacagataggagattatggctatcagatgtggctttgcgaatatccgggtgctgtacgtgctgacggggctttgggacaatacattctgattgttccggataaggatatggtagtggtcattaccgaatgtacattgatagacggtcgtcggcagcgtcgtctggtctggaaccgcttgttgccggaggtcggtgaccaggtattagcgcccggtaaggactacaagcgcctgcagaagaaacagcgttcttatcaactgccgttagtgcaaggaaaggctgcttcctccctttcacagaaatacgcaggcaagcgcatcctgctcggagagaacaaatacggatggcaatccatcgagctgcaattcaagcagcaagaagtagtgatgactgtggtggagaaagacggaaagacatacagtcttccgtttggctataagcaatggtcgaaagcggcaattgatggctatcctccgtattcggttgctgcaaaggggcgttttaagggtatagaaggccctttccaggtggcaggcagttatgcgtgggcgtcacttgatgctttgcaactgaaagtacattatgtcaactggataagcgctcttgggcttacgctctgctttgaggataacaaggtactcctgactgttacggagaattattcttcgggtgaaggggtgactttcgaaggtacattagcacattaaaataatgaatcgtattttgcttactctaaaacggccttttatctggctgtaccgtttccggcaccgttgcggctacggtgtacattctccttttgcctttaacctgattacgcatgtaatttacgaaagtacggcttattataaatatgaagagctggccaaggcacagaagcaactggagctggagaaagataaacgttggaagtacgaatcgaagaaagtaaaacgccttctgttccgtctggtaaactatacccagccggagaccattgtagatgccggtacgcttgccgcttctgccctctatttgaaagcggggaaggagggggcagattatacttcggcttccgacctttccgagctctttctggagagtggcgttcccgttgatttcctttatttgcacgattatcgtcatcccgattttgtagaggaggtcttccgcatctgttccacccgtaccaggggaaagtctgtttttgtaattgaaggtatccgttacactccgcagatgtttgccctctggaaacgtatgaagcaggacgggcgggcgggtattacgttcgacctttatgaccttggtatcatattcttcgataaaacaaagataaaacaagactatattgtcaacttttgattatctttaggcgtttcaatagtgattagcggttagtgattagtgcttagctccacttactggctgctaaacattaatctctaacccctaaacattaattccttatgaagatatacaccaaaaccggagataaaggaaccacctctcttgtaggtggaacccgtgtacctaaaacgcatatccgccttgaggcatacggtacggtggatgagctaaattccaatctgggtcttctcatcacgtacctgcttgacggaaaggataaagattttctgcagcaagtgcaagacagactttttgccgtaggctctcatctggccacagaccgggagaaaatggagctgaaagaagccagtatcatcagctcggagcaggtggaaatggtggaacgggagatagaccgtttggatactcttttgcctcctctttcagcctttattcttcccggcggaagtcgcggtgcggcactctgccacgtttgccgtacggtttgccgtcgtgcagagcgtcggattcttgctctggccgaacaagtggaaatctcttcggaattactggcttacgtgaaccgcttgtctgattatttgttcgttctttcccgtaaaatgaatcaagacgacaaaaaaggtgaaatattttggaataatagttgcaagtgaaataaattgttatacttttgccgaaaaatagaaataggatttaatattcacaattttaatactagagactatgtattggacattggaattagcatctaaattggaagatgctccttggccggcaactaaggatgaattgatagattatgccatgcgttcgggtgctccgcttgaagtgattgagaatctgcaggaaatggaagatgagggcgagatttatgaaagcatagaagatatttggcccgattatcccagcaaagaggactttttcttcaatgaggaggaatattgatacgctttaaaagaaaaaacttaccggtatgtctggtaatattttgaaacatagggagaagtaattccaaaaccgataactatggttgaagaattacttcttttctttttaatacccccacactacaataataatgaatgtacaagaagcaacgacacgccggttaccggatttgaagggaaggtatctgcctgaaaactgccgcgaaaccataaacacgattttaaaggagacttacggctacgaacagtttcgtaatcttgagatttacgatgacttgtccaagggaaaggaaaagctttgcatttcacagggacagctgatagagaacgttatactggaggctgaaaaggcttggaaaggtgaaacgcaggtagacaatatcttgctgactgcccctaccggctccggaaaatccttgttgttccagcttcctgccatctatctggggaaggagtataatctgcttaccattgtggtttcccctttgaaggcgttgattgtagaccaggtggaaagtctgcaagagctggggtatatgcgtgtggcatacgcctcgtccgatttatcgccggaacagaagatggaggtttaccggcaggtgcgtgagggggagattgatttgttctatctctcgccggaattgcttctctcttacgacattaagcattttgtaggcgagcgccgcatcggtctggtggtggtcgatgaggcgcatacggtcactacgtggggcaaggagttccgcgtggactattggttcttggggcgctacctgactgctttgaaacagactctcggctataatttcccgttgtttgcattgactgctacggctgtctggaacccgaaaggaggtaatgacatgatattcgagactattcgttccttgcagatggagccttgcgtgctttatgtaggtacagtgaagcgccggaatattggctttgacatccgtcagatggagatggaggacggggagacatacgacaaggcaaagcagcgcgtggtggctgcgcgggtggaggacttcctggacgggcacaagacattgctctattatccttttgcgggtggcatcgacatgcgcttgaagacgtgggtgaagccggcggactggcgtctggttgcctcctattatggcaagaaggacaaggaacagaaagctgccattgtacaagagttcaaggaaggaaccaagaaactgattgtggctacgaaagcctttggtatgggagtggacatcagtgatatagaccgtgtataccatgtggcgccatccagtacgtttgtcgactatattcaggagatagggcgtgccgcgcgtgatacggagatacagggtattgccgctaccgactaccatgaacgggatttctattatatgaagcgtctgcatcagacagggaacattgcccaggaacagctggtgcttattctgagaaaactcatggaagtgtaccgcatgaaaggggaaaaaccggaaatcatggtatctttgtccgatttcgagtttgtggtgaaactgccgcgtacaaagaacaagctggagtatgaagcggagttgggacagctcatcaagaccgccttgctttggctggaagacgatttgatgcagcgttatggaaggcatctgcttgaaatcagccccaagaatctgttgaccgaaggatatgtccaggacaagacgggtgatgtctttgcccgtgaattccattgctatctgacaaaggtagaaggggaggacggggtttacgtcgcacgtctggaagcgctttgggaagagcgtttccctgagcttggctacaaggaattcaaacagaaactgaataatggaacgttgtgggagggagcccgtgccgtgtctgtaggcaagcatgaggtgttgttgaaggaagatgccactgtcatccgtgagcggatggatgccttgttcaagagcctgacaacgatgctgaaaacgtcattgataaagtcgaaaggacgttttgatgaagaagaattgcgggctgtctttgccgagcatggcatggacgtgcgctctgccaaacgctttatcggttccctgctggagagtcgcacggaggaaggccgcagtgtaagctatatcagcagtgtgaaaaagaaggattccaatgaactctcttttacggtgaccaaaggctttgatttgcttttgtcgcgctatcaaaaactgtttagccaacgcatagtgggcagtaagggagaccgcctggtgttttattgcactcctttctcggacttgaatatgctgcttaatctgctttctatgcttgactgcctttcgttcagtgtggagggtggcggtacgccttgcgtatttgtccgtttcaatgaccccgaaactctgcaggaacttgcgcttggcgatgattaccgcaatctgattctggataccaacgggcagatattccaggagcagattgacttgttctctttcttcttcggaacagataagctgacggatgaacagcgctgggactttatagaggattattttacgggaatgggagtggacgacttgaaaaagaagtttgtgtccttgtagcaccaattcgttgaacagcctttccagagttacagttcatctttgcttttactgtaaagattgtgagtaattagtctaagtgctcctgcagaaaccgttgcaggatgcgtgcatggttgtatatcggtgctttggaagcatatagtaaggttatggtatggtggtgttttatggtgtcaatgaacctaagggcggcttccgaattttccagttccttgcgatacatggctgcaaacccctcccagtgttccgcttggtcttcgtgaaaccattttcttaattcaggtgaaggggtaatatccttttcccagacatcgtatttcagatgttccttttttatgccgcgaggccacagccggtccaccaatacacggtagccgtctgttgcattgggttcttcatatacccgtttgattctgatttgtgtcatggctgttctcttaattttgcttccattttgatggagcgtgggaaaacgatattattttccagatggatgtgctggtgcaaggcctcttcaaatgctttaagctgttggagtacgaggcggtaactgttgcaggcatcttctggagctgtatagccgttggtcagatgctctatgtggcgatagcgttctccttcaatgtcatgttctgccatcatgacggatatgggagcttcgatgcttccacagtggaattcgggcaggggagtattttccagcttagcctttaccatctcatagatgtagggaaacagtaccagttcctctttgtcgagatgggcattgaggtcggagagggaatcatgaaagagagcctgcacattgtagagtgacggatgtttttcaccgtgtacgcgacatattttatccagcagttcttcaatctcgggaccttgtgtacggatattacggtggtggattttgagaatatagtccaccaataagtccagaggccaactcttgaaatcaatattttcggaggttgtcggagccagatgctctatttcttctatcaccttctccatatcggctccggcagttttactggcttcgggaagcagtgcggaaccatggcagcagaaatcaatgccatatttatcaaatatcccggcattgttgaagttgtcggctacgatttcgccgactgtcatacgtttataatccttcatatgttatcttgtttttgttttccacaacattgtggaaacctgctatatatacaattatatggcagataatgtttgaagggttatgattatttgagttttcttgcccggttctttcatttaaaggaattggaggagttatcacttcgctccgctccgtcaggagttgaagaagttaaagccgatacttctgtgaatacatacgcacgagtattggctttaactcctaagccgacttgtcggctgataactcctttaaatgaaagattcgtggtttccttgtctatccttctactttttggaatgccagccgttcgtctccattggccagaaggatgatgccgcaatatttgaatccgtgcttcttcagtatgtattgcaggatatgattgtcccggtgggtatctgcacgtaggttgggtatttgttcgtagcaccattgcaggcaggcattggccactcctttgctgtgttctgtacttgccagccggtgaatgacgccgtaaggaagcgtatcttccacccattttccttcatagatatgcgtatatgtggggtcgtttccacggataaaggcgaaggttccgataatttcttcggtatcgtcggtgcacacatagctgtttccttgttcgatgtctgctatgacgatttccctggaagggtagttgcctctccactgcagcatatttccgtctttccgcatgatgtgcttcgcttgttcaaagatgtccataaggattgcaatgtctgtgggttgcgtctttctgatttttatcatagctttttattttatctgtgtggtatctttctttgattcaggttgcaaaggtaatgcgttttgtgattcattgttctcgtaaatgaacaaatgctaacatacgttgtttctttaggaagaatttgcatatatttgtcccgtaatattaaacacaattgattatgaaaaagatttttagtgctttcgtgatagctgtatgctgtatgtttatggctatgcctgcccaggcccaactattgaagtggggtgttaagggtggtgtgaatatgacgaaaatagattgggatggcggatataagggaaacaaggataattctaccggtttctttattggtccgatggctgagttcaccattcccattgtaggcttgggtgttgatggtgctttgctgttctctcagcgcggcaaggacgaggtgaagcaaacaggactggaagtacccgtaaatctgaaatataccattggcttgggtagtttgttgggtatttatgtggcagccggtcccgatttcttcttcgacttcaagaagaaggattacgtagaccgcaagaaggctcaagtggcacttaatctgggtgccggtgtgaagctgctgaagcatctccaggttggcgtgacctatcagctcccgatgggcgactcatttacgtggaagaatgcgggtgatgccatcggtgccaagaataagacttggcaggtgtctgcggcgtatctcttctaaatgtagtaaaacgatttgtggaatataaagaaaggctctcctacaaaaaggagggcctttcttgtgtttttgattacttttctacaattacatctactggggcaggtgcatcatcatggagtggggtagcagcttcgcgactaggctgtctaccgtctttgatggcgagtacccattccccatttgcttttatggggttgaacatgaaccccatactactacctggagtgtcagaatctgaacgtggcgtaaattctattttgtacttcacgtcattatttccttgtgtagagaagctgaggtaatccaatcgataacgaattaccgggaaacgctggaaacgtttggtcagtgcttcccgttgttgtatcgttaagggtttggctataccagcgtcatcaatggagtaaagcatatcaagagccttgtcagtctctttagcttttagaagatccatacactgtgtacataatgtaagaacagcgcttgagtctgcagcagtcaaagtggctacaaactcatcttctgcctctttctgtgtcttcatcttctcttcgtgtccttttgttgaacatgctccgagtagaaagcttgctgagagaagaagcataaaaaggatttgtttattgttcattgttgatatatttattaatcgtgcattgttaaataaaaaggtgcgtcaccttattatgacgcacctttattatattaccgcattttaggatgcgatgagttctttacaaaattatctgttggcaatagtaccatcaacagcaatggcaactttagcacttactgtaccccatgtgtatgtgacctttacaggaaccatgatggtgaagtctttagtgttacccatattgttcttgtagttcaatactacagagttcaacttgctgatgttggtagttttgatgtcaatcgggttagaaattgcagtaccacctactttatcaaggattgtcagcttgataacgtccttgttgataggcttctgttcaccgataacattaacgtcacaagttgcattgtcaatatccaaagttattgcgctgataccgtagtattcgtacaagttaacgttgttttctttagcagcttcatatactttgtctttatcattgtatacgataaccggtttgtcgcgccagtcgttggccttgaacaagttaccaagtaatacggaagaaccgttagcctctgcatccaagaacttggctttgtcgttgctttcaatatccagcggacgcaagaagcgagcgttgaagttgtaagcgggagccagttcaatttcgcagtcaccataaacagcggatacctcgatgatggcaaactgttggttaggcttgttttcgttatgaccgaaaaggttcaagaatacttttgcttcatcgttgtttgcataagtaattgtcttggctgtcttatcaagagttgcgatgagagaagcggttgctctcttttcaccccagtataacttagtgctgctcttgctcttgtcagcttcaactgtacttacaaacaacttctttccacctatagtcagaccatcgttcttagcagagaacaagtagctgtacttgatttccatacctttgtctttgttgttccagatttcaccataaaccggcttggaagcttctgatacaatgaattcgatgcctgatttttcaacttcttttccagcttctgttacgtagtgatagaagtagtcatcaagattcttcacataatttgctacattgtttgctgcatccggagcaggaacattggtacgtacagtatctctgtcagccaaagctgtttcagcaggataccagaacgcatcacgtttgttaccataacttgcagtagtcggcaattctgctatggaaatcttgatacctacgtaaatagcgtaagttgttccacctgctacaggtttgtacttgccataaagtgtcaaggcgcgatctttgtaatccttgatgagttggtctctttgagtcttattgctagtccagttcaggatagcatttgtactagtgttaccgtcaggagtttcagtaactacaccgtaagtattgtctgctgcaaatttattagcagctgttacttgaatgaagccacccttaccgtctgctacataagtttcgtcttttacaaatgtataaccctttgtgaattcttccttggtcatacccagttcttcaagaatcttaccggacatgtctttccaagtgatggatacagtttgttcaccacacaagtacggcaactgcggagtgctcttgtcaataacaattgcatcaggagtagcggctttttcagtgatttccaacttgatgtaacctgctaatactacattatttgttgcatcaaccagtttaaccaatactgccggacgacgaccgatagcacttctgccaatcttttctgtgcttccttcaggaataaccacactttcttctttgtcgtttacatagcaaggagtgaaagtaccgtcttcttccaattgagagtaagcattttcctctgtatcattgtcaccgctgatatagtgaacagcttcaaacttgagagtcagattatatagctgggcagcttcagcaagactcatgcttttgtgagtggttgcagtaattttctctccaaagttttctacatgatggatacacagtaaatctgccaattcaatagaaccaccattgtattgtgcaggaacagtatatacgttttcgatagcttccttagctgtcttatacagttcaggtttacaagtgttttttgttacgattttgctgtcatcggtatacgcaatggctttaaaaccttgaatcatcggcatgatggctgcatagtcagaagtaactgtagacttttcttcaccttctttttcgccattaaccaatgttgcttccagagctgcgatagaaatatagttgttttcaccgggagtgctcaaattgcccttcttcaaatcctctacagagagtttgtatgtagcatacattttttcgccgtcaatggtcttacctgcgttttggaagataggggttaccacagcaggagtagcttttgtagctacatattccggagtagctgccaagaatttccactcaatatctttcagcttggcatttagcgggttcaagtgatagtacattgcgctggttgaaggcatccaataagttttcttagtggcatctttcaaagtaatccaattggtagcacttgtacctttcttgattacataagctacattgtggtcatctttactttctattgcgttcttttcagcttcgatgaaatcaccgttggcatatttgtatttagtagcttctactccgtcttcatacaaatcaggaatgaataccaatgctttcaacttagtagtcagagaaatagtcttttcaaccaatttgccgttctcatccttcatgttaccaagggtcagagtttcatcttttgtattccaaactgctgaaagagtcccttccggtaaccatttcgtagtttgtacttcatataaaggatctttacccttctcttctgttactttcacccagtagccagcttctgcttggccatgcaacttgccagtttcttcagtacctgggtagtaatagatggttttagcgtcttgaccagcgctaccgttgcccggttcacctttttcaccgcgtgcagggaactctgtttgtacattgtctttagcccaccaatagtcaccgttagcgtcttttacaatactccaaacgggagcgtttgtgccgtttgttccgttcttgataggataagattcgccattgcttaatttgatgacaatgccatcttctgttttgtcaacgccggtaatgaccgatccagcgtcaatcttagcttgaaggtcacttaccagcttttctactgctgatacgcggttgtccaagctttcgatgtcgtcatcatagtccttacaagacgtgaacgttcctgcagtgcccaccattaaggcgctgaacaggatcacacttagaaactttttgttcataattgaaaactttaaatttataaatttaaaaaaataaaaa

SEQ ID NO: 4507 - DNA, 4002 bp, Unknown
  gut microbiota DNA sequence
gctctgaatcaacttcacaaccttggccgatacattctcatccgtataattgggcaccggcaggccatcgtcaccactcctattcatctccacagcagtatctacagcctgaagcaaggatgtcccatcaatgccggcaaggacaaagatacccttgtcaagagcctcgggacgctccgtactcgtacggatgcatacagcagggaaaggatgccccacagaagtgaagaaactgctctcctcaggcaaggtgccgctgtcactcacaacggcataggcgttcatctgcaggcagttgtagtcgtggaaaccgagaggttcatgctgaatcacacgtctgtcaagtgcaaagccgcttgattccagacgtttcctgctacggggatgacaactgtaaagtatgggcatgtcatatttctcggccatagcgttaaccgcgctgaaaagggacaggaagttcttctccgtgtcaatgttctcttcccgatgcgcggagagcaggatgtatttacctttctggagatgcaatctctggtgaatatcgctggactctatttccgtcaggttctcatgcaggacttccgccatgggcgaaccggttacgtatgtacgttctttcgccacgcccgaagcgttcaggtatctgcgggcatgctccgaatagcagaggttcacatcggaaatgacgtccacaatacggcggttggtctcctcaggcaagcactcgtcaaagcagcggttgcctgcctccatatggaagatggggatatgcagacgtttcgcgcctatcacgctcaggcaggagttcgtgtctcccaacaccagcacggcatcaggtttcacctgcaccatcagcttgtagccggcgttgataatattccccatcgtggcaccgaggtcatcgccgacggcatccatatacacatcggggtctttcagcttcaggtcacggaagaagacaccgttcaggttatagtcgtaattctggccggtgtgggccagaagacagtcaaaataactgcggcatttgttgatgacagccgccaggcggatgatttccggacgggtgcccactataatcagaagtttcagtctgccgttctcctgaaacctgacttgcgaataatccaattttatatccatctgttcctatattctttaactcgtttcagactttttcagaataagtgtccggacgtgccgggtcgaaacactcgttgcaccacatgaaggtcaccaagtcttccgtttccgaaaggttgacaatgttgtgcgtatagccgggaatcatctccacgacctccatcctcccgccgcttacctcgaagctgacaacctcctccgtacctatcttgcggagctgtatcagaccgtgtccgctcaccaccacaaacttctcgttcttggtatggtgccagtgctggcctttcgtaacgcccggcttggagatgttcaccgagaactgcccgcggtcggaagtacggataatctccgtaaaactgccgcggtcgtccacattcatcttcaggggatagctgaaccgttcttcaggcaggtatgagaggtatgtggaatagagtttctttgtaaaggcatcgctcaaatccggaacggacaaggtaccgggcatttgtctgaaagaccttatcagttccacaatgccgcccaaggtaatggtatgtactacgggcacttcgcaataatcaccgttgcggtgttccctgccgctcagggcagagataagctcgtccaccacatcgtctatgtaaaccagatgcatcaccaccgaagggtcgtttacccggatgggctggtcatgggcgatgttgttgcagaaagtggccaccgcgctgttatagttggggcggcaccatttgccgaaaacattcgggaagcggtacaccagtacctttgcacccgtttccctggagtactcgaacaacagttgctcccctgcccgcttcgattcaccgtaagggttgtcgagtgcggcctgcgtggaagaggaaatcattaccggacaggtattgccgtgcttcttcaatgtatcaagcagcgtggaggcgaagccgaagttccctttcataaactcagacgcatccttgggacggtttacgcccgccagattgaagacaaagtcagcctgtctgcaatagacatccagttcggccgggtcactgtccatgtcatattcgtaaatggcaagttcctcacctgcaatgccgtaattgcgggctttcccgtcacggatgttgtgcagctgggatacaaggttccggccgacaaaccctcgggagccggtcactaagattttcataaactaatgggttctgtttgtcacagaaaagagaagatattcatagtgaatgacagaaatcatccaaacctataaaacttacttttgggaaattatattgcttcaatatatgaaaatgatgatcttccgtaacaataaacttggcattagccacaattgcacagtccacaaacttattatcatccggatctgattttatcagattgaagttataataaggagtaaagaacaaagtataaggattattgagaatgacatcaatcaccagcttagctatttccacacctgccaaacgttctaatatttcctcatattcattaagaatttcatcagaaacgcataactgattcgttccatccaaaaagcaatcccaaatcttacggtacctgcttttgggagaaatgcactgtatcaaggctatttgtatctaatacaattctattcatctcttcggaagtgtacggacatcaatttttctcagttcatcaagtttttcttggtttaaaactcccgaatcccataagtcattcaagcggtcatctaacttctgagaaaaatatttggtcaacacttctttaacttcattcaatcgctcctccgaaccatcaaaagcaaacatcttcaaaagatgttgttgaactgaatttaatactgttgctgccatattctcaattattagtttcaatatggcaaagatagttttttttctaaaggaacaatacattccctctttctttcctgttgtattattcaaattaaagacttattcactcttgatttccgcgctcttcgccttttcctccatcccgaggtcttcgcggatgaaacggagtttcaaaagaagctttttcatgccctccacatccaggcgggcagtgttatggctgtgatagtcctctatacgggcaatatcctcattgccttccgtgaagaacttgtcatagttcaagtcacgggtgtcgcaggggatgcggtagtagtcgcccatgtcgacagcctttgccatctcttcgcgggttaccagtgtctcatacagtttctcgccgtggcgcgtgccgatggtcttcacctccgtctcaccgtatttcggattaacctgcgcgtatgtttccttcaaggcctgcgccagtacatccaaggtggcggcaggagccttctgcacgaacaggtcaccgttatgcccgtgctcaaacgcatagattaccagatccacggcatcgtccagcgtcatcatgaaacgggtcatgttggggtccgttaccgtaatgggcctgccgttctttatctgctccacccacaagggaattacagaaccgcggcttgccatcacattgccgtaacgggtacagcagatggttgtaccagcttcctcacccaacgcacggcccttggctatggcaaccttctccatcatggccttgctgatacccatggcattgatgggataggcggccttgtcggtagaaagcaccaccacattctttacaccatgcgctatggcggattccagtacattgtccgtaccgatcacattggtctgcacagcctgcaacggaaagaactcgcaactgggaacctgcttcaaggcggcggcggagaatacataatccactcctaccattgcaccgtctacagactggcggtcacggacattaccgatataaaatttcaccttgggattctgc

SEQ ID NO: 4508 - DNA, 506 bp, Unknown
  gut microbiota DNA sequence
ggacaaatcttttataagtcttgtccagcagacgttcttgttccgatgtcaggttcagtgaatccttcttttgatagacgttgttcacgcgcttaaacagtttctcgttcagggatatattgtcatcatgttccgaaagaaccggtgccagtttgatggaaagtgcggttagtgagtcagtcgtttccgcatctgtcatattgaagaaaatggcgctcacacggtccaagataggtgcgctgttatccaaagctacaattgtattttcgaatgtcggaatttccggactttcgatgatagcttcgatgttttgattctgctcttctatccctttcaggaaggcaggttcatagtgctccaatttaatcttgtcgaaagaaggaacaccatactgggtttgaaactctgtaaagaaaggattgctttctgttttcgtagcacaggagtacatcatacaacttactgctaaaatggttagtgtctttttaatcatcataagtgttttt

SEQ ID NO: 4509 - DNA, 4026 bp, Unknown
  gut microbiota DNA sequence
ccgtacgggtgtagcctgtggatgcggaatattctccagccggatagaccagcggaccgatcggtccctgctggagatacttcacttctcccgtcttgcttgccaacgctttctttgccatatcatgctgccgttgagattgtccatgaaacattgccgcctgcctgctggcacatagcttcagtgcaggtaccgcttgccgcagccacattcgccgtagccggattgagaatgacccctgccgaatccataaagacaaaatagaacagcatattctttgccttcgtggtctgtccccgcttgacaaggataggcgtataagtcaccgaacctccggaaccggaaacaatcgtctcatcctcgggattgggattagttatgatgtcgtaggggtctgacaagtccatcaccgtctgcgtgtcaaggcctatcagattgccgccctgcgacacctccaccttaaagatgcccgtagtgtcaaccaggctgtccgtaacggtcagactcttgccggtctggtcgacgagtgtctgccaggcaccgttaaccatcctggaccacttgtaggttagtccggaggtgatctctgacgctccacgtctcgccattgccgtgagaacgacactgcctcccttctcacggatggcaaagtatttgtcatctccggaaacgatggtcaccacgttctggttgcccacacccttggtgatagggatgctgtaaacgaactgcacctcatccgacacgttgcccacggtcaccgtagccaccgccttgacgctgcagctcgcaccggacgacgccttcaccaggttcttcacgatctgaagcccgtaatagttcgtagtgcccgccttgtaggggatgtacttgaaatgccccgtctcgccgccgaacgtgttcgtggaaacgttggatgtgaagcttatcaacacgtcattgaaataccacctgatggaagagggcaccacaaccccctctgccacccgtgaggaggtgagaaggaaggagagcgtcggcttcatcgtggtgaagtcgggggctatgtttgtcggagcacccgattcaccatcatactcttgatagaggtcgcctttgtcgcacataatcgctggcatgtaaacgccagacttttgcgaaaagattacctgcccgaccttactcgctacgctcatcggtcacctcctccccgtctttatccatgaaaccctccggagtggcgacctccaccggatcttccacgccgtctatctcacccttggcctgctgcggggaaaggcacacgcccccgactactgccgcccggtcgaataccgtatcgccgggaaagcctgccacatcggcctgccataacagcacattgccgtcggcagtgctgttgcggattcctgccactcccagcttgtccgcaacctctctcgtcactttgatataaaatgccatactgctatcgattaatggttaaacatcccttttccttgccactataaacttaccgctgtcatccgtcacgtacttgccgtcagatgtcaccaccgccgcatacgggcccttgtcaatcaccttcagctgtagcatcatgccgtcggtgcatgggatggagggcgagtacccggcagcggccagcacgtatgaggaggcgccggccgccttcgtgtaccattcgcactcaaggatggcctggggattggggacaatccctgccgtatcacggatgaccggtttcgggtatatcatcttggttccgtctgccacctgctgcggaaatccctcccagtcaatctcgatgctgggaatacgcctgcggatggtggtggagacatagtctatgtcactgtccggcttggatgaaggagcaccgtccttcgagtacgatgctttcacgacgtaggtctgttcgtggccgatatagtcccggtctatggtaagcacgttctttgtcagtgatacgaactcccagtcattgtcgccgttaccgtcggtaatctgctccagtgcgcccgtattcagcttccgatagaagaagaacttgcacttgttggttgctgtgacatctacatcaccgacaagcagtctggcggtgatggcctgcctggcaatgtcccgacacgggttccaatcaagtgccgacggagagtcgaccatcagcttaggctgcgcctcgctgccgtcaacggcgcggacaagacggctgaaacggtagacatgcgtctgtccggtacgcttcgcatcgacatactcggcgtagaactccagtgttaccggactgccgggaacggcgttctttttcacttgtatcttacccttctcggctccggtctcggtaatgacatagctcttgttggcagatgtaatcaatgtccgtacaccgttcaagcgctcgtaccacttcatgttgaccaatgacgcgttgaccgcacccaccttgaccaccgcatccgggtcggtggcattgcaccgggggaacagcgtcaggggggtaagcgtgtagtccggagtgtactcggccttgtcagcctggtacacctgcacgtccggcacgctgccgacaacctctatcccgccgctggtctggagagggcggtagttgacctctatcttcttctgtatagtctgcataattagaaagttatataattcattgtctcataattgttctgcccgtcacgcagcaatacccgtgcgatgaacttgcacccggtcatgttcatatagtcggggccgaggtcgttgaccgtcagcggcagtgacttgccggtttccgcgtgtgcgaccgcccaggcgttgtcctcggtgacgttgcccgtatcgcgcgtccactccacatcactgtcaaggatatgcgccgtaacgtcacggttgtacagctcaccggtaatggtgagggtggtcgcaaaacgctccgcatcgaagtaccagccattggagctttctatatcgatgctgaaatccggattgccctcgaccattgcccagcccgctgctccgtacttcggttcgtcggtagtgccggaaacaagacacatccacttgcatccgtagtgccacacggtatcgtacatcatcacacgtacggtctcggtctgtgcctcgcggtcggcttggtagggttctgctccggtggcggtctccatgttccactctccgcggtcgttggcgatgcggggcaatacgccttggaagtcgatgcggtggatgtcctgcgctaccaatccccggacgtagatataagagtgcaggtagttgatgggcaggttgtcgaacagagacagatgcttcagcctgccgacgatcaccgaatagttgctttcctcaaggacgggttttgtgaccccgttaagcatgcagatacaatgctcacgggatgacagataccaataaccctgccgttcagtatcaaccgggttgccacggtgtgataatatcatcaacggctcaggaggataattcttgccacccggcacctcgctatcagggtacatcacagcgttgatcgtattggctgagatgtcaacatgcaagacacgtagccaggaggtataatacttgccgccacctgatgcaaggtcattgacaacaccatatacaacatcgttttctgccagtgcagtaaagtcgttatcccaccgtttcttcatcttcaggctgtatgtgccgtcttcaagctgcgatacactttcgatggtaccggactcggagaaggaatagtcgctctccatggcggagagacggttgaagataagctcaaggacggtaaggctgtcgcggacctcgaggcgggacagctgcatacggccgtcagggaatattccggcacccttgcccgcgaccatagagtcgataaactcgccgaacttcaacagaaaatttgtgccgtcagactggtctttgcgaaggaacatatcctccattccttcaacgtaaccggctttgtccgcgtaaccggcctttatcttctgaccatttaccaatagatagttctcaatatatgaaagcaactcaagcaaatcatagttacggtgtttg

SEQ ID NO: 4510 - DNA, 90765 bp, Unknown
  gut microbiota DNA sequence
tttagcagaacttttttattttagaatagctgataagtgcaatatcatcgacaagcccaatgagcggagttcccatacgaaagtgactttacgcggtggtgggattattttctatttcggggcgtttgcctatttcctgacgagtggctttgaatatccctggttcctgcttgccttgacactggtgacgttcatcagcttcgtggacgatataaaatccaccggacagatgacaaggctgctttttcatttctctgctatggctatgatgttttatcagtgggggctgttctccttgtcctggtggtggatagtcatagccttgatagtctgtacgggcatcatcaatgcctacaattttatggatgggattaatgggataacgggaggttattctctggttattcttgctgcgttggcctatatcaataaggaggtggttacttttgtagaagcggatttcatctataccgttatctgttccgttctagtcttctgcttcttcaatttccgcaagcgtgccaaatgctttgccggtgatgtgggttcggtgagcattgccttcatccttctttttttgataggaagacttatcattggaacgggtgatttcagctggatagttcttttgtccgtttatggggtagacagtgtattgactatcattcaccgcctgatgcttcatgagaatatcgggctaccgcatcgcaagcatctgtatcagattatggcgaatgagctgaagattccccatataatggtttcttctatttacatggcagtgcaggcaatcatcatcgtaggatatataatgtgtttaggttacagttattggtatttggcaggtataattcttttgctttgttttctttatatctgttttatgaagaagtatttcggattgcaccagtctacgtgagtaatgctgaaatgatgattagtaaaataatgaaaggcgatggagactaaaatctccatcgcctttcgtcttatttttgaaatataaatcgtacctttgtcatacaccaatcaggttataataataacatggaacagatacgtaagctgccgataggcatacagacttttgataaactacgtgaaggcggttttctttatgtagataaaactgctatgatttatcaaatagcatctacttctactccttatttcctaagccgtccccgtcggtttggcaagagtctgctcatttccactttcgaagcttactttcaaggacgcaaagacttgtttcagggcttggccatcgaacagttggaaacgaagtgggaacagtatcctgttctacatcttgacttgaatgcccggaaatatgaaactgctgctgacctgacggctatgcttaatcaatatctggagaaatgggagctgctctatggtcaggagaaggaagaccgtagtccggaggagcgttttgcttacgtgatagagcgggcatgcacgctgacgggaaagcaggtggttgtgctgattgatgagtatgacaagccattgcttcaggcggtcttggacgagaacttgctggatgagtatcggaaaatattgaaagcgttctacggtgtcttgaagagcgctgaccgttatcttcgttttgttttcctgaccggagtgaccaagtttgcgcaagtaagtgtattcagtgacttgaaccagctgaatgatatcagcatgaagtctccttacgctgctttgtgtggtattaccaaagaggagttggtgaaaacctttctgccggaacttgagagactggctaaacgaagagggatatctttacaagaagtgattgatttgatggaacgtcaatatgatggttaccattttcatccggaaggtgtaggaatgttcaatccgttcagtgtattgaatgcttttgatgcagaagagatggggtactattggtttcagaccggcacacctacttacttggttgacttgctgaagcagagtgattacgatatacgtctattgatagatggagtggaagtgctggcttccgctttctctgaatatcgtgcggaaacaaataatcctcttccgatgatttatcaaagtggttatttgaccataaaagggtatgatgatgatgtgaagctatacactttaggctttccaaatgatgaggttcgttacggctttctgaattttttggtaccctattataccaatgtatccaatgatgagactggtttccacatcgctaaattcatgcgtgaattgaagagtggagatgtggaggcgtttatggagcgtcttaagatattcttctccggtattccgtacgagttgagtgatgatacggaacgtcattatcaggttatttttcatgtagtgtttactttgctgggacagttcatccggtccgaggttcgcagcagccgcggccgtgcggacgcagtagttcatacccctaccgctatttatgtttttgagttcaaactggacggtacggccgacgcagctctgaagcaaatagatgagaaaggttatctgattccttataccttggatggcaggaaattagtgaaagtaggtgtgaacttcagtaaagaaacacggaatattgatgaatatattgtcgtggaggaataggaacgaacaatcctatatacggaaaaggcgatggagaatcaaatcttcatcgccttttccatattatagtatttcattttatttcttcatcctcagcacccgtattcccgtccacttattattgtctttcagcatttgggacaaggggactttggagacgaccactttcttgtcggtagaggaagcgtgtaccagcaggagtttgctatccgcatagaaagcgattcccatgtgggctacgtccagccccggagtgttggtggtgatggctatgatatcgccgtctttaatccacgggagaccatcggcgggaagtttggctttgggaagatagtgaatttccttgccggacaaggattgttcaatcttcttcattttggctatgttctccggagaatttgccagctgcttgtagagttgggggtgggaagacatgtaggagatggacaaccgttcggtgtcgggactcatggcgcccgttacatcttgaaggaagccgttgcgtacgccattgtttatccagtcggcaatataatgcaggcgggaagtgtacccgtcgattttaccgtcacggtaacggattttttgcaggttatcggcgaaagcgctttccgagatgtctccgtcggccaatttgggggtgagtgtctctgccagtacatattccaccagcgtggtacagtctacttcatcgcagttgatgacgagttcttcgggaccatcagcctccagcgtatgggctacgtatggcacatccagatactttattccattgctcaacatatctttccctccctgggcagaaacggaagttaccatggctgcggcgcagagggcgctgaacataaatttagtcattgttttcatttttctttcttttgattattattgttcttgaacgtaaaaaggatgcagcaaatttactacatcctttttataaaagcttaatccggagggattaaattcaatattgccggattaaatatttataatcctcctttttatcgaacggaacaagggagaaaccgtattcaatggcgttctctttgcccggacgaatcagatagggctcatgggcggttgcgccccaactgtcgtctccaccgacacccatcatgcggtaatcaatgaacaaatcgaccatcttttccggcagagggtcggtgaggtggcggtgatgggtcttttcggtacgcggagcgctgttgtcaatcgtatcgccgctgtccatactttccaggggatagttggaggtgttcagctcaaaggtgcggtcggcgatgagcagcaaaccacgttgcgtcttatcggtaagggcgcaccaatagatgtccgtgcgatggttgttctcctgtgggcggacatacggctcgtacatatccttgaccgggatggcgtactctccgatgaactgggaggtacggcggtctcggtaattctctttcggaccgcgaccgtagtaggtcaagtctgtaaagctttccggcaactgcatccgcaggcccacacgcggtatcatcggagcttggtctccttcggccacgaaccggttgtctaccttgatgactccgctggcatatatcttataggtgatgtcccaacgggcatctgtctgtggaaaacggtaggtcacctttattgtcgtggcattgctgcccggagtcacttggaaactttcggcttttggttcttgatagcttgcctctttccaggctttgaggcggacggggaggttggctccataatcattgtccgtcggtgcacgccagaagaatgggcggggaccttgaccgttcagtatgtactcgtgcttcttgtataaataggaggtgagcagaccgctttgcttgtcgaaggtggctttgaagtcgggaccggagaacgccaccaaatttccctcttccttagaagtggcgggctgctgtgccgtagcctctttcttgtagaaagtatggacgtaggtctgttcgcgtgcgatgaccgtgccggccgggaggaaaggctctgccgtcttgatggctgcatagaactcgatacgcacatctcccgttgtctgtttctctttgggtatgccgttcaggaagccggtggttaccgtcttgcccggtgcggcatggatattttcaatcttgccacggtagacttcctttccgtggtcgcggatgatgtagtagaagtcgtacttgtcgagattggtgaaggagaaatcattgcggattttcacggtggaagtctgcttgtcgaaatcaaggaacttgatgttctggtatacttttcccatctcttctgtctgcggcttgacactgcggtcggggtataccacgccgttgatgcagaaattgccgtcggagggcgtgccgttctcgccataatcgccgccataggtccagtatttacggccgtcgtctgtttgggcggcaaagccctggtctacccagtcccagatacagccgccctggaggatgggatatttttcgatgatgtcccaatactcctggaagttgccgaggctgttgcccatggcatgggcatactcgcaaagaatgaggggacgcgtcatctccttgttccgggcatacttctccagataggaaggggaagcgtacatcgggcagtagatgtccgtattccattccaacagtgcgcgttcatactggatgggacggctgtcgagcgtcttcaaggtgttgtaggtaacgtagaaattcaatccgttcccggcttcgttgcccagcgaccagatgatgactgacggatggttcttgtcccgttcgtacatattcatggtacggtcgaggtgggcattcatgaagagcggattgtttcccagcgtgccgcctacacgcaggtcgtaacccatgccgtggctttcgatattggcttcgtcgatgacgtagataccatattcgtcacagagttcgtagaaacgttcctgctggggatagtgacaggtgcggacggtattgacattgtatctcttccaaagctcgaaatctttcttcatcagttcttcggagacatagtgaccggtattctcgttgtgttcgtgatagttcacgcctttcacgaggataggttgtccgtttaccaacagttgcttgtccttgatttccactgtacggaaacctactttgcagcttgtcgcttcaatcacatctccgttcgggcgcttcaagctgacgacgagggtatagaggttgggcgtttcggctgtccattgcaggggttcctggatggtcttcttggtgaattccacttccgtttggtcaccgctgacctgggtagaggactgggctatctgctggtcgttcttgtccagcaggcggtaaccaacgacaaatggggaattttgtccgctttcattggtaaactgcacctttaccttgaggataccgttccggtagttctcatccaaaggagactccaccttgaagtctgtgagatggatttgaggctgggcatataagtaaatgtcccgttcgataccactgatgcgccagaagtcctggcattccagatagttggcatcggaaaagcggtgtatctgaatggcaatgacattcttccctttcttggcaatggcgctgacgttgaaacgcgccggagtctttgcatctttactcatgcctacaaacttgccgttaaggtagtagaaggctgccccgcgtacaccgtcggcactcaggaaaatctccttatcgtcccagtctcccggaagagtgaactcgcggcggtaggtgccggtgggattccattcttggggaacgtacggagggttgggcttgtcccaataaggaggatagcccgaagaacagaactcatagggatggttcacgtagatgggcgtgccgaatccttgcaactcccagtttccgggtacattgatgtccggccagcggctggcgtccacacggtccatcatgaagtccgtggggcggtcggcgaaggtttccacataatggaatttccatttcccgttaagggacaagcggaaggttccgttcttgcggtcattgatgacggcatcagcctccgtgacgtaggaggtgaacgtgctgcgggcaggctcccggttgatgcttgtcagcttggggttggtaatctcttcgtagcgattgttctcctgagcagtcagggcaaagggaaaagctgcgaggcaagtgagtaaaaaatactttttattcataattgcttttatttctttgtggtaggttcagagaccgggaatacgagcccttcacgcaaccacttctccagttcttccgtccattgacgcttgtaggtgaagttgtcccggaatccccagccatgtccgccggtagggtaggcatgcaggctggcaggcactttgtggtcacgcaaggcgaggaaatagccaatgccgttgatgggtggcactgcgtcgtcgtccgaagaaagcatgataaaagcctgcggagtgcctggggacacttgtctttcgagggagtatttttgttccagctcctgagatggattttctccgataaggttcttgcgggaacctccatgggtaacgcctttctgcatggaaattactggatagaacaagatctggaagtcgggacgggttttgtcactgctgtatagtgtggcaagcgaagctgccagatggccgccggcagaagcgcccatgatgcctacacgctgaggattgacaccccattcggcggcatgttcgcgtaccatgcggatggcttgttcggcatcggaaaggggcacttcatggtgcccgttgggcatacggtatttcagtactgcataggtgatgccttgtgtgttgaaccagggagccatgtcgtgtccctcgtgcttcatggccagccccccgtagccgcctcccggacacatgatgatggccatgccgttggggtgggaggcagggtacaccgtaagggtaggggtggtgacatcggacacccattcgttgttatggttctgtccggaattggtcagttcgttgttattgggggcaccgttgggccataggggcagctcaacgggcttttgtgcagataacatggtcgctgcaaatagaaaagataaaagtagaatctttttcatgttcttggtatttaaaagttatttggttttcatggaagctttgatgaggtagaatatcagaatggcataagcacccagcgccagcacttcggaccaggtgttctgcaaccatgcatcgtttacgaggttgattcctccgaaacgcatggcagcacttgccacacccatcaatgcaccgccggcaatgaaaccggaggcaagcagggtacctttctccccgcgttcggcattgagagcggcatccttgctgcggctggtcacgtaccagttgatggcaccgcccactaccaacggaacattcagttccaatgggatgaacatacccaatgcaaatgccagtgcgggaatcttgcagaaattgaggatgacggccagcactgcaccgataccgtagagcggccagggcgcacccacaccgttcatcaacggttcgataacggccgccatggcattggcttgcggagcggccagctgtccgctggtgaaaccgtatgtcttgtttaggataatcattacaccacctacggtagcggcagaaacgatggttccgaggaacttccaggtctcctgcttggcaggcgtgctacccagccagtaaccgattttcaagtctgtgatgaagcctcccgccatggacagtgccgtacatacaacaccgcccatcaccagtgccgcaaccatcccttcgggacctttcagccctacggctaccatgactacggatgccaggattaatgtcatcagcgtcattccggatacggggtttgtgcccacaatcgcaatggcattggcagccacggtggtgaacaggaaagcgatacctgcaacaagcaggatagctacaatggtatgtgtcaagttgccctgcatcacatcgaagtagaagaagagaacaaccagcagcagcgtgatgatggaaccgatggcgataatcttcatggagatgtcccgctgtgtgcgtttcacactggcttccacgttggacttacctcccatttccttggcagccagtcctacggcactcttgatgatgccccaagacttgataatgccgatgatacctgccatggcaatgccaccgataccgatgctcttggcatagtatttgaagatttcttccggagccatagcgcctatggttgccgtgatttcggggttccattggttcagtacggaatctccccaaatcatggacataccggggatgataatccaccatacggccagtgagccggcacagatgatggacgcgtatttcagtcccacaatataacccagaccgagcacggcagcacccgtattaaccttgaataccagcttggctttctcggccagcatttcgccgaagccgcatacgcgggtagtgaaattctcgttccaccagccgaaggttgccacgatgaagtcgtatagacctccgataataccagccatgagtaatggttttgcctggcttccgcccttttcaccggagacgagcacttgtgtggtggctgtcgcctcggggaagggatacttgccgtgcatgtcgctcacgaaatatttgcggaaggggataaggaagagaatacccagcacacctcccagcagggaactgataaagacttgtgcaaaggtgacggtgatttctttcggataggtctcttggagaatatagagtgccggaagggtgaagatggcacctgccacgatgacgcccgagctggcaccgatagactggataatgacgttttcgcccaatgcatttttgcgtttggcggcacccgatacgccgacggcaatgatggcgatggggatggcggcttcgaatacttgtcccaccttcagccccagataggcggctgcggccgaaaagaggatggccatcagaataccccatgtcaccgaccaggcatttacttctgaatacttcttatccgggctcatcagagggttgtacacttctcccggtttcaattcacggaacgcattttccggtagtccggtaataggttcttcttcttgtttcataggttttgtagttttatgtttttctttaatagacttcaaagatagtgcaaaccgaatgcaggataaaatgagcaagctcattattattctgctgaggtgcagcctatcttcgcattttaggcaaagaaagcaaaaaaaaaggagatttaaaaaaatctccttaattctgtatggtaaaatgcttatttggcatctttagcggtcatgtccccttcgataaataatcgcatgatttccgttttggcattggtgcgcagggtaatggatttcttgaagtgtccggggtatcttccggttccattataagttactttcactgttccagtctttcccggtgctatcggttcttgtgaatattcgggaacggtacatccgcaggaagctacagcctgatggatgacaagcggagcatcgcctacgttcgtaaacttaaaggtgtagctgaccacaggactgttttcggagaatgtgccgaagttgtgggtggtctgttcgaatttgatgtctgcctttccttgtgcataggcataaccgatgctcataaccagcagcatcatataaaaaacgactttcttcatgttcttatcttttttatatttcaacggcgcaaaggtaacccattttcattaaaataatgcctatggcgtgcgaaattgtattaaatcgggctcaaaaggtctctgtacgaatgataagcagggaaaaataggggaagcggatggtcgctatccgcttgctgtcattgatatacttctcttccggagtgcctacattctcaaaatagtgataccggtattcgggatgcaggcggatgcagcggtgaatctcatcggtgcatctggacagcttcatgatgacaaccgcactgttttcgcttgtcagtttctctatctcttctgtcgtagtaatgccgggtatcaccgtcagccgctcttcctggctggccacatggagcccgcccagtgcgccggcggcaatgaaggcggggataccggggatgtgcttcacggggatgccgtctgcctgcaatttgtcatatacatagtgtatggaagagtagaatccggcatctccttcggcaacgatgcagactttctttccttgttgccggagggtggagctctccatatagacctcgttgtaggcgctcagggctttttcacgcagtttgctcatggggagtggaaagcggcgtaccgtgttttccgggatgtcgagttgcgataggatgtcggctgcgcgtgaaactctgtttccatccttagtcagtgtttcgggacagaagatacagtcggctgcctgcagggctgtcaagccttttacggtaatcagttccggttcgccgggaccgagagatacaaatatgacggggaacatttgaatgaagacattaaaggttaaaaattaaagaacagcaaaacggctacaaaagtggggaaataatcagtagcaaacaagatattcgctatctttgttatttactaaaacaatctgttttttatggattatcaactgaacacccgcttgaatggcaacatagccatgacttccagctaccatgagcgtgcgtcgctgcaacgtgacaagactctgtataaattcatttgggtacagagcggtacgctcactctggaaatagaccatatctccatgcgcttggaaaaggacgaaatcgtgaccttgaccccgttgcatcacctggaggtaaaagaggtggacggtgaatacctgacgtttgtattcaacagcaatttttattgcatctatggacatgacaacgaggtctcttgcaacggattccttttttatggctcttccaaggtgatgagactggcgctttctgccgggcagtcttccaacctgcatgacatagtccgcattttccggcaggaatcggtcattcatgacaatctgcaggaggagatgctgcggattgtcttgaaacgtttcatcattacctgcacacgcattgcgcgccagcttttcggggtggggcaggagaaggaaaagacgtttgacatcatccgacagtattatgtgctggtggaccggcacttcaaggagaagaagcaggtgcaggattatgccgatattctttgccgttctcccaagacactttccaatctgttctcggcctgcgggttgccttccccgttgcgggtgattcatgagcgcattgaggcggaagccatgagactgctgttgtatacccgcaagagcgccaaagaaatcagctccattctgggctttgaagacttgcccgcgttcagccgttttttcaagaaaatgaccggcgagagtgtctcggactaccggaaaagagtgaaacgggaagaattgccaactgttgcggaataattgccatttcgtacgtggcggaaaacaaggaactttgcaaaaacaaaaatcaagtcatattactgaaaccatttaaaaagtagaacaaagatgaaaacgaaattgcaaaacttgtttatggctgcgttgacgctggccgcttccactcaaaagttgggtgttaatttgatccgtgtagccatcctggttattttcgtatggattggtgggttgaaattctggaattatgaggctgaagggattgtcccttttgtggcgaacagcccgttcatgagcttcttttatacaaagagtgccccggagtacaaggagtataagctgaaagagggcgagttcaatgaggcgaaacatcagtggcacgtggagaacaatacgtatggtttctctcacggtctgggcattctgattatgaccatcggcattctgacatttctggggatattctctccgaaaatcggactggcgggagctgcactggccattgtcatgacaataggtaccctctctttcctggtgacaacccctgaggtgtgggtgcccgacttgggaagcggggagcacggctttccgttgctgacgggggcagggcgcttggtcatcaaggatacggccattcttgccggtgccattgtcgtactgtctgacagtgcaaaaagagtattgaaccaattaaggaaatagacgtatgaaacagtatgatgtcattatcatcggattcggcaaaggcggaaagacattggctgccgagttggcaaaacggaagctggacgttgccgtagtggagcgttcggaaaagatgtatggagggacatgtatcaatatcggttgcattcccacaaaaacattggtgcatgcggcaaagcaggcggacaaagacgcttcttgggaggtcaagaaggcatactatcgtcagtccattgcaaggaaggaagaggtcgtctctttcctgcgtcagaagaactatcacaatctggccgacaatcctcatataacggtctatacgggtattggctcctttgcaggtccggatgtggtggaagttgggatggtggaagggacattacaattgcaagctccccggatattcatcaatacgggtgccgaaaccgtcattccaccgatagaggggatacaaggtaacccacgggtatataccagcacctccattatggaactgactgagctgccggtacagctcgtcattgtaggcgggggatacatcggactagaatttgcttccatgtatgtttcattcggttcgcaagtcacggtgctcgagggctcttccgaactgatatcccgggaggaccgggacattgcggacagtgtccgggaggtattggaacagaaaggaatcgttttcaggctgaatgcacgcgtgcagtccgtgaaagactctgacgtcatttaccgggatgcggtcacgggagaggaacatcagttacacgcagatgccatcctgctggctaccggccggcgtccgaatacggctggcttgaatctgccggcggcaggtgtagaggtgaatgagcgcggagccattgtggtagacgactatttgcagactaccaaccccaagatacatgctatcggtgatgtaaagggcggtttgcagttcacctacatttctttggatgattaccgcattctgcgcgaagaccttttcggggcgggagaacgcaaggtgtccgaccgtgacccggtgagctattcggtattcatcgacccgccgctttcacgcatcgggctgagcgaagcggaagcacgcaagaagggattgaatataaaggtcaacaagctgccggtagccgccattccgcgtgccaggactttgggcgatacgaacggactcttcaaggtagtggtagatgccgatacggacaagattttgggctgcacgttgtttgggccggaatcgagtgaagtcatcaacctggtggcaatggctatgaagaccgggcaggaatataccttcctccgtgattttgtctttacacatcccagcatgagtgaagcactgaatgacttgatgggcttttaaagattatttaggcacaatatccgtcaatttgcaggaagagcatttgcgtatctccccaaaaatgacgaatattgtgcccgaattccataaaccccaataatcatgacccggatatctgccataggcattgcactgctgtgcattttatgcgtaacctcttgcggttcaaaatcaaaacagacttctacagcatcctcttcagaaacaagccatttgcctatcgcgacagatacggcggctgccattgtaccgctttatgccaaaggctatacggtgaagtacttgccggaccatgtccgcctggtggatatacacgaccctcagaaagaaaacagcaacaccttccattacgcactggtaccgaaaggcataaagcccgccggtgtaccagatgattatatggtgatagaaacgccggtggagcacgtcatgtgtatgacatccctgcaactttccaacttcatccgtctggatgcctgcaattatgtggtgggcatcaccagtacgcgccatctcttcaacaaggagatgaacgaccgtttgaagtccggcgagaccgtgaagattggtatcgaagggaactttgataatgaagtgataatgagcatgaatccggatgttatctttatctctcctttcaagcggggcggatatgatgccatgcgggaaatcggtattccactggttccccatttgggatataaggagatgaccccgttggggcaggctgaatggataaaattcatcggcatgtttataggccaggaagtggaggcgaatgaaaagtttgctgcgatagagaagcgctataacgaattgaaggagctggctgccaacgtgaagaagcgtccggtggtattcagcggcgagatacggggtggcaactggtatgcagtgggaggaaagagctttcttgccgaactgttccgtgatgccggtgcggattatttcttgaaagacgatccccgttcgggaggtgtcacgctggattttgaaaccgtatatagccaggcggagagtgccgattactggcgcattgtcaacagctatgacgggacgttcacgtatgatgccttgaagtccctcgacccgcgttatgccgacttccgtgcgttccgtgagaagggagtggtatactgcaacatgcgtgagaaacccttctacgaaagtatgcccatgcagcccgaaattgtattggaagacttgatacatgctttccatcccgatttgttgcctgactataaaccgacttactacgaactgctgaaatgataaaaagacccgtacttccgttgatgttgctgacactggcatctatctttctttttttcctgctgaacctgcttttggggtcggttcacattcctctgcgctccgtgtggaacatattgtggggaaatacggatgaatccgttatttggcagaatattatctggaagtcccgcgtgccccaagcgttgacggcattggtggcgggagcagggctgtcagtcagcggtctgcagatgcagacggtgttccgcaatccgctggcagggccttcggtattgggcatcagttcaggtgccagcctgggtgtggcttgtgtggtattgctgtccggggcgatgggcggtgtggcattgagccgtttggggtatatgggcgaggttgccttgtcggttgccgccattatcggtgcgctggctgtgatggcgctcattgtctatgtctcccagaaggtgaagggcaacgtgacgctgctgataatcggtgtgatgataggctatgtggcaagtgccgtcatcggcgtattgaaatatttcagtgtggaggaagatatacgtgcatatgtcatttggggattgggtagctttgcccgtgtttcgggcgaccagatggtgctgtttgtctgcatcatggctgtgctgcttccgttgtccttcctgctgataaagacgatgaatctgttgctgctgggcgatggctatgcacgcaatctgggactgaacatcaagcgggcacgcctgctggttatctcatgctccggtgtgctggtggctattgtaacggcctattgcggtccgattatgtttatcggattggcggttccccatctgtgccgtgccatcttccactcttcggaccatcgggtgttgatgcctgccacattgctggtaggcgcttccctggcattggtctgcaatctgatagcccgtatgcccggcttcgagggagctttgccggtcaactcggtgacggcactggtaggtgcgccggtagtggcttctgtactttttagaaaacggaaaggagaattgaatgaataaggaaaccatacatatagagaatctttccatcggttaccccggcaagggggatgtgaaagtggtggcagacggcatttgcgccggaatcaacagtggtgagctgacttgcttgttgggagctaatggagtggggaagtccacgctgcttcgtacgttgtctgccttccagccaaaacttggaggaaacatatttattgaaggaaaagagattggggactataccgacaagcagctttcgcgcgtcattagtgtggtgctgacggagaagtgcgatatacgcaatatgtccgtcgtagaactgataggtctggggcgtagcccctacaccggtttctggggaactctttcgaaagaggacaagactgtggtggacaaatccatcgccctggtaggcattccccatctggcacaccgcatggtgcatacgctgagtgacggtgaacggcagaaggtgatgatagccaaggcgctcgcccaggaaactcccgtcatctatctggatgaaccgacagctttccttgattttcccagtaaagtagagatgatgcaactgcttcaccagctcagccggcaaacggacaagacgattttcctttctactcacgacctggaactggccctgcagatagcggacaaaatatggctgatggacaaggtgaacggcgtaactatcggtacgcccgaggacctttcgttgaacggcagcctgagcaacttctttgcccgtaagggtattgcctttgatttggaaacgggactgttcagggtagccaatgaatatacctcccagatacgcttggcgggccacgggcagaagtatgccatggtgcgcaaggcactccagagaaacgggattctggcaaaccggaatgttgaatcggagatttatatcgaaaccggagatttgaagggagacggcagcttcgtattccatcgaccgggcaaggagccggtaacagtgtactccattgagaaattgctgcaaatagtcttgtcattccattccctatgatgcaccattctgcaaaggataattatgtccacttaacgacgactccggtcccccggctgattacgtcattggctgtgccgaccatcatcagcatgctggtgacgtccttctacaacatggcagatacctattttgtgggtaaaataaatacccagtctacggctgccgtaggtatcgtgttttctgtgatgtccattatccaggctgtgggattcttcttcggtcatggttcggggaactacatctcccgtaagttgggggcgcaggaaacggagagtgccgagaagatggcatccaccggcttcttttttgccttgtttatcggagcggctctggctgtgctgggattgctgttccttacaccgctttcccttgctttggggtcgacgcctactattcttccgtatacggagcgctatttgggaatcattctgctgggtactccttttatgaccgcctcattggtgctgaataaccaaatacgttttcaaggtaatgcggcgtatgccatggtggggattgtgagtggggcggtcatcaacgtggtgctcgaccctatcctgatttttgtatgcgatatgggcatatccggtgccgcacttgccacagtagtcagccagatatgtagtttcatccttttgctatatatggggcgcagaggaggaaatatacgtatacgttacagaaactttacgcctacactggctttcatcaaggaaattattgggggtggaactccgtcactcacccggcagggactggcaagcgtggcaaccattttgctgaacgtggcggccggtgcatatggtgacgcagctattgcagggatgtccattgtgacgcgtatctctatgtttatcaatgctttcctaattggtttcgggcaaggcttccaaccggtatgcggattcaattatggtgccgggctgtatgccagagtgcgccaaggattctggttctgtgtgaaggtaggctttttctttttgctggtttgtgcggtggcaggtatgggatatgccgaggagattgtctccatcttccgcaagggagaccctgctgttgtagctaccggtgcggcagcattgcgctggcagttcatcacctatccgttgggtgcatggattgtggtcagcaacatgatgctgcagactatccgcaagcccgtacgcgctacgatactttcctctgcccgtcaagggctgttcttcatccccctcatcttcattcttccttatttcttaggactgaaaggggtggagatgtgccaggcggcgtcggacatgctgaccttcttcctcgccattccattgacctgcggggtgctggcggagatgaagaggaaggaggcggaacaactgcaacagcggcaatcttgaagtttctgcgtccctattcaattttcacgggagctatcggttgccgcttcactttatcgaggggagctgcatggtactcgatgcgcccgaagtctatctgtctcaaatcaatgcttctgattgtactgttgtacatggtgcgatagtagatgataccgtttgtcatatctgtggccgatgtccattgggtggcacttggaatattggcaggaacctggccgaggggaaactcgatgcctacgggtatatcaaagttattcagtatctgaaaacattggagaacggtttcctgtgcggtattctgtggtggtgtagaagtctggtagaaagcggcacggataaagcgggaagggggagtcacatctcccggaattcccaaaaagccgcttcccgaaccgaaaggggctatagtcacattgcccagcgatttgctttcggcactgcccgggtagaggttcacataattgtttaagttggtcatctgccagtcaaagccgggggagtttgtcaatactcccagtttgttttcatagaaacggggctgtccgtcgatgaactccaataccagttggcggccggtcttgtctgcaatccgccaatgtacggtggaggcgcgtgggtcaatggctatgaccgttacattttcaatagcctcctttatctcgtccacagtagaaaagcttcccaacagccatgataccaattgtaaatcggctatgctcgacgcttttcgtgtggggtcgtactcctcatatttgccatatccgggaaagtagaacagcccggcggagagcccggcttcattcagaccttcggccacgaactccttttgctccactgccaggcctacgtagccatagcgtgaggtgaactccatgccggacagactgcctccgggtgtcagtgattgttgcgaataaccgcgcggtacgatgacgtactggctgttcagctcactgcctccccattcgatggtgcgagctacgacgtgcgcattgtctttggccgtcagggtgataccggtacatgcctctgctgtttgaggggcgaaggtgagggctgtcattgctgccagcaggataggaattctttttgccatattattcagtttatattgttgagtatctgtttgtatactaaacaactctgtatggcaaaatgttcccttaccagaaccggtaccccagcgtgaagaatgcggcgaagttcttggggaaatatcctctttcttccgaatgacctatcatctggtttatctgctcattgacttttaccagtcccacttgtgtctctgcaccgatgatgaatcttctgtattcaaaagtaagtcccagggcaatacctgcatcgaaacggttgttacccattttcccgtctaccatactgccgaaagtgtctatcttgaactggtatcctccctgcatactactgctgctataatcgtaggtctcgccggaggtcttgcctgccacgcctatggccgcataagggccgacgctcagcgaggcatgataatccctgcccagatggaggcgggccgctatcatgagggggatttgcagatacagttcatgcattttggccttgccgatgtggcttatctcgtctttaccgccgatggacacgaattccaatgcggattgcagcacccaggtcttgttgaggacatattctgcaccgacaccagctttgtaagctatttgggtgtcactactggagtgttttccatgaaaatgggaggtaccgattccagcttttgcatgaaaggacagcgggctttgtgccagaccggtcagtacggtcattgccatacagacggtaatgattatcttcttcttcatgagtaaatttttccgttttcggttatgagtaatattgttagttcgccattgggcagtaagggggcacagtgccggtgacagagctcaatcagtgccttgccaaacttttccagcagctcttcgggaatgatgtcccagagttcgcgcgccaggttcatctgtccgatggcggcaagtgtttcttcgctgcatcccgtctggcgtgccaggtcttgaatgaattccttattcatggtcactttcttgctgtgggtatccagattgccttcggccagtttcacggcctttcccatcatcacgccgagggtgacgtgcggtacttgctcttcggctgctattttcaaggtttcgccgataaagttgccgtaatgcacgaaagcctgggtggggaggtcgggataatacgccttgatgaagcgttcgctctttgcaccggagctgatgacgatacgagggctctgggttgcctttgccacttccatggacttccggatggaattgacgaaggcttccgaggagaatggcttcacgatgccggaggtcccgataatggaaatgcctccttcgataccgaggcggggattgaaggtgcgtttggctatttcttctccaccggggatggagatggtaatgagaataggattgggctgtttggcaatatggaggcgttcaagccatagcttgacgttcttctttatcatttcgcgtggggtgtcgttgatggcagagctaccgagctcaagtcccagaccgggcatggtgacgacacctacgccttcgccgccgcagacgatgatgttgtagtcgtcctggggagtgtcttccggcagcgggtcgtctatgcggaaaggtatggctatattggccacaactttcattccgttggtgatgtccgggtcgtcgccggcatccttgatgacggtagcgcttgtctcgaacatgccgtcaccgttttccagaaggtcggagtggggaatatggtgctgaggctctacgggaacctggatggtttctccgttgggaagaactaccggaaattccgtaggacgctttttgaagtagatattgaatacatcccaggtggcggctacggcggcagcggcggcacatgttccggtggtcagtccgctgcgcagggggaagaagtcgggtaaatgtttctcgattatgcggcgcaggccatgctcgccgtttacacagataaacttgtcggatgtcttggggcggcagatggcaaagatgcgtatacccagttgccgggcagcttccaccttttcgcagaatccgcccgatatcccgctttctttgaggaggatggcttcgggatgaagctgtttcatcaggacttgctcgtcttctccgggcgtgtagtagtagaggttcttctcggagaaaccttgttcccgggcgagcttgcgcgagctgtcacggtcgaggatgcggaagtaacagcaggcattctgccacaaaggcttcagcttacctatggtctgtacgccggtcagtgcaagtaagatgaaaatcttttctttctgtatcttctcgatggcatcgtcataatccctgcaccaggtgatgtgttcttcatcgcgtttcgggaagatacgctcgaaacggatgacggggatattcgattccacggagacttgttccagagtctcatgcagctgtgtggcaaaggggtgcgcggcgtctatcagcagctttatgtgatgctgtgcacagaatgtttctatttctattgcatccatcgcgccttgcaggcggatgccattatgcagaagtacgtcctgctcatcccctttggtagaatagtagaaagtttttccggcttcttcaagggtttggatggctatgcgtccttcggtggttccgccaaatattaatatcatgtttgaatgtttatgggtgattaatcgttgatttatttccggtacagatgcttgaactcgtgtgcatagagccgtgacagaccttcacggttgccgatggcttcgcctacgacaatcatggttgtcaaggtgaggttattttccttcactattctggcaaggtctttgagttcccccctgaatatttgttcgtctttccatgtcaagtggtagcagacagctacgggggtagtttccggatattcctgcaacagttcttcctgcacctgctccgcaatgcttgcactgaggaagatgcacatggtactttgtgagcgtgccatgagatgtagcttttcgcgttcgggcatgggcgtacgtccttcgccgcgtgttaggatgatgctttgcactttttccggaatggtgaactgcgacttcaaggcagctgccgccgcctggaaggaggatatgccgggggtgatgtggtagctcatgccgtgctggtcaaagtagttcatctgttcctgaatggcaccatagatacatgggtcacccgtatgcaggcgtacgatgaattttcccttgtcatagaacttcttcatcacttcaaattgttcttccaaatccatggaagcggagctgagtacggtagcaccggccttggcacagagagtcagctccttgggaacgaggctgccggcatacagaatgaggtcggcgcgttccagcatttggcgtccgcgtacggaaaccaggtccgggtcgcccgggccggcacccactatttcgatgtggccctggcgcacagttcttatgtcaagggcggcggccacggtatagttctctcctttcttcttgggcaccagcagccgggagttgtttgcactcagtaaggcggcggcttcgctgacgctgggggtacccatgtgcttcatgacggttttgctgggatggggcacctctatctctgtcagttcctcggctgtatagaagtagaccgggaacttcttttggagcgctttcactaccggttcgtcacttttggctttaatcgtggagatggaggcgatgctttggggcatgatgccgtattccttcagcgtgttcataatctctttctccactttccgcacagggcctgccagccgggcaaggccgatgccgaggtgtacgacacagggcacgtagcatatcataggcatttccgggaagttggggacttggggagatacgcacagaatcagtttgaagcgtgaaggtttaatgtcctgcacccggtagaatacttctacatgaggcggcaggtgcgcctccatccagtccgtaccttcattgcgcaccgtgagcagcagggcggtgggcttgccggaaacgaagaggctgatatgctcgttcatgcatactctttttttctcttcgggcgtcttggcaagttctgccagcaggagggtggagggctcggcgttgatgaccggaaaccacccgaaacgttggggcagggtatcgagtccccatagaccggtgcagtcgctttgcgtggtgactaccggttcggccccgaggatattcgctacctggtgggtcagttcgttggctcctccgatgtgtccggaaagtacggagatggcaaatttaccggtactgtccacgcaaatcacggcagggtcggtatatttgttcttcacgcaaggagcgatggtgcggacacagattcccatggcgccaatgaagacaaaggcatcatagcggttgaagttttccgctgtgaatttgccggcggattctatatgtgtgcatccctcttcgtgcctgagggtgaagatttcggagtcgggaagttcgttgagtagtgattgggctatgctcaaaccggcttcggagattagaataatagctgttttcataatgggtatgtttaagaaagcgtggctttcataatttcaatggggttatattcgttcaaggcgatatgggtggaagggtggagcaccattccgttccgctcgattcctcggcagaacgcctccttgctttctgccgatacggagttgaagacgatgcagccttcggggtgcagcacttgtttcactttctctatcatttcctccagatgtccgccgtgtccaccgatgaagacggcatcggggcgggcaaagggagtgaggtcggtgtgcaggaaatctccggttaccgccgtaatgcccggtgcgccgaagcggcgggagttggtgtccatcagctcttttccttcggggcgtatctcgaaggagatgacggcgagatgaggaaattgcaggcgggcttcgatggagacggaaccggtacagaaaccgatgtcccagaagacgcggcggcggttcagttccaatgcctgcagggtgagcaggcggatgggagccttggttatcatgcgggcgcgtccgtcaagatgtgcaaactcttcatcggggatgccgaagggacggactggaaagtctggggcttcgctaccgtgcagggagtttgtgcggcattgtccgagatggctgtccagcagcaggcagttgggatgttcgaagtcaccggaaaccgcttcctggggtgtcatccggcgtatgcgttccttttcgggattgccgagatgctcgccgatgtatagtgtgtagtgggagtacccgtattccagcatgcgggcggcaatggtgaccggggtatgttcgcggtcggtgaggatgcctattttgggtgcatgctctatgagggcacggtcgaactcctgccacgggcgtcctgtcagggagacggtgcgcatgtcgtcatacggcatgacgaggcggtgtgccaatgtctgcaaggaattgaaagcgggatagagcagaatgtctgcctcgggaagcttacgctttatggtattggcaaaaccgaagaacaacgggtcaccggacgcgaatacaatgatggagttgtccgtagccgtctcttcgaagcgggtaaatatttcttcataacgggaaaagacgcggtccagcggtacggtgatggaaatccattcggccccggcaggcagcagaggaccgacaatctccttatgccgtatgccaccggagaaaaccttccccttccgtatctgcgccagtgcttccggtggaaagaagggggaacggttgtcatccattcctatgattataaatctgtgtttcattcaatgagtaatcttatgaaaatatcaagtaatgtaagggggcataacaagtaatgttatcggtcgtaacaagtaatgttatggaatgtctcttttcacttacacatccctgcccgggcgcaactgctccgcatcgttgtagcacagcacggagttcaccagcgtggcagctaagttactgcctcccttacgtccttctacgataatcttgggtatttccgtaaagggtttcaccatgtgtttggactcctgcacatgcacgaagcctaccggtgcagcaacaatgcccgccggatgtgccttgcccttacgtatcaggtcgcagagttccataagtgccgtaggtgcattgccgaatacaaagaaagcatcgggatgctcctccacagccaggcggatgcctgcctgggtacgggtgatgcctttctctgcagccatcgtcgccgtgcgcgggtcgccgaggtaacatttcacctctatgcccagccgctgcaaagctcctttgcggataccgctggctgccatcgtgacgtctgtgacaatcgtcttgattccgcctttctcgatggcttgatacaaggaagccacggcaccttcgtccgtatgcagcagatgctccatttcaaaatcggcggtggtatgtatggcatggagtaaagcccatttatggtcgaggggaatatgcttgttcttcagttccttttcgatggtacggaaactacgaatcatgatgtcttgcccgatgcccgtggcttcggtattcgtgtcccggtaatagccgcgcggagtgatgaaggctccgttccattcgtaggactgtgagttgcctatcaatacgactgtaaacatatccacctcttcgggattgaaatctcccagcgtggtgatgtgtaccgcttgttccgggcgtcctgcctggcgtacatatcccacgggcgtttccggtgagcgtccttcctgcagaaagagttctttcaagcggtaaagctgccagtagcgtccttcacttttggggttgtagactgccgtcacgaagtcggcggcagcggctgcgatgatacgcctttcaatacgctcccagggagtcatcaggtctgaaagggagatgacacagaagtcatgtcctacgggagctcccagcagtgaggctgccttttggaaagcgctgatgcccggcagcgaaacgatttccacgtcgctgttcctttcccgcttcatctcgtagacaagcggcgtcataccatagatgcccgcatccccggaactgatgacgcagaccgtctttccctgctctgccagctcgaaagcctgctcggcacgggcgcgctcacgcttcatgccggtatctatgcatgttgttgaggggtggagataaggggttacaaactggaaataatacttatatcccaccactacatctgattcttgcaaagcggaaattacggcgggagttatatccgattcattgcccggtccgatgccggcaacaattattttggggtgtttcatatccatatgttctattggcatacaaagatagaacttatatttgatgaaaccgaaaaaactctgtgttaatccgcgtaatctgtggtgaatccttattgtctaaacctgtaagtgccggtattcgctcggagtatagcctacgttcttcttgaacacgcggttgaagtgctgcgaatactggtatcccagctcataggcaatctggctgaccgtcttcccgcttcctataatcatttctttggccaggtcgatgattttgttctggatatattcctgcgccgtctttccggtttccttcttcaccaaatctccgaaatagttggaggagaggaacactttgtctgcgaagtatttcacggaaggcagtccttcggtctgcggtttgtcgctctggaaatagtcatctatcagtgcttcaaatttcatcaggatgtctttgttggctgccgagcgggtgatgaactggcgttcgtagaaacgcatgcagtagtccaacagtagctcgatgttgcgcgcaatcagacccttgctgtgcttgtcgatggggcgttggatttccatcttaatcttcttcagacagtcgaggaagatttctttctcgtcttcggacaaatgcagtgcctcggtagaggaataggaaaagaaggaatactgctttattccctgtcccagcgaggtgccttttatcaagtcggggtggaacagcaggccggaggcgctgggctgcataccttccagcatgttgacctcggtcacctggcccggggcgaagctggttaccgtgccttcctggtaatcgtaatactgttttccatagcgtatgtctccgcatttggtgtttttgaggaaaagggcgtatacgccatagttcaaggtgaaatgcctgggatatccggtggcttcggacaaatcgactacgctgaccagcggatgcagggtttcgagaccgaacatcttgttgtattggtctacagcattgagcttgattacttcttccataaacgttcctgttagttttgtacaaatgtagagaataatccggaaagttccatattgcaggaggaggaatccgtaatatggttacaaatgtccgtaatctgtgtacattgaaaagagctacaccctttgtccggaatggtgtagccatccggagcaaagggtgtagccttggtatgtaaaaggtgtaacccttttacgcttgctggttatcaatcttttagcatggctttgatgtgttccatatagagctggcggatggctttgttttcgcccagtccctgcatgcgtacattcacttgatagccttgcttttcaagttccgtcttccacacgccggcaatgtcttccttggtatggttgccgcataccaacagcaacggaaccaatgtcacgctcttggggcgtgtctctttcagttgcagcagggttgcgtccagggtaggatatccttcaatggtgctgacgtggaagttcttcagtccatgggctttcatcatgaagtcgagcatggcgtaagtagccgtgctgggtagctggttgccgtgccccacatagacaatgtcttctttcttttccggctgttcggcggtcagtataccgattaccttctcgcagtcttcgacggagtagagcaggggatttcccacttttatctccttgaagaagggacggagcttgtctgcatccctgcggacggaggtcatctcactgccttctatcaaggtggtgctctggacgtagatggtccggtagccttcggcgcgaagtttcagcagtgcatccgtagggctgtctttgtacacaccctccttggcaagtctttttcgtacaatcggcgagatgtatgcttcgcgcactgtaaactgcggaaaggcttcttgtgcctcacgggtcacgacgtcgagcgtcaaggcacgtgtctgggggtccgaactgccataatgggtgatgagcagagccgccttctcctcttgttgtgcggaggagaagaggctgatgccgagtaaatagagagtgatgaaaaaatgtttcataattgttgttgtttctaaatgcgttatggagagattattttagtctgagtgccaggctgattactaccgaacgtcccggagaatacaaggcgaagttcttgttcagcgggcggttgtccttcttgttgaagatattgtctatgccgatgcccggttcgatgataaagttgcggaagccgtcgaaggtatggcgggtattgaagttccagatgccgtagcccggagcattgccgtccgcgtcacccggataatagactttgctttgcagacgaccgttcaagttgaggttcaaggtatagtcgctccagctgtgtgtatagtttccggtgatggtggctgtatggcgtatgctgcgttcgatgttttgccattcgcctccttcgttcagaccgcgtccataggcgtaggtatagtttccggccagggtgaagcccgggaacagattgccgttcaagttcacttcaaagcctttgacggtagctttctcgaaattgaagtagttcttgacacttaggtttttcgtggatgaaaggtcaccgatttcggggaactcttcacgcaactggttctgctctgcttccggtaggtcatcgaatttagtggatttggaagttaccatgttctttacatagttcagatagccggtgacggaagcactgaaacggttggtgcggtattccatgttgatggagtaatagttgctgcgttcggggtcgaggttctcgtcacccaatgagatggtggctcgtgtacccattgtcttcttgaacatgtggtagtagagctcgtcaattcccggagcgcggaatccggcagcataggtggcacgtacattgaagttgcctatgttgtacatggctgccactttgggggtgaagcgtccgcccgtctgttcgtgatggtcgtagcgtacacccacaacaccggtcagatggttccatagcttcacttcatgctggccgtaggctgatgtcgtatagacacttttgtccaaatcggagtcgggacggcggagtacttcacggcgatagtctacaccgaacaccgtagtgctgttggttgtaaaaccgaagatacctttcaactcggcatcatggaatttctgaagcttggtaagcgcatactgtccgggcaggtatccgctgttttctatcaggtatttgtagcgtgatgcgtaattgtttcctgaatagtcgaactggataacgttgcgtttactcagtttgtatttggcgcctgccccccagttgtaaccttcgtaggcagtgttgtacttgcttccgccggtgatgtcttcgcgttctaccggacgttcgagtccgcggttatagtatccgccgttggcatagaaggaaagctggtccgtagcatcataggtaaacttctgcgaaaagttattcgagctgtagcccagggagagcggggcaatcgtttcaatgatgtcttctccatcttctgtcagatggctgttttgccaaccgtcggagtggtcgtatttataggaagtataggaccctatttttccttgggcgatgtccagattcaagccttgggagaattgattctttctcgtatagctgctattgctgctgaaggctaccacatctttaggctcgttggtaatgatattgattacaccgccgatggcatccgaaccataaagggaagaagctgctccgttcagcacctcgatgcgcttgacgcgggtcatgtctatttggttgaggtcgatgttaccggtgatgtctcccgtgaccttgcgtccgtttaccaatatcagcacgtgcttgttggagagtccgttcatcatcagataggaccccatcgcgttcggacggaaggagagcgagggtaccatcatggtcaaggcctgctggaagtcggtgataccggcacgctttatctcgttggcagtgataaccgataccggagacggagtgttcttcagtcgctgatgtgtacccgtacccgttactacgaccgggttcaactcgtgagttttcttggtcatatcgtcgctgtcacctttttctgcttgtgcataggcaccggtggcgatgattcctcccataaggagaactgtgagaagtcttttctttatcatatattgttttattttatataacgctgcaaatgtacataccattatcggagggtgaaatacttaatagttgttatactgcgatggccaaatagctattaataggtactgtattcccttattccggcacatagataatctctccattttcaagctgataggcaactcccactttctttcctcttttaccggaggtcttttggtcttcgctgggagtgtatttcttgatttcctgcccttctttggtaatgatttccatattttcctttccgggattcttcaccatggtgaagtcttctttagaaaacatctccgtcatattgaagcgggagacgagagccaccatcaaggctacggcaaagaccatcgctacgtcaaaaagattggctaccgtacccatggggtcggagtccgaatcgctgtgcagtaatctgtttctcttactcttcatagttttcgtatcgttagtccgttattccttttcggccgtttggcggcttatcactttgtacagatattccaagtcgttcatttcgcgggcataccagcgttgtttcacttgcagggtaatgacgccgacagcagcaatgaccagccctaccactgtagtggcaaaagccacctgcatattgtaggccatggaggagatgtctccttgtgccagccccaccagcgcgggacccatcgggatgagggtacccatcagtcccaacataggacccagcttgatgaaagtacgcgaacgtcccaactccttctcggcttccacttcataattggcaagcaggtgttcgcagtaggcgtcgtcatcccggtgtgcggacaatttggacatgctgcggaggagaggggagttgcctgccgatgggagttgctgcagcagtccgtctatattctctggggtaatgttctccagtgtttcagtgaattgcttctgtaatttcatccgctggtagaactcgccgaagaaacctcccgcaaggataatggcacgtagaaagaatagcagcagcaggactacgacgggaaccagcagcccgtttgaaatccagaacagtgtgtttgagattgtttccatatatctttttagtttttaattctttaatttatttcaatagcccgtggcaatgatgctcaatataacaatgaaaatattaacaatgaacagtacttccaagcgcagtggtttatcaccgatagcatgccgcagcagaaggctcccagcacaaactgcaaggaaagtaacgccggctgctatccatgagagactgccgaaatctattccgggaaaagtgaaaagcagcagtgccaggacatagcatattactccgcctatcagtatgccggggtataacttcaggaagagggtgaccgcttgtttgaaggccgtgttgcgggtacgcatttctgcgaaacagtcgaaacagaaagttatcattacggcggcttccagagtgacacataccgacaagttcaacatctgtggacgggaggcaaagaaagctgccaccacggtcttggactgttccgtcatccatggagtcaccagccacgcaaaaaaggcacagcctgcggcaaccgtccacattccccagcgtggatagaaccccacctttaatagaaaattgagggcgatgaatagggctaacagatgaatggcgtattccataatactctgtttctatttattctttttttcttttcttcaacagtacgaccagtccgatgaaggtgatgacgacaagactgcctgcaatcactccgttcaccctgttcttacgtaccgtttgttcggaagtcagtttgtgttctttcagtacgacatccttgccatcggttgcggatgcttcgtgtacctccttcatgttctgggtataggtctgcttctcgctattatccaactggtcggcaacgaacgactgtagcttgtcattgtcgcaaacgaattcggtacaagcggcacctttttcgcgtgtgatttgtgcatgcagggaagcagtggttttcagttgctcatcagatgctttccagtaacctttgcgggcgctttccagcatgacggctgtcatagcctggaatgcggcgggattgacgcggaggaagtactcgtgaatgcccagcttattctcatcctttatatacattctatacaagtcattgaacagttctttgtccatggccgacggacgcatgacgtgccagccgaagatgttgcggaagatttcgccgaacatctgcgccgaaccttccccgcctttcatccgctcttgtataaaggtagggttcaagatggtggaacgtgtctctacggcaatggcctctttggcatcctgcatgcggcggttggtccggttgcggtagtctgccatataggcatccggttccttgctggtcacggttttgacggtgagcgagagtccacccgtaaattcgtatacatgatccagggagatggggccccatgtgttactttgacggggctggatgacaacatccgtttcggacagtgccgaggcaaacaaaccttcctggacgtctccccaattttcgtcgtccccataagaggcacccatattgttgaggtatccttcggctatctccttttcgctttcccacgagccgctgtgctcggtataggccatcataccggtactgtatccgctgttgaccggtccgaatacacgcatcacagacatttcacgggcacgtttgggggaagttcccttttctaccagtaatttttcctgcaacagtgtacccgatgccacatagttgggataggtctcatctccggcttccgatgtcagacgtatagcatcggtcagtaacttcaagcgggaaccggctatgtcgcgtagctgtccggacacttgtaccagcacattgatgcgcggacgccccagttcttcactgggcaccagtttcaggtcaaccactctgccttgggcgtcgcgtacgggttctactcccagcatccagaatacctgggccagcgtagctccttccgtattgatgaattcgcctgcccagaaggtatagcttactttccggggatattcgccgtgcttgctgatgtactgttttaaagtcgcttctgccaatcgctttccatcttcccaagcccttgggttgggagtattctcggcgttgatgctgtacatgttgcgtccggtgggcagaacgttcgggttcagtacggggtcacctcccggcgcagggaatacggttcctccgctgagtgcacgcaccatggcattctgttcgttgacgggggaggcaagcaactgttcgcgatagagtagggcggggcgaagctccggtgctacagatgcagtatccttgggtggattctggagtaaggcggtcagccttttcctggcggcaggcaagtagtggtgggctatataggtgaagtcttgcaactgctctgtggtgattttgcctttatcgcggtccttgcgggccgtttcgtatgccagcgggtcggcagcgacggcgagagtggtagtcagcaggtcgcggtcagaataaggctcgttcatggtgtagtacgcacccagtatcttttcgttggctatctcttcggtgaaggcatccagacgttccaactccttggttgtgtaggggtcactggagatggagtcgaggttgaggtcgcgatgcagtcccagacgcatggcttcttttttgatacttattcctagggttcggtgtttttcggtaccttcgtccagcactttgtgaatatcttcgagcaaggccgaatagcgttggcgcataccgctctccacgtagggcggagtgagatgggtgaccagtacggcatgtgtccggcgtttggcaatgataccctcgcctacgtttccggtggtatagaaatagaagtgggggaggttaccaatcagtacatccgaccagtcggcctgcgactgtgccacattctttccgggcgtgtattccaagttgccgtgggtgccgaagtgaatcactgcatctgccttgaatcctttttgcatatacagataaggagccaggtagctgtggggcggcgctaccggcattccatgcaccagtttgaactcatcatctcccaatgccgggcggggctgggggaagagtaggatattgccgaattgcaagcaggcaatggcaatactgtcctctgttaccagcagattgccgggcgcatctccatatctgtctgttacttcctgatatttctcgggaaggagtacttcgtgtgcccattgttcgtattgctcggtagaaagccatatcgggtgtgccgttttcaaaaactgttcttgtgctcctttggcatacgaacccatgacggcaccgtcacgatgtatccgcttgccgaactcctctacagtagcaggcagtccactgacgtcgtacccttccgaacgcaggcgtttcaagaagttatagagtgaaggaatcacttccataccgcttgccagcagggcgtcttttcccggagtcttgaagtaacagatagcaacgcgcttttctttgttggacatgtctctcaaggacatgtacttggtaatatggtccactacggcatctatccgttcattttcagcggtgtacagatagtatccgtgtttgttttcgttttgggtagcgatgcagaggggtagcatgcctccatctatctcaggcaccactacacgggcggtcagtgtgccaccgctgacgggggtatccgggtccagccattcctcgtggggctgaatcagcgggaagggcatgaataaaggaatgttttcctggtgcagccagttgatgagtgagtcattgcccagccgtcccataggcaggtagactactgcatcgggatggagggtacgtatcatatcggcacgcggttgacctccggctgtgaaaggatagacattgaagcctgcttgtgtcaagcacgtgatgagggaatctacgtgggcacggtttccttccatcggaaagttgagtccggaaatcagggcaaggttgcgtccgtcctcatggtagagatttttttctttcagataggcggtcacctcttgcggagtactgaagtagcggccgtattcgcggtggtagaacatgttctccagcaatgggatgggaggctcgtaatcctggtgtccccaccggtggggagtggcgatgtggcgcaggtagagtaaggcattccggtagttgtgcttgttgccgttcttgagatactcccgtagcgtatgctgttgttcattggtaacattgtgattgagggagagggtgaaatttcgtaacgtattcgtaaagactggtactccgctggcacccacccgttccacttcggcaatctggccgtcgtcaaggtatagccctctgctgtacatcacgatggcatcatagccggaaaggtccttcacctcttctttttttatgcaggtgacttctatccgggcgcagtcattgttcagggcaatgtcggcagcttgtgccagggttgcgttgataataagtatatgtgtaggagcaagccagtactgataggccgcaaagctgcagacaatcaatagggctatgctgccgaggaatattccaagtcttttcttattcatacaagtttattctcgttaatagcgtttttgtcttttacaacattttcttcttatataattcacacttaacgccacacccgtgatgcaaacggctgtacctccaagcagcaatacccaaagcacagtcttgcgcagggtggcattggagttcagaccgggcagacgcatgcggtgcagggctgtatagctccagtatttccagcgggaggaggtgtctacatggcggatgattcccgtttccgggtgaatgtaatagacgctccggtccgggtcgtccaccgttatcttccagacgggaagctggggtcgtccgcgatacatattgctcatgtcgcgatagtaggtctcgaaatgttcgagccgggagatacgtatgccggggatatgttgtgaagaatcacgctgggaggtataaatgctttccacgcctttcaggatttcttcttcggagagttgtaacggacgcggcaggctgtcggcggcatcgatgtaatactcgttttttctatcttttacgatgtagtagggatgttcgcggaagttgcgccactctatctgcaaagcttggggataggcagctatgacacggcggtagtccaaggggtaatcctccggttgtggggcacgggcatggagcgtgcgtgtggcgctgcctttcttcagtgccggtttatgaatccattcgggaatgtctgccagagacatcatgccgctgaaggtgaaggtcagtacgaagatgccgaaaaagattccgctgacgtagtgccagtgataccatctttttcggtagggggagaacttgggatggcggcttcggtgcgtcttacgccatacatccacagttacccaaatgccggcaatgaccatgagacaacccagagctgtgagccagatgacggtcttagtccaaaggacggtgtcctgccgcagccaggtgaagtatacccagtggggaatggcacccagccatgcccagaagcgttcgcttctgttggagaactgcaaggcctcaccgttttgtgaactcagatagagctgtgtcccggcatcgtcggcaaagtatattttataaatgggcatttcctttttcagttcagcgaagggaatccattggtccagagagtggagggtgtcgatacgggtaatgggagaagaacaccacaaagctgctgtccggtgcaggtgttcactgtccagagagggtcgtgagatggtggaatcggcaaggaaatgaagcgtgccttttgtggtactaaagctgaactcggggtgtccggcattgaggttcagtatcgtagacctgacctttacgccacggggcaggcgggctgtgacggaggagatgtccggaagtgagtctccggtttgggagagcatatccagcttttgcattttctctttggcgctgacacggggaaagcggtggtacatcatcacgaaggcggagaggaaccacatgagaaataggatacagagcaaagtgcccagtatcctatgaatagagtacatcagtttggtgataacattcattgtcgttcgcgtttttcctgcaaaagtacaagatgattcaagaacactaaatacccactaatgggtatattattctgtgtcttttccggcagcataggccgccttcttcgtcatgatgtccagcatgcggtgcttcagtccgaaacggatatggtcaatgaatatttcttgaatttccggaatttgtcccagtccttccagttgtgcactgacggtgaagccttctttctcgagcatctccttccactctccggcaatgtcgtttttggcatggtctccggcaacaaacatgaagggtatgagggtcacacgtttggctttcccggctttcagttgtgccagcatggtgtcaaaggttggataaccttcgatggtgcccacatggaaattggtcagtccgcctgctttcagcatatagtccatctgactgtagatggcggtactgggggtataggtgccgtggcccacaaggacgaagtgttctttggtagctttcttgctttgtgccggggcgttgtagcggttccccagaatacttgccactttctctgcatcttcgatagagtagagcaggggagtacctacacgtatttccttgaagaagggtagtgcgctttccacatcccggcggagggattccatttctactccgtcaatgatgttggtactctgtacgatgaggtgtgtgtaaccttcgctgcgcagtttcagcatggcatccagtggagtcagcttcgtgatgccgcgctctttcaagcggcggatgatgatgcgcgacgtataggcttcttggaacttcaactccgggaaggcggcttgtgccttggcgttgatggcatcaatggtaagggcacgggtatcgtcatgcgtagtgccgaagtgcaccatgagcagggcggccttgtcaccgggtttcatacttgcaagcatatcgctgtgctcgtaattgcctcccccgtgcgcatggcagaggaggaggaaattacaaaggaataaaaagacaaacaaattcttcataaatactgatgcttgttttaatcgttctctatgacacgtatcatatcgaagtagaagcgtccgtccacttcggctcctttctctacattaccggtcttgatgtcatagatgtagataacggcgttggcatcttcttcagtgtttacaccaatgtatgctttgttgttgaagatgacagaacgctgtgagaagcgaccgccgctgtaaccgatttccttgccatcatagcttaagcgtgtcttggttccggtggtaagatcgaggatggcgtagtagtgagagtaagcgtcgatgccgggttgcttatctgcagcgggtctatcggcattgtcattacgtgcatacactaaggctttgttcccttccagatattgaatggtcagcaatttgccgtcggcattgggatagccgttgtaggaagcgtcgaattctgtttcgcctttgttgatacgtagcaggatgcctttgaaaaaagcgttatcttcttcgtggaaacaagctaggtagagattgtctgcttcgtcgtacattacgcagttttgcatcagttctccgtaagcgcttcctgccatttcgcattcgatgggagagagtacatctttttctacttccatggtagaggggttgataatggctgtatggaagttaggctcttgctggtctatattcgtcaaaccgtctgtctctttccaatagtagaagtagtacaatctgttgtctgatttgcggtaggtgaggataccggagcttgtcagtttgagccagttggtgggggctggtatgttgagttcaccttcagcaaggatagtcaagtcctctgcgttcagtttcgtataaagaatcttgtccttcttaccattggtagacatgatgacgagtgtgttgtcatcaatccaggcatgtgtgtaggaacgtaccttatagctgttggccttgaaaggacgttctgcaataacctgaactgcattgttcttgatttgatattttacgaaacggtcgttggttgcgggtatttggtagtaatattttccttttgagatagtctccatggagtaatctcccagttccgaaccttctcttttcacagtgatgacaccctgctctgcggccaatgagttgacgctatggacgatagtggtattcttgctactcatcccgccgtgcttgtctacggttacaaataggtcgaagtgatagttatcctcattgacttccgggtccggattaggattaggttccgggtcatcatcggaacacgctgtgaatgacagtgccatcatggcagccataaaggcaatcagtgtaaatttgaattttctcattttgaatgaattattaaatgattagttaatgaatagtctgaatttagcaaaaaaagcacgtccgggcttctgcagcttgtagttgtcataggctgtcttgtcgaggaagttggtacactccaaagccagattatagcgtccgcgtctccatgagtaagtgatgtcggcattacagatgtgctgggcgggaatgcgtgccttgttgtcatacgagccgtaagcttcccaggtcaaaaagtaccagtgcacccactgataggtacaacccaggcgcagtctgctttcgggcagggcgatgttgcggaaggtatagtatgcttctacactgccaaagagccagggacggttgggcacacggttgttgtaggtggcggagggttttccgtcgcccttgtacttctgctggtcgcgggtgtcttggtaactgacgttggtggagagctgcagtctgccttgccagtcgtagcgtatttccccttccacacctttcacgtggacggcagggacgttggtatattgcatcgtgccttctttctcggcaatgctggtctgaatgtagttgtttaccttgcggaaaaatccgctcatctcgtaatagaatgtatgtccattgcccgggtgccatgtgccgaatagagaagcattgaagttgttactgttttccggtttcagtgccacgttggcatagatggtggtaccgtttcccaacagctcgcgggcaatgggtagtctcacactatgttcgtaggatactttgatggataaaggttctacgatggtgtatcgaagtccagcaccgtagcccaagtagttcttggtggtggaaccttgcacatccttcgagccggtcacgctggattggtcggtctgccggatattgggatggttgatgtagtcttttatgaagaatacgttttccatcttgccatccaacagagactggttgtaggagagtcccaggatatgtttggtaaccacatcttttgacggctcgaagctggtatcaaggtcatcgaagcggtcgtttccggtacggctcaaatggtagttcagattaaagctgtgatgggtattcagctgatagtccaggttggtgcgcataatggtgagcggacgcttgtagtggcgcatggatggttctttgcccataatctcgttgcgctggctcacgatgtatcctccatcccaatagtacttccgataggcagtgtccacggtcaaggaatggtcccaggtgtgggagagggaggcattcagttgcatgttcttcaggatgaagttgtacttctgatagcgggcagagatgttccaggaatcggaattcctttctgccattccgtatactttgttttggacagaccccgtctgcagttccttgtctgtttttgaataggaggcggaaacaaagaaggcatcagcccaggatttgttgacaaatccggcttccacctgtgccagtagcgagaagtagccgtcatgaaaacgcttgggattgccatatatgaaattgtctccgctttcgtcgcgcatctgcacattcttcattctataatcgtttttggagtagttgatgccaacggttggccggactattagtccggttcccttttctacgaactgggtgttcaggtccgtcttgtgtgtatggaaggagccgatgccgtaagatacatccagataattcttcttctcctgctttgtaatgatattgatggcaccgcccagtgcatctgttcccaagctggcagggactactcctttgtatatctcaatccggtctatgatgttaatgggtaagttggcgagggaaacaccgcttcctttggtgtccagtggcattccgtccagaaagtagcggattgaatttccggacaagccgttgatggagaggtcgaagtccgagccaaccccgccttcctctctcaccttgatgcccgttgtacggttcaccaggtcgttgaggttatttagtgagtttactatcggcttgatgtcgagtgcattgacagcaaaggccccttccttcactttctgcgtttgggtctttccgtatacttcgacagaattcaatgccacggcgctttcctgcaatgtgaaattctgttttttatcctgccggatgtcgagggattgtttcacggtttggtagcccaggaaggagacgacgaaggtgtgtttgcccggagcgacttgcagtgaatacttcccccggtcgtccgtataggtgccggaggtggtgttttccacagcgatggtggcttgggctatcggtgtcccgtgctggtctatgacttttccggataaggtgaccttattctgtgccatactacctgcaggcagtaggcagataaatgtaaatagcagtcctgtgatgaatctcatttcagttccttataagcgttcgtaacttgccctcaaggaaaaatgaacaaagagaaagattcctttatatggataaagaatgcctcgactcaatgttttgttgctttattccccgaaagcactaaaactatgttgtcttggcaggtcttctgacttatccctctttgaatgccttcccatccgccgggcggacagtggcttgtagaatattcaaagattttggaaggacttacagcagcgggtctgttcaggatttgcacctgattccctttttcatcactcatctccaacagaaccgggagaggtgaaaccaaaactgggacaaagataacaaaaactattaggtttgcgaatactcctgataatttttgttatctttgcccgcgaattggttccggatgcatgtttccatcatctggattaaaagggaatcgggtgtaaatcccggacagtcccgctgctgtgaagctccgtttatatcatgaaaaacacccttgccactgatatgcattgaaatatcgggaaggcttcaggattaggagtcagtcagaagacctgccattcattaaaggctgcctttgctcgtgggttaggaagacagtacgaagatattagttgaacatttaaacaagaaatggaatgcctttgttaaaggtatgtccgcattgtggtgtgactatatatatcctttatatattaaagaaaaagtaaaatgattaagaaagtattgattgccaacagaggtgagattgccttgcgcgtcatgcgttcgtgccgggagatgggactgcttacggttgcggtcttctccgaggccgaccgcacctctcatcatgtggcatatgccgatgaggcttatccgataggaccggccgtggcaaaagagagttatctgaatattgaaaaagtgattgccacggcaaagcgatgcggtgccgatgccatccatccgggttacggctttttgtcggagaactcggagtttgcacgccgttgcaaggaggaagggattatctttatcggtcccgccgccgagacgatggaggcgatgggcgacaagatagctgcccgcaagcgaatgattgcggcaggcgtacccgtggttcccggaacggaacaacctttgcagagtgccgaagaagccgtgcgcatctgcaacgagataggttatcccgtgatgctgaaggcgtctatgggtggcggtggtaaaggtatgcgccttatccataacgagagcgaagtggtggaagcctacaacacggcacgctccgagtccatgtcctcctttggagacgacacggtctatctggaaaagttcgtggaagaaccccaccacatcgagttccagatattgggcgacaaccacggcaacgtcatccacctcttcgaccgcgaatgctccgtgcagcgtcgcaatcagaaggtggtagaagaaagcccgtcacccttccttacgccggaattgcgccgggagatgggagagaaggcggttgccgcagccaaggcagtaaactactccggtgcaggtaccatcgagtttctggtagacaagaaccgtcggttctacttcctcgaaatgaatacgcgcttgcaagtagagcaccccatcacggaagaagtggtaggcgtggacctggtgaaagagcaaatccgcattgctaacgacgaggtgctgcacctcaagcaggaggaactgttccagcgcggccatgctatagagtgccgcatctgtgccgaagatacggaaaacaacttcatgccgtctcccggtgtcatcaagcaactgacggagccgaacggaatcggtgtgcgtatagacagctatgtgtacgacggctatgagattcccatctactacgaccctatgataggtaagctcatcgtatgggcaaccacccgccagtatgccatcgagcgtatgcgccgtgtgctctacgagtacaaaattacgggcgtaaagaccaaccttgcctatctgaagcgcatcatgcacgtgcccgactttgtgaagggagagtacaacaccctctttatcgagaagaacgcccgcatgctggtacgcaccaacactgccaacgaagagttggagaacatagccatgatagctgcctatatggactatctggttaatctggaggagaatgtttcggcacagctacccgatgcccgccccatcagccgttggagggaatttggcttgcagaagggagtgctcaggatttaaggaatggataattgataatggataattgataatggataattaataatggaaatacatataggagaccgtatcgcagacattaccctggtgggtaaggaagggaataaggtacaacttaccattgacggaaagccctacgaagtggacattgtgatggcagagaacggaagttgctccatcctgcacaacggaaactcgttcaacgcaggccttgtgcgcggcgagggcggcaagagttatgacatcagcatgctccagcgttcctttcatgtggacatcgtggacacgcaagccaagtatctgcacatgaagaaaggagccgacgagaagcagggcgacaagattctggcgccgatgccgggcaaggtagtgagcatccccgtcaaggtgggcgaccgactggctgccggagacattgccgtggtgctggaagccatgaagatgcagagtaactataaggtaaatgccgactgcatcgtccgcaacatcctcgtgggcgagggcgaaccggtaaatgccaaccaagtattgattgaattggagttgataaaggaggaataatcccgagtcgcattcagtccgtatattataaatcactaaattgtaaatgcaaatatgaacagagaagaaatataccgccagtttgaggaactggataaacgtgcctcgctgggtgggggcgtagacaagatagagaaacaacacgcctccggccgcatgactgcccgcgaacgtattgacatgctgctggacaaaggctcgttcaatgagctggacaagttcgtgaaccaccgttgcaccaacttcggcatggagaagaaacagattgccggagacggcatggtgtccggttacggaaagatagacggccgccttgtatttgtctatgcctacgacttcacggcgcatggcggttcgctcagcgagacgaatgccgcaaagattgtaaaggtgcagcagcttgccctgaagaacggtgctcccgtcattgccctcaacgattcgggcggcgcacgcatccaggaaggtgtgaacagcttggcaggctatgcctccatcttctatcagaacaccattgcgtcgggtgtcattccgcagatatccgctattctgggtccgtgtgccggtggggcatgctactctccggcgcttaccgactttatcttcatggtaaaggagcagagccacatgtttatcaccggtccggacgtggtaaagaccgtgacccacgaggaggtggacaaggaggaactgggcggtgcctatacgcatagcagcaagagcggcgttacccacttcatgtgcaatacggaggaggagacactgatgagcatccgcgagctgctgagcttcctgccgtccaacaatatggaggatgctcccttcactccctgctccgacgatatccatcgccgggtagaggcgcttcagaccgtcattcctgaggacccgaacatgccctatgacatcaaggatattatagaaccggtgctggacaaccagtacttcttcgaagtgatgcctcactttgccaagaacgtcgttatcggtttcggtcgtctgaacgggcgttcggtaggtatcgtggcaaaccaacctgcctatttggcgggtgtgctcgatattgatgccagcgacaaggcggcacgtttcattcgtttctgcgactgcttcaacatcccgctgataaccttcgaagatgttcccggcttcttgcccggaacgatgcaggagcacaacggcatcatccgccacggcgccaagattgtctatgcctatgccgaggccaccgtgcccaagataacgctgattacccgcaaggcatacggcggcgcctacatcgtgatgtccagcaaaccgacgggtgccgacgtgaacctggcttatccgcaggcggaaatcgccgtgatgggtgccgagggtgcagtgaacatcctctaccgcaagtcctctgccgaagagaagcaggagattatcaaggagtatgaagacaagttctccaacccttaccgcgccgccgagcgtggcctcatagatgaggtcatcatgccgcgtgacacccgctacaagctggtgcaggcattggagatggcgcacaacaagaatcagagcaatccaccgaaaaagcacggcaacatgcctttataatagtagttattttttatgtgtgaaatgcgtatccccggagaagtgatttctgtggggatacactttttaaatagagaattaagaattaaacaataaggctgaaaagtaaaaactaaagatagaaactatggaactattaagaaacctctttgagggttatcccaacctttggggcggaggagtggcacactctgtcctaattctgtccctggtcatcaccttcggtatcatgctgggcaagttgaaggtggcaggcatctcgctgggtgtcacctggattttgtttgtgggcattgtcttcggacatttcgacatgaacctcgacgaacatctgctgcacttcctgaaggagttcggcttgatactgtttgtctattccatcggtctgcaagtgggaccgggattcttctccgctttcaagaagggcggacttacgctgaacatggtagcaatgctttccgtctttctcagcgtgcttatcaccattgtgttgcactttgccaccggaatccccattactacgatggtgggtatcttgtccggagccgtgaccaatacccccggtctgggtgctgcccagcaggcaaacagtgacctcaacggggtggatgctccggaaatcgcactcggatatgccgttgcctatccgctgggggtggtgggctgcatcctggcgctgctagccttgaagattttcatgcggattaacacccaaaaagaagaggaggatgccgagcacgggctgggtcatctgcaggagctgaccgtgcgtcccatatcggtagagatacgcaatgaggcaatagacggcaagcggatcagagatgtgaaaccattgttgaaccgtgcgtttgtcatctcccgcatccggcacaccggcagtcaggaaacagaactggcgaatgccgatacggtgctgcacatgcaggatgaaattctgttcattgccaacccgaaagatgtggaggccattgttgccttcttcggaagaaaaatttcggtggagtgggaacgggaggacaagaacttgatttcacgccgcatcctcatcaccaagccggaactgaacggcaagtctctgtctcagctcaagatacgtaacaacttcggtgcctgcatcacccgtatcaaccgttcgggcgtggatctggtggcaactccccacttgcagttgcagatgggagaccgtgtgacgattgtaggcagtgagcttgccgtgagtcatgcggagaaggtgctgggtaactcgctgaagcgtctcaaccatcccaacttgattcctatcttcctgggtattgccctgggatgtatcttgggcagtctgccgttcatgttccccggcattccccaacccgtgaaactgggactggccggtggaccgttggtggtttccatcctcatcagccgtttcgggcctcaatataagctgataacctacacgacgatgagtgccaatctgatgatacgcgaaatcggtatcgccttgttcctggcctgcgtggggttgggtgcaggaaagggattcatcgataccattatctacgaaggcggctatgtgtggattggctatggggccatcatcacggtcgttccgttgctggtgacaggattcatggggcgctatttctggaagctgaactactatacgctgataggtgtgctgtccggagctaacaccaatccacctgcattggcctattcctcggacttgacatcctgcgatgcccctgcggtgggatacgccacagtctatccgctggctatgttcctgcgggtgctgacggctcagttgctgatactggcactggcatagtttcaccatagataatctatggtacataggttgatttgataacaagtaatgtaaagagagctaacaagtaatgttaggctgctttacattacttgttatttttgtttgtagtattcctccgcttgtgccagtgtctccggtttgccgatgtcgaaccagcggaatccttgcagcggatagccttgtatatgcacctttgtgcaggcggacaagtagaaaggaatgatggagaacttgccgtcccactgcccatcgtccatcaggtggaagagggagggggagatgatgtggatacctccgaaggcgagttcccggtacttcgtttcccggtagtcgaagcctgccggtttcacctctccggtggacttgtttatccagccgtgcaggtggtagtcgtcgtcaaaaaggagatagcgggtagtcttgcgctcgctcacaagcagggtagattccgcatcactttccagatggtgccggtagaggcctgcaaggtcaatgtccgtcagaatatccgcgttgtgcaccaggaaaggttcttgtccgtccagaaaggggcgtgcctttttgatgcctcctccggtgtcgagcagcatgccgcgttcgtcgctgatgtgaatctccgtgccgaagttgtcgtgggcacggaggaagtcgataatctgctccccgaagtggtggatattgaccgttatctcgttgaatcctgcttccttcaaccgcagtatcacccgttccagcatgggttttcctgctacgggaacgagggccttgggcatgtggtccgtcaaggggcgcaaccgggtgcccaggccggcggcgaaaatcatggctttcatattggcatattctcacattagcacattaaactttggccttaaacgtctgttcaatattctgttctctatgtatcaggttcacttgtacgccgaacttcttgtgcagatgttccgccaagtgttgtgccgagtacacggagcggtgctgtccgccggtgcagccgaagcagacagacagattggtgaagccgcgttccatgtagcgcttcacggaagcgtcgacaagggcgtaggcatgctccaggaatacggctatctcgccgtcgtcttccaggaagcggataacgggttcgtccagtcccgtgaagggtttgtaacgctcgtacttgccggggttgttcacagcgcggcagtcaaagacgaaacctcctccgttgcccgtggaatcttcggggataccttttttgtaggcaaagctggtgactttcaccacgaggcgacgcttttgcaggtcgtctgtaaactgtttcagctcggtgagttcgcgcagaatccggcagaggtagggatattcgggataaggctcttggagcagctggcgcaggttctcgatggcgaaggggacactttgtatgaagtggggcttcttctcgaagtaaccgcggaaaccataggcacccagcacctgcatggtgcggaacaatacgaagtggcgaagctgggcatagaaataagcctcgtccacgggctggtacttgcgcagggcgtcgatgtattccttcagcaactcttggcgcaggctgtcgggatagtttgctttggcttgccacaagaaggaggctacgtcgtagtaaaccggacctttgcgtccgccctggaagtcgatgagccacggctcgccgtcctttatcataacgttacggctctggaagtcgcggtacatgaaggtggcggagctgctacggagcaacacgtctgccatcttctggaagtcgtcctccagccggtcttcctgaaagtccatccccgtagccttgaggaagcagtatttaaagtagttcaggtcccacagaatgctgcggctattgaactctgcctgcgggtagcagtaggagaagtccatgccgtcggctccggcaaactgtacggcgggcagcagacggatggtcttgcgcagcaactgtttctcttcctcaccgaatacgctggtcttgcggcctttctcgatggcattgaataggagcgagtcgcccaggtcttcttgcagataatagatatcatcttcggagcggatgaacacttgcggtacgggcagtcctttctggcggaaatgttctgccatgtagaggaaggcgcggttctcctccacagactctccgctgacgccgataagtgtaggacttccgatgaggcggaagtaacggcggttggagccggaggaggggagttcgtcaatctgttccggttcgtgtccggtatgtgcgatgtagagtttcttaagttcttcggttatcatggtggtatgttttattttcgcagctaagataaaacttttgtcggagatatgcttacctttgcaggaggaaaatatttaatttgatagcttcataatggattccattcctcagtttctcatagccgcccctacatcgggcagtggaaagaccaccgtcagtcgtggactgatggcattgtttgtgaagaaaggtctgaaggtgcagcctttcaagtgcggtcccgattatatagatactaagtatcacgaggcggtatgcggccgtccttccatcaatctggatactttcatggcatctccggagcatgtccgcagtctgtatgcacgctattcggcagatgctgatgttgccgtggtcgaggggatgatggggatgtacgacggatacgaccgcgaccggggctcgtcggcagaagtggcacggctcttgggtattcctgtggtgctggtggtcgatgccaagtcggctgcctattccatggctcctttgttgtcggggttcatcaatttccgtccggatatacgtattgcgggagttatcttcaatcgtgtcggctcaccccaccactaccggatgctgcaggaggtctgtgaagacttgaacgtgacttgtctgggttatctgcccaaacggaaggaactggagcaggagtcacgccatctggggctggatttcagccgttctaaggagacggaggggctggacatgctggcaggcttgctggaggaacatgtggactgggaactgctgctctcgacaatcgggcttccattgcctgcggcggctgtggaggagaagtcggtactatcagagccggggaagctgcatatttcggtagcgcgcaacgaagagtccttttccttcctctatgcggagcatctggatattctgcgccgtatgggcacggtcactttcttcaatccggagcaggaccggcctattccgcaagagacggatttgctctatctgcccggcggctatcccgagaaccgtctggaggaacttgccggggcaaggcttgccagggagtctatccgcagctatatagaggctggtggcaggacgctggcagaatgcggggggatgatatatctttcgcagtccgttctttctgatggggatacggacgggggaggcagtgatacagacggaagaagcaccgggaacagtgtaagcaatgtcggaaatgagatggtgggagtattacctttcagcatcacgaacgagcgtaaacgcaggaaactgacattgggataccgtcggttcgactataacggatggcggcttaaaggacacgaattccattatacgcagcttgctgtgcccgaagctggtggaaaagaaagtggtgcgtacagtcttactccctcgatagtgcaggttttcaatgccagaggagagaaggtcgctactcccatttttcgttataagaacctgattgccagctatacacatctgtattggggcgagatggatgtgatgtctttgttcggtggagcctaatcttgtaaaacatcttttgaatctgctggactttccttctttttcctttcatgttttgcttgaaaagtcccggtatttctgcatatttatattccaaatttgtttgtatctttgcgatagagaaaaggtctacgggctgtgagggagtcccctttacaatccgggctatagtagctgattttgaagagttatcccatgcaggaaagtcctctacacgtacctctgtaaaggatgaacatcttaaaatggagtttgtcgatggtgattcgattggtgtttttgccataaaggacggtgctataatggatgatattgataatgccaaattggtttacaataggtcaagcggcagttggaatccggtgggaaatggtacactttattggtatgatggagtgagttatgtcgcatactatccatataggaggaatatcacaatagatgtctcaaagggtatggacggagctattgcctcactgaccgggaatgaaaaactgcaaccttcgaaagaccagtccacaacagaaaagcatattgtcagcgacttgttgattgccaccggcgtacctgctattgacaattcttccggaataatcttgagcttgcagtttcaacaccagtttgcattgcttgtgttgcaaccgcaagtatacgtaggttgttttgctcctgaaaaggcaggctttgtttaccatatggaatcgagggttttaggaacagactcggtagctattaatgtgagtctgaatggtattactccatatcagatagattctttgaaatattgtgccattgttccgccacaagcaaatgcacgggttaccggaaactatacgactaccaatggaagagatgatacgaatataaagataaattattcgggcagctccatcactcttgtttctggaaaatgctatactctgaaagttatcagtcccgtacccggtaaaggaagtatagaaagaaagctttatcccggggattttatctttcagaacgaaatcgatagaagaatagaggtacatccaggaaatggaatgttggaagaagatgggaaaatctatgattataaaaatgctatcggaatggtaattacttgcgatccgaaaaggatgacagacaagaagtgcaatgaaaagggatggaatcatgcctatgtgatgatgttggatagtttgaaagaagggaattggggaccggtggatttaatcgaagtgggtattgacacaatatcaatagctgatgtaaagtcaaagcatgattttagtagaatcaagaataacatgaatggctactctgaaactttacagatgctggcaaatcatgagggtgatgcatcttttgtaagcgactgtcgtgctttttatctggtgaaaacttacaataacagcaataaggtaccggatgggattgaacgcagtccgtggtttctgccaagtatagggcaatggtttgatatgttggtgaatatttgtggaagatctccggaaaacttccaacacaataccggtaatggtttacaagatgaaaagtggggacaggaaacgttagataaattagaaggacagttatccaaagttggtaaatcgttaccgcagtttaacgtgaactacagacttggtttcagttgcagttctcaatatgataaagatagaagctggatgcttctctggcatattgatgatcccttatataagtgggaaagggtttgcttacaaggatataataagacttctgcatggcatgtccggccgttttttgcattttaatcattccttgattaaaaatagtcctaatctaagtttgaattcattatgaaaaagtccggatagcgcattgatattttatgtaatttcgtttgtgttctcgaaatagtggagtatctttgttttcatttaaatatattatgattatgaaactgaatacttatcgcttgtcttctttggaagaccctactgatgaacaactgcatgctttgatggaacaagtggctgttgcggcccgtgaaagttctcgcaaggcaaaaagagaattggagcggagaatgcaagaggtgagagaaaaattgaaagcatatagagctaaaaatgtaagtgatatatccatgtgatgaacgaaaaaaatccgacactttgtatagtagctggtccgaatggttcgggtaaaacttctacgacagtgcaactgcttcataatgaatgggcagaaaatagcctttacattaatcctgataatatagcgcaagaacaatatggtgattggaattctcccgttgcagtattgaaggcagcagaattggcgactaaaatgcgttatgagtgtttaaggaaaaggcaagattttgtatttgaaacagtcttttcctcagacgaaaaacttgcatttgttgaagaagcaaaaaaagcaggattttttattcgcattttttttgtctgtacaaataatcctgagataaatgtacggcgtattacacagcgctatttgaatggagggcatgaagttcccatttccaaaattatttcccgttattataaatcgttattgaatataggcaaagcaatatccttggttgatagggtatatgtctacgataattcaatagaaaatcaaattcctcgattattgttccgcactgtaaacgggaccctcttcaaacaatatgtagaggaaatcccgcagtgggcacagttccttatcaaatagagaatgaaaagagtctataccaaaactggagacaaaggaacaacaggtattcatggtggcatgcgcgtgccgaaagacgatatccgtatcgaggcaaacggatgtcttgatgaattgaatgccgtgattggtatcgtgcgctccatgctggcggcaaaagatgcctggcaggagttgctgcatgctgtccagcgggaactgatggtggtgatgagccatgtggccactccctcgggagtggtgaaccctaatccgctttctgccgcagagctcacgctgcgctgtgagcaggagatggatgccatgaccgtcctgctgacggacaacggctacttccttttgcctggtggcactcccatatcagcccaactgcagtttgcccgtaccgtggcccgccgtgccgaacgccgtttgtggacactccatcgccaagaccccgtgaacgaggatattctgcgcttcatcaaccgcctttcggacttgttcttcgtcatggcccgcatggagatgcagcggcaggactggccggaggagaaatggcaagagtttgcctacaaaaggaaaagacagtaagtacttatcgctaaccgccgggaagctgttttcagcataggggttctatttgctgtccgagccttaaatcatacagacatgcccgtacttccgcttcgctgccgatatgctttcctgcatcgtcggacagcttcacgcattcgcgccattcctggttgacgttcatcttgcattgcgtcagtttcattacgatgttggagggcttgaatccggtatcattcgtcagattggtgccgatgccgaaggagcagcggattttgcccctgcaatgctcctggatgtcgagtgccttgccaaagtcgagcgcattgctgaagacgatggttttagtggtagggtcgatgcccagttcgcggtagcgggcaacaagtttgtcggtgaagtcgaattcatcgccggagtcgcagcgtacaccgtcgaatagctttgcctgcttgcggctcaggttacttaggaagatgccagaggtataggtatcggacagtgcgatgcccaagtcaccgtcgtacacgttcacccagttttccaaggccatgtagttggcgtgtttgtagccgaactgtgcgccgtggaacatgaaccattcatgcggatgcgtccccataggcttcatgccgtatttcatggcgaagtggcagttggaagtcccggtacagtattcggcggcttccttcagacggtctatgactttgtcctgtacctcgaacgagaagcgtctccgggtgccgaactccgaaaaatacagctggtgtcggttggagagtgccaccttttcggacagtttgcagagtatgccgtccatgtcggccacgtttcccaaagaacggttctttatttcggatacgatggaaagcagggggacttcgtaaagggtggccttgtacagatagtccgtgatttcaatgttcaggtgccggtcctcgtccagatggatgcttaccttctccggctggaagcggaaggaggagagccactcccaatagaccctcggcaggaaacggcagtggcgggtcatgtattccagctcttcggcagtaagtacggtctgtgccaggctgtccaccgcctcttgcagttccttcagaaacgtgtccgtataggcggtgtcgtctctgtccttgaagctgaaagtgcccatggcatagggaaacaatttgatgtaggcatacgaggtggtgaatttgtaaaggtctgtatcgagtatggtatgaatcatggcaaaatattctttagttatgatgttcgattttggggatgaagatagtgaaaatttcttatttgaccagcctctatctgttaacaacggcatattcctattaaaccatgttataaatgagaccgtcatggacagaaattttggatatttcggggaagtccgtacatttgcaatgtgtttttcatagtattagatttaaggttaacaaaagattggctgtctgggatagatagcctttttttatgccttcacttttccttttccgtagaggtggcgtgtagtgcagagcgccaaagttccatagaccaatacttgtatccacatcgtcagcatctgcggccatacgtcggccagcgttccacccattgaattcagttttacaaaagcaagtacggcaggacctgccggaaacagatagtgggctgtctgccaataccacggcatcagctccagcggataggacacgcccgaaaggaagatatagcccacagagaagaaggctatcatcagcaacggcgcttcggagtctgtaaaccagcgggagacggccagggcaaggaaactcgtgcccagcaggaagggtatcatcattgtgacgatgtctcctccgctgccgatgtgtgggatgctgaacaggtgcggcaacagtcccagcaggaatagggaaaacaccacgtagagcatgaagtatacgaaggtcctgcctccgacaatccgtaatgtatccttcaatgagtcggcacgcatcagccgtattccttttcttcgggcttccgcttcctcgcccgtcagcatggcaatcaccatcagcatcgtctggaagatgatgacaattaggacggcgggaatcagataggaaccgtagccctctgtatagttgtagagcgccgtgccggacacgctgacgggagcggacgaagccactgccagcagtccttgcggaggtaggaatacggtgccctccatgcggtgggcatcgttcacggcaagcatgacgcgcgcactggattcttgcagtcctttgaagttgaggaaagcgtccgtggcggcatagagcacgaagaccgaagtctcgccccgtgccacacgtgcctcgaagtcggcaggcaggtaaaggatgcctgccacgtcgccctgcttcatccattggcgggcttcgaggatgttgggtgtctggccgtagacggcggtctggggagtggcgtcgagcagtcggatgtattcgcggctgagggcggagtgggagaggtctaccactgcgacgggagccttgcgcaccaggttgggggcgtacatgtagttgtagagcagtccgtagaggaagataccgcctgccagcacgagcaggatggcgggattggtggcgatggcatgccactcgtggcggatgacagaagctgttgacaatgcggtaggtgggcaaggtgatggggaggcggagattgcttcttcccttatctctttttttatccaccatttcagcaatggcagtatcagcagtgctgccaataggaagatgaagagtgtagctaccgactgccagaagtaggcaaaccctgcatcgaagtaaatcatggcttgtgccgcctccgtgaagtgccgcacggggaagaggtaggaggccgcatgcacgggcgcatacatggctgtaacgggaaacgtgactccggacagcgtagcccccaacgaccccaccatggatactacactgatgatataggcaatcttgggaaagacagaatagataaagaccgccaatgcctgggtagcgatgatgaagagcacggtcactgcattcatcagccacagactgccagcgaaggggatatgtagcgggccgaacagtacatagtttgccaggataccgatggacgagaagatgagggtatagggcagcagtttccctgctacggcagtgaggatattgcctcgtgccatctccagccattcgccggcgctgccgaatttcagttcgctgcctatggagtagacggtggtgagcaggatgagtatctggaacagtacgaaaaagaaaggctggctcaggtagatggagtagtccatgtccggattgtagaggggatgggtactggcttctacggggagcagaaaggtctgtatctgttctccgctgactcccagagcttcggcctgcatcacgatgggcgagagcgccacgggggcaagcgtattctcgaacgctgccatcagctcgctgcctaccgaaagaagggcatagtggtaataataggtgagcgttgcgccagttcccgtcaccgccttctgttcgaagcggggcgggatgacgaggtagccgtatatgtccttctgttgcaatgcccggcgggcgtcggcttcgtcggtgaagtgctccgtcacacggaaggtgggggcggcagagatgcgtcgggagatattgcgcgaagtggcagtgttgtccaggtcgacgatacccacgggaatgttctccatctgtccgtttccaaagatggtggccatgaagaacagacagagtaagggtagcacgacgcagacgccgaggtatagacggcgggaggtcatgcggtgccattcgcgacggataaccatgcgaagcgctttcattgcgcagccaaattctttatctttcatttttcattcttcatttttaaaagtacggacatccccggtctcaatccctctacctgctgtgtgggacgtgcgtgtatctcgaacgtctgcatgtcatagctgcccgtctgtttggtggatttccaggtggcgaagctgcccagcggactgatgtaatagatgcggaattcaatgtccttgccgtcgatggcggggacatcggcacggaaagtgcctcccatcttgaactgcggcatcaggtcctcgcgtatgttcagtaccacgtgtgcatcgtccatcacgacaaggctcatgatgggagtgccgggggccaccagctctccgcgtttggggaagatggtggctatctggccgtcttcgggagcagtcaggcgggagtcgacgaggagggaggagacttcatcgacggtgcttcgcgccgcttccaccaggctgcgggccgaggcgcggtcctcgctctgcgctccgtctacggccatctggtattgctcgtaggcggcacgttcggcggcttgggcggctttgtacatggcttccacctcgtcacgccgctgggaggtgacgacactgtccttataaagcgttacaatgcgctggtaagtggtcttggcgagggcaaggtcgctctgcgtcttgttccagagttgccgggcggtggccacaatctggcggcgggtaccggcgtctatcttcttgttctgctcctgggccacctgctccagggcattcacctggcggtatttggcttcgatggtggggctgttgatgacgacaagcgtatcgcctgccttcacccagtcgccctcttgtacgaggaaggagtccacacgtccgggtagctttccgctgatacgtatttccgttgcttccacttgtccttgcaggaccaggggctgccggctcatgagtaacatgccggcaagtgaaatgatgaccgttgcagccaggataatgacgaatgcaatgctgatgcttttattattgattttcataaagggtaggttttaataagttgtctcgaaatatttctcgaaccgttccggcgttccgcagatagccagcaggttcatcagtgccacatcatattcgtagtaggctgccagacgcgccacgcggacggttgccagcatcgtttccgcatctacgacctcggtactggttgccatgccttcggcaaaggatttcttgcggattcgcaccagctcttcgctcagctcgatggtggtattcaaggcgcgtacgttgtcttgtgccttttgcagttgggtgtagagcttgtcgatgcctacgctcaggtcttctttggctttttcttgtcccagggcaagggtctgctgggctatcttcgactggcggatgcgcttctcacgcgccagtccgtcgaacaggttccaggtgaagcccacgcctacgatggtgcgggggacgaggttgctctgtatgccgtgggcatagagggtctgcttgccgaatacggcgatgtccggcaggtagtcgctctggtcgatgcggagctgctggcgggcaatctgtgactgcagttgcagttggttcacggtgtagttctccacccgcatggcttgcaggaactcctctttggcgggcagttggtcgttgatgaaaagctccgaagtaggatggatgctgcatgtgtcttgcaggttgagcagggtgcgcagggcactttgcacgacggaggcctccttccgggcagcctccagtgaacgggcagcttcatccatattcacttgggcaaagagccggcctgccttgtctatcatgccggcagcttccagtttaagggcattctggtaatggcgttgcagactgttgtaagtctcctgccgcacgcgtactacctcttgcgcaagtttcagcccgaagtagctttctgccagcagggtgcgttgcgtggcatcggtctgtccccggttttcgcgggcaatgtctatcatggtgttgcctatcttcgaggcccggatgcgcttgccgccggagaatacgacccattcggcggtcaggccgacggaagtcaggttgcgtggagccagtggaaaggcaagggtatgggagcctatctggtcgagtatgctgctgatgaattggtcgtccggcacgatgttgtgcacaaagtcctttgccgggtcggtgaactgggaaaggggctgttttacctctatcttttcggaaagatgcacgaacgtaccggcaccttgcagggaggggtaccagagggcattcagtttgtcacgttccgcacgggcggcttcaattcccttgtcggctattttcaggctgcggttgccgttttgcatctgccttagggcatcaccgaagctaaggggaagggaggtttgtgcggccactccaccgatggcaagcagtacgcaggcagcagccggaaagaatctccggcataatagattattcataagttcgttcggtttaggggttcttgtttctctaaacaagaggaggtgggaattgttcagtagtcatctttttgaatagaacgttacaaatataacgaatagtttccgaagatatggcttatgaatgggagagatattcggatttgcactatctttgcattcgctaaaatggaatttatggagaaacttcatccgattatgtttgccgggacgggcagtgatgtggggaagagcatcattgctgccgccttctgccgcatcttcaagcaggacggctatcagcccgcaccgttcaaggcacaaaatatggcgctcaattcatttgccactcccgaagggctggagataggccgtgcccaggctgtgcaagcagaagccgccggagtgccttgccacacggacatgaatccgctactgctgaaaccacagtcggaccatacctcgcaggttgttcttaacgggcgtcctatcggcaaccgcaatgcttatgagtatttccgcaaggaaggacgcgacgagctgcgccgggaggtttgtgctgcctacgaccgccttgccgctcgctataatcccgttgtgctggaaggcgcgggaagcatctccgaaatcaatctgcgggataccgaccttgtcaatctgccgatggccctgcatgccggagccgatgtaattcttgtaggcgacattgaccgtggcggtgtgtttgccagtgtctatggttcgctgatgttgcttcgtccccatgagcgggaacgcattaaaggaattcttatcaacaagttccggggggatatacgtctcttcgagtcgggcattacgatgctggaggagctttgcggcattcccgttgtcggggtggtgccttactaccgtgatatctacattgaagaagaagactccgtggcgcttgccgcaaagtctgtccgtgccgagaagggaaaggtgaacatcgccgtcattctgctgcgccacctcagtaactttaccgattttaatgtcctggaacgtgacccgcgcgtacatctcttctatactaacaatgtggatgagctggcaaaggccgacgtcatcctgctgcccggctccaagagcacgcttgatgacctttacgaattgcgccgtaacggtgtggcggctgccatcacccgtgcccaccgtgaaggtgccaccgtgatgggcatctgcggtggctatcaaatgatggggcaggaggtgctcgatcctaagcatgtggaaggagacatcgaacgcctgcccggactgggactgttgcccatcagtacccgcatgtcgggagagaaggtgacccgccaggtgaagttcggtctgtgcaatccccattctccatcttccactctccgttctccattcatgcagggctatgaaatccatatgggagtgaccacccccgtggaaggcgcccccgattctcccctgaatcttttggagaacggctctaccgacggttactacgtggactccacctgcatggggacctatattcatggcattctcgacaatccggaattcatagatttcctgcttgcgccttttgcagacaaactgtccgggaatgccggcgctttcgattaccatacattcaaagaagaacaatacgataggcttgccgagcacgtgcgccgccacgtcaacctgccgcttatctaccaaatattgacaaagaaccatgattgaaggacacggagacgattcctataaatacagccgtcccattacggcaaacttcagctcgaacgtttacaacagggtagacctctctgccttgaaggcgcatctgtgtgcccggattgacggcatcggcaactatcccgaaccggagccttacacgcttgaggcctgccttgcccgccgccaccgtcttcctgccgaggcagtgtgcgtgacgaacggagctaccgaagccatctatcttaccgcacagactttccgcgggacaaacaccgccattgtgcagcccactttcagtgaatatgccgatgcctgccgcatgcacggccatcgggtcacttccctctatcggcttcctgcggagagcgaggggtatcgcttgtcggaagaggtgcgcatgctgtggctgtgcaatcccaacaaccctaccggaacggtcgtggagaaggaatatctggcaacacttatcagtcataatccgcaggtatgtttcgtcatcgaccagtcttacgagtttttcaccttgcgtccgcttttctctgctgccgaggcggcagagtttcccaacgtcttgctgctgcactccatgaccaagcgttatgccgttcccggtctgcgactgggatatgtcaccggcgccccccacctgctgcaccgtctgcgtactaaccgtatgccctggtcggtcaaccagcttgccattgaggcagggctccatctgctggaacatgatgttcccaatccgctggatgtggcgtcttacttgcaagaggctgcccgcctgcgcagtgcgctcgaggcattgggaggactggaggtatgggccaccgaaacccatttcatgctggtgtgcctccgtatgggtagggcttccgctttgaaagactatctggcaggggagcatggcatcctgattcgggacgcctccaacttcgacggactgaatgagcgcttcttccgtatagccgcccagagccgggaggagaatgacaggcttgtaaaagcaataggacaatggcttgaggaggaataaccgatggaagaagatgtgcttatacttttgggtgtcgccttcaacttgaacctgccgcttctcactgcctggctgctcgaccattggctgggcgacccggcgtggctaccccatccggtggtcgctttcggcaaagccatctctttctgtgagcaccggttgaaccggggcgattcgcgtttcctgaaaggtgcgtttgtggcggtgtctcttgtcttgggggtatatgtcattacgcttttgttgctccgcttggcggcactcttttctccgggtatgcttctgacggtgcaaatattgctgatattctattgcttggcgggcactacgctggttcgcgaggtgcgtatggtgttcaaggcggtggaccgttccttggaggaagggaggatgcaagtggcacgtatcgtagggcgtgatacgtctgcactctcggcgcaggaggtgagaaccgcggcattggagactttggcagagaatttgagtgacggggtagttgcccccttgttctggtatctgctgttgggagttccgggcatgcttgcctataagatggtgaacacgctggattccatggtcggctacaagaatgaacgctatcgtcggttcggctgttttgctgcccgtttggatgatgttgccaattatattcccgcccgtctgacagcctttctgatggtactggtttccggtcgcctttccttgtttgcttttgtgggcagatatggcagccagcatgccagtcccaattccggttatccggaagccgcccttgccggtattttgaattgccgtttcgggggtccgcacaactatttcggcgaggaggtatggaaaccttatatcggttctaatgaacggcctctgaagacggaagatatgcgtgtggctgtccgcatcaaccggcgtgtggagtggtggatggtggttgccgtaatagtgacatcgaccttggcttccttttgtttttaaaatgttgttattttaactgattctttgtccgttccaaaaagatataatatctttgcaagaccgcgttgcattaaaaatgtaacttttaaagcagacaaagtcttataaatgaggataaagcaactatatatattccttttctttatttggttcgggagcacaataattgcatcgacaacagataaagcggattcttggactaaagaaaaggaaagtatagtccatgaggtcatctccacttttcacaacagcctcggtttcgactatctgacccgggaggagtgtgactcgctgaatgccgacggccttttgtcccaattggatgaatcccagcgctattacacctatttcgaactggaaaggatacttataaaatcctcccttttccgtggagaaatccgtatggctattgcccagagcgaccagatgtactccaaagcccgcgcgcttgcctaccccttcggcaatgcccttgcgctgaatgccatgggagaggtgtacagctataccggcaggctccgggaagccggtgccgcttatgaggagtccttgagactgctggatgggatggacggggaggatgtgcatatccgtatgctactggtggaactgatagattataacctgcgcatacggaatgtaaacggtgcctcgcgttatcttgtacgtctgaacctctatccggaagaccggctttctccgctggagctggtcatgcgtcacatctccaatgcttcctgccaattattcaagggtgacttgaaagctgccagccattgtctggtacagataggccagcttgaagcgcaactgattccggagatacggcaataccttctgattatagatgcccgttatctggtggccaccggagcgcatgaggcagccttgaccgcctacaatgatttccttcaaaccgaatatgcccggataaaccataacatctacaaggaagctctgctcgaaaaggcggatttactggtgaagatgggaaataaggaagaagcctacggacagtacggcaaggtcttttcgtatatcaagacttcgttcgagaagaactatcccaaggagatagaccggctctgtacccgtttccaggccgaccaactggcctaccagaacgaacgcgaccgcattgtatccatgcgtttctatctggcaggcatcattgtgtccgtactgtttctgatattcctcctggtgctgggctggaagaagatattccgtttgaagcgttcccagatgcggcaggaggcgatgaaggagaaagcggtgcaagccatacaacggaagaatatgtttctttcgaacatgagccatgaggtacgtacgccgctgaatgccattgtcggattctcggcggtactgacggatgaggacgagtcgttcgatgacgaatcgcgccgggaattctccgaaattatcaaggtgaattcctttcagttgctgaaacttatcaatgacattctggatttctcggatttcgagaatgacaatataaccttcaacatccgcacgcatgatgccgtgaagttgtgtaatgaggtcgtggagaccgtgatggcctcgcgcaagctggaggttgaaatacgttttgacacggatttgtccgtcctgatgctggatacggacgatgcgcgcctccgccaagtcttgataaacctgctggtgaatgccgccaagtttacggaacaaggctccatcgtgctggaactgaagatggctgatgccggtacggcacttttctccgtgacggataccggatgcggcattccaccggagaagcagcacttgatttttgaacgctttgaaaagctgaatgattttgtgcagggaagcggactgggcctttccatctgccaactgattgtgaaatatatgaacggcaagctgtgggtggacagtgggtacacccgtggcgcgcgtttctgttttacgcatcctttgaagtataatcccgcattacacggaggaacggcgcaatgaaacgaatactgattctcatccatgttttgttttgcggatatatctgtccgctgctggcagaagacacgggggctgcccggtatcaggacagcatcctgaaggttgccgatgccctgccggccacccttgtccggctgacgtatctccgtgacatggcctacaagcaccagtatgctccctataacatgactttttccacccgtctgtacgaggaggcgcggcggcagaagaacgctttctatgagaatatgggcgcttactatctggcggcatgttatgacaagaaacacgacccggacagtctgtcgtattgggtggatgtgctgaaggattttgtctcccaggtaggcacttacgattattatctggagcagaaggctgccatcagccgcgccctggcttccaagagacagatagagaaagcggtgtatgtggctaaggagacgttggaggaatcaaaactccgccatagcaataacgggatgatagcggcgtataacagcttgggatgtgcctacggagtgtccagccgcccgaatgaggcactggactctttcttggaggcttaccggaatttctctccccagacaaagaccagcctgaaggtggatatactgtcgcgtattgcccaggtatacggcaatggcggtaaagacagcctgaagctgccctatttgcatgaaatggacacgacgttgcaggcagtcatttccaaagaacccgagacacggaagaactggagcaatttcgagattgactgcgaagtgaagtatatcctgcactacatgaaccagaagaactttacagtggcgcacgagcatatcgagaaagtaaagaaactgcttgaaccgcatgtagatcccgtcttttggctgaatgtccagttgatacagcttcaatactatgccaagaccgatgagtatgacaaaagcatcgcattgatagacgaggtgacccctacggtactgaacaactacgtctccacctttgccactttgataaactacaaggcgagtacgcaatatgacaagggggacattgacggggccatcgagacccggcgctacctcatacgcaagcaggattcgctgaacaatgccttctcggccaaccagttgaagcaggtgaaggagatttaccacattgacgagctgttgttggagaagcagaagattcaggacatgaattaccgtataggatttatactcctgggcgtctgtctgctgctgatgctgcttttctatctgtatacgcgctatgtctccggaaagattgctgtcgtagagaagaagacggctgaagccgctttgcaggcagagacggacaacatcgcgaaggaacgtctgaaatcggaaatcagccatgatatacgtactccgctgaatgtggtggtgggctttgccgaattgctgaccgggaaagaggagctggataaggagactaagagggaatacgggcagatgattcagaccaatgcggaaagtctgctgaattatgtcaacagcattctggaattgtcccgcttggagtccggcaagattcagtatgaggacgaggagtgtgacattattcagttgtgcagtgaggtgctggataaaatgaacgaccgtgaggagagcactgtgtctgtcagcctgcagaccgacctcaaggaacagtttgcgaggacggaccggaggtggttcgatacattgcttgtcagcatgctgactccgtcagagaatgacactgcccgttatgaggcgattatccgcatcagacgcgaccggagtaaaccgctcctttatttcgacgtggtcaacaccccgtttgcaaaggtacattttgagaataaaacgagcttgattcgccatgaaatcaatgcccattttattcattattttggaggtatctacaaggtgcaaaccgaagcggaggaaggccctactatttcgttcactattccttgtcgagattgatgcggacgatgccgccgtagggcgtcaatgcgtcgaaggcttcttcggctttgaggattccggcatagagttgcgcgcagattaatacgcctccgtgtgcgaagatggcaacgcgtgtatagggcttcttctttaattcgtccaaaaactggctgacacgccggtattgcatggtaaaagattctccaccggtagctgccacgttcatgtagtcggcataccattcctgcaagcgtgggtcttcattctgctcgaacggcttcatctcccagtcgccaaaattgatttccataatccgtttgtcccgttctgcatcgggatagccgcaataggtggcgaggcgcacgcagcgggttaggggactggtgtagacgtggtcgaacggaaggtatgccttcaggttttctgccgtcacggcggcttccgtttcaaacgtgggtttcaggggaacatcggtctgaccgtagcacatccccggaggaacatctaccgaagtgtgtcgaatgagtattacttccatctttaattttcagttgttaatttataattagaataaggcttcccaagtagaaggacagttcgcatagcaggaaagtggccccgcagcagtcacccgtatatccttgtaggcgccgcttcatcaatcggtagagcaggaagaaggtgagcagggggaagagggtggcaatccacagttttataggcagcagcagtacgaaaggaagcaggccgcaaagaaatccggccagtaactcgtgccagctcatgcggttgtagacggtcttgcttttgctgtcttcctctttccgggcatagggcaggtagttgacaatctgggaggcacagaacttggaccagcagtcaccgctgagcacaaggatgcagagaagtcccagtggcaggtgatgaagttggagcaacagcaggaaatagcatatcaatccgatgacaccgtagcttccgatgtgggagtccttcatgatggctagagtccgttctcgggtggtgccgccgccaaagccgtcgaaaaagtctgccagtccgtcttcgtgcaggcaaccggtgacaagcaggcgtgcgatgagggcaagaatccatgccagtgacaccggcataatctgtccggcaagccacagcactgccgccatcacgcctcccgtcagccagcctacaaacggccaatagggaaccacatgcttgaaacactctgccggtacttccttgattttccagaagggcagtcgggtgagcattatgaatgcagccaagacattgttcatgttaaaagtatttagtgatggaggcatgtgcaaagttatccatttcattgagcatccgcacggccgagtcgacaatgggatatgcacagatggcccctgttccttctcccaaacgcagccccagattcagcagcggacgggcatgcagggcgtcgagcaccagtttgtggcccgactcgtctccgcagtgtccgaagatggcgtaatccgtcacttccgggtagagcctggcggcggcaagcaggcagttggtcatgatgaatccgtcaacaaggataatcatcttcagctcggcagcttgcagcatggcgcctatggccattaccatttccagtccaccaaagtagcggatgatgtcccggggagagccgtcgcctttgtaattctccatagactgtttcagcacttcgtatttgtggcggatgcccgcgctgtcgagtccgctgcctgcgccgacacattgttccagaggaataccggtaaagcaggtcatccacagggaggatgaagaggtgtttccgatacccatttcaccgaagctgaggacattgctgccttcttcatggcattggcgcaccacctcggcaccccgttccaggcacatctccatttcctcttccgtcatggctgcctcgtgcagataactccgggtacttttgcgcactttcatattgatgatgcctttctcgtaggggaggtcgtagtctactcctgcatctactattttcagggtaaagccgtgctgccggcagaggaaattgacgcctgcccctccatgaaggaagttgctgatttgctgccaggtgatttcctttggagacagactgacaccttcttctacaatgccgtggtcggcggcgaagataatgttttgcggatgtttcaaggtgggggataatgtctgttgtatgagtccgatttggagtgccagttcttctaaaatgcccaatgagcctttgggtttggtcaggttgttgattttgtcaatcaatgtgggacggattgactcgtccggacgggtgatatgaaatgttttcatcagtctgttgaattttaattgtttgttgttttatgaatgagtgttttttacggtaagtgggatgccggataccatcagtatcacttcgtcggcacgggcggctacatattggttcatccagccttgcatgtccgtgaactttcgttgcagttcgttctcggaagttcctcccatacctatttcattggttacaaagatgaaggttgcgtcttgtgccgtgaagcggtcgaactctgcctttactgcggcaagtgcccggtcggtatctgaatgcaggtcgaagaaaaagttggtacaccataaggtgatgcagtctatcaggacgatccgtccctccagccggtggcggctgagttctttctgctcttcgatgtttgtccattccggtccccggcgttcctgatgccggattaccctctggcggaattcttcgtcccaaatgcgtgctgtggcaagataaacgggagtgggagagagctcgagtgccagcttttccgcataggtgcttttgccggaacgtgctcctccggtgatgagtatgattcgtttcattggtatttagtctgtattttgaaagaatatctttgttttcccgagcaaaaataagaaatatttgacgaaacgtttgtttttttaggaaggaatttattaactttgccaccgtttttaaggcatgaccttggaaatgtttatgcggcagtagctcagttggtagagcatcagcttcccaagctgagggtcacgagttcgagtctcgcttgccgctctttataaaaggctgaatacttagttattcagtctttttcttttttaagaacattcattctcaggtattaataattcttctaaactattttttaagctgcacttatattgtttttcccctttttctgtttttcttattgtttgttcgcatatgtaatatagccgaaatatatattacatcgtgaatagtaaatttgcaaaaatgcaacactttaaaagttaataaatataaaagaagtgataatatattctttatatgttgcttttattaaaaattatccatttatttgtctgacaaataatactaataggactaataataacacgatttaatatatggaaaacttaaaaattgatgggcagtcgattactttggtagaccaagtggaagacaagttattgaattatttcagaagtcaggacttgaaagtgggtgattctatccctaacgaaattgagttgtcgtcagcgttgggggtagctcgtagtgttcttcgggaagctcttagccgtctgaaaatgatgggaatgattgaaagccgtacacgtcgtggaatgatattaactgagcctttcatcttagggggaatgaagagagtggttgatccccgtattatgagccaggaatcacttctcgatcttttgggattcagggttgctttggagataggaatcagtagtgacatatttcataatattaaagagcaggatattatggaactggaagagattgttaatgcaggcgttgcattggggaacaacgaatatgccaatctcagcgaatatactttccattcaaaactatacgaaataacggggaataagacgattgtacagttccaaagcatcattcatccggttatgaactttgtaaaaaccaatttgagggaacgggtggaagctataaatatagaactggagaaaaagggaaagattgtaactcacaccgatttattgaactttatcaagaataaggatgaaatgggctacagaaatgctatcgagcaacacttttatgtctataagaagctgatttatgatagggcagtgttaggagaacagaataagggtcaatcacaataaaaatatgacaaatgacacggattgtaaataattgtgttgcattggtatgcctttgtttgttttgggggcaaagcctgagagctgcagatgcttctcattctgagcagataaagtggggcaacgagagtgtttttaatgaggaacacaacactttgggactcttttccggagtacttggcggacaaattgtattggcaggcggcacttccgacgattatagccgatggggaagaaatgcggtatgcctttctgaaaatgccggattcgctttgtatgaagatgtgttgtccaagccgttggcttatggcgcttccataacactctctgacggtatcttgtgtattggagggcgtgattcttcccaatgctacgaagatgtattttttgtcacaatgcagcagggcaaactgaatgtttcggaagattggccgccacttccttttccgttgtctaacgcggcaggagcactactggacaataaggtatatttgtttggaggcaggaagtcggtaagtccgtccaggttatcggattctttttttgtgctggacttgtcgaacaagtccagaggatggaaagaactaccgggctatccgggatgcgtccgggaagatgcaattctcgtggtacagaacaacggcgtttccccttgtctgtatttattgggcggacagacggaaacggaagaagggttgtcttcttgcttgactgatggatatgtctataacccccaattgggtaaatggagttcattaggttcggattttccgaaaggaatatgtgctgctgtcgccagcggagccaaccatatacttctttttcagaaagagccggaagatacacagcatcttaaaaaagagaatgctttatggaaataccatacaattacgcagactcttgtcaagtctgaatgtattccaggtacctatgacaccatgcaagtcttgcaaagaaaccgttccttcgttatactcggtagcaatgccagttccggaacgaatagactgtacagccttcaaggggatattgttcctttggaaaaggggttgggacttgtcaatatccttgtgattatcggttattttgccgtattggccggaattggaatttacttttcacggcgccagaaaagtacgaatgactatttcaagggtggaggacgcattccgtggtgggctgccgggctgagtcttttcggaaccgcgttgagtgccatcaccttcatggctataccctccaaggcatatgccacgaactggagttatgtgttgttcaataccggtattgtgtttgttgcccccgttattgtttatgtctttattccttttttccggagattgaatataacgactgcctatgaatatctggagatacgtttcaatgtctttatccgggttatttgcagtctggcctttattattttccaggtagggcgtatgggcgttgtgctttttctgccctccattgctttgaatgtggtgactggattggatatattcctatgtatcggtattatgggagtctgtagtattctatatacaatgatagggggaatagaggcggttgtatggacagatgccattcaagtaattatactgttgggaggagcgatatttgcagtgatatacatctcgtgttctcttcccggtggattgggtgaaacgattgatattgccgtggcaaacggtaagttcgatttgggagcgacgaactttgacttgaaggatgctacgatgtggactgtcattattgccgcatgttttacccatcttaccacctatgggacggaccaaagtatggtgcagcgctatctcactacctcttcgatgaaagaggcacggaagagtgtatggaccaatgcgatactgactgttcccgccacactgattttcttctttataggcactgcgctttatgcctattacaaggtgtatcctgagaatctgagtatcagtattcctaacggcgatgctatttttccgtggtatatttttacccaattgccggtcggtattgtagggttgttgatttcgggcatcttcgctgcggcaatgtccactttgagcggcagtatgaattcggcagccacagcttatatagtagacatttattcacgtttctttcataagggagagggtggcaatgaattgcatgcggcacgtatggcaacttgtgtgataggaatcattagtctatcttttgcttttcttatggcaacatggaatatcgcttcattgtgggacgaattcaacaagatactcgggctcatattgggcagtatgggaggactgttcatgttgggcatgcttaccaaacgcgccaattccggaggagcaatcatgggtatagtcgcaagtatcatcgtacaattgtttgttgccagattccagacgttccatttgcttttgtacacggcatccggctttatctcatgttttgtcataggttatctggcaagcttgttctttaagaaaaaataggtttgaacctatcattaattataatataattttatttatgaacaaacgacttttaacaggattaatcgctgcaccatttacgccaatgcacgaagatggttccttaaatttgcaggtgatcgggccgtatgcagagtttctgatgcaaaagaaatgtgtgacgggagtgtttatttgtggcacgacgggagaatccgtttctctgacaacagaagaacgaaaggctgttgcggaaaaatggatggaggcagtcaagggaaaactgaaagtgatagtgcatgtaggtggcatgtcgcaggttcagtgtgccgagctggcagcccatgcgcaggctattggagctgatatgatagcagccatggcgccctgctttttcaagcccggttctgtggaagagctgataggttttttcaagccgatagctgcatcggcttcccgcttgccgttttattactataacatgccgtccataaccggggtttccttgccggtacacaagttccttatagagggcaagaagcaaattcccaatctggtgggagtcaagtttactcataacaacctgatggagatgcagcagtgcattcatgcggacggtggggcgttcgaagtcttgcacggttttgatgagatactgattaccggattgtcggttggagctaaggctgccgtaggcagtacctacaactatgttccgggtatatacaaagctgtgatggaagccatggaaaagggagaccttgaaacagcccgtgaaatgcaatggaaatctgttgaaatcattgatgtgctgataaagcatgggggaggagtcagagctggtaagatattcatgaaactggcaggaatagactgtggaccatgtcgattgccgatagctccttgttctgaagaagagctggaggagacaagaaacgaattgaaaaatacggaattcttcaaatacattaattaactaaaaacgattgcctatggagatattgcaacaatacatccaatgaaaaagttcattggccaacttaagtttgacccccgaaaagggaggggaaacgagtattggcacttcccgtttccccttaaataaattactgaaacaatttattattaaaatcgtaacaaagatgagaaaaatatttcattttcacctcataacttttctactattttgcccatttttgctttgggcacaagaatttaacctatcaggtgtagtagtggacaatactggtgaaactcttccaggagtttccatcgctgtgaagggtacgactcgaggagttattacggatatgaatggcgctttccagctgaaagtaagcaagggggaaactcttgtattttcctatgtgggctatgatgaacagcaaatcctgattactaatcaaaagattcttaacatccggatggaaccgaccaccatggggctggatgaagtggtggttgtaggttatggtacccaatccaagcgtaccgtaacatccgccatcagcaaggtggatggagaaacattgaaggcaactcctatcaatactgtgggagaagggctgaagggtaaaattgcgggtgtacgcgtgtacaatgagaacaatactccgggtgcagaggctacgttcttgattcgtggtggttcatctatcagtcagagtaattctcctcttatattagttgatggcgtagagcgcagtacagcgggtatcaatcccaatgacatcgaatctatcgaagtcttgaaggatgccgcttcttctgctatttatggttcgcgtgcatcgaatggagttgtcctgattacgacaagaaaaggaaaaagcggtgctcctcgagtgacgtttgaggcttcctttgcaaacgagaatgtggagcggatgattgagtatctggatgctacccaagctgttactatcatgcgcgatcgttgggcttccggacccagtccggaaaagttataccttgacggatatgcttatagttccggcaatacggatgcttccaagttttctacccgttacttgagggatggagagagtattccggcaggatggaagtctgtggctgatccgttggatcccagtaagactttgatttttgaagataatgattgggccagtacctgtttcaagaatgctctttggcaaaattattatgtggggatagaaggaggtacggagaaattgagctatgtgggcagtattggctatatgaaagattccggtgtaggtgtaggcacggcattcgaccgttttaacgcccgtactaatgtaactgccaaaatcagagagaacctgactttcagtagcaacatagattacagccagacgaatagcgaagagtatgccagtcagtatcaggtgatttcccgtggactgatgaccccggccgttcaacgcagatattgggtgtctgacaatgaatggtacggaaccccgacgccaggtccaaactcttcgtctccgaatccgagcttctactcgtattttaatgataacaatcagcgtaccaaccgtttggggttagtcggctctcttgattgggaagttttgaaaggatggcatgctgtgggcaccgcttctttgtttacgcaaaacagccatggagatacattcatgcgtgccaacccgatgaatggaacgcggaaggcgactaccaacatgacggatgagcaacggaagaaactggaattctacaccagctatacaagaacgtttgccgataaacacagcatcagtgcgatggtaggatattcctatcagcaatatttgtacaagtatgtgtatgctgccactaccggacacagctccgacaagataccgacattgaacggaggttctgtttattccgatgcaacgtcgaccaagcaggaagatgtgaatatcggttatttcggccgattgaactatgattatctgaaaagatatatgttgactgctactttccgtgaggacggctcttcccgttttgccaagggcaaccaatggggattcttccccggattgtctgtcggatgggttatgagtgatgagccttttatgcagaatatcggttttataagtaatttgaagtggcgtggcagttatgggcagaccggtaacaactccatcggctattacgatgcattaggattgtatgccattaccaccagttacgatcaaagtgctgcgaccgtttcttcggccatgcctaacaaggctcttgaatgggagacttccacacaattggatttaggttttgatttaggcttgttcaagaaccgcatcattctgggtatcgattactttaataagattacggataacctgattacttccaaagtattgcccaatacgtcgggatacggttccatccttaccaatcttggaaaagtacgtttccgtggtttcgatgctgaaataacaacacgtaacattgtcaagaaggatttcacgtgggaatctaaattcaccattacttacgtaaagaacaaggtgcttaaactgcccgaaaacggacgggacaagaaccgccagggaggatactctgtaaaaatgcaggatggcacgaccaaagaattcggaggtgttgccgagggtgaaccgttggggcgtttctatggatataagaaagactttatcattacaactcccgagcaggctgccaatgcccgttatgacacctcatccaaaggttgggactggaccacgaaacagaaactgggtgtcggaaaaaagactatcggagactatgagtggaaagacctgaacggagacaatatcatcaacagcaatgatatgttcctgctgggaaatacgattccccataccaccggaggtttgaacaatactttcacctacaagggcttcactttgaatgtctatcttgattttgctttggggcactccatttccaatggttatctgcaacgccagatgtgtaatttcatgaatggaaacaccagcctgcctgccgaaatcctgaaatgctggaatgtgggggatgacccgagtaaggccaagtatgcccgtttctcaggcaatgactccgatgagttgaataagaatttccgggacaactccgatgttttcacccagaaagccgattatctctgtatccgtgaaatctctctgcaatatgctctgcctcaggcattgctggcaaagattggtctgaaagggctggtattgaccctggccggaaacaatctgcattattttacggaagtaataggtctttctcccgaagtaggtgcatcaagtacctattccggtagtttcaacacctatccgcctatccgtaagttctctatcggatgtaaagttactttgtgataaaagaagtttaatacgaaaaataagaattatgaaaataaaaatattatccggcattcttcttataagtggggtctcgttttttacatcatgtcatggagacctgaatgtgatacagcccagccagttcaccagcctatccatgtggacagaggagagcgacgctacgagtgcggtaaatggagcatatactcaattccgttccgccttttccgatttgctcaacatctatggagagatgcgctcaaactggtatgagagtggggcggtaaatgatgcgttttttaatagagtgggtacaaacgtattgctgagcggtgatgcaggtacaaattggagtagcatatatactaccattaatagtgcaaatttgattctgaagcatactccggaaatctctttcaccaatgaagctacacgtaatgaggtgatggccaatgcctatttcctacgggcatattgttactttactctggtgcgggtattcggtgactgtccgctactgacttccggctttgagtcagaaaagcaggaggacatgtatcccagccgtacggcggcttctgaagtatatgctcaggtcgaaaccgatatagaagaagctttaaggttgatacccgcttcttccaagcttctccataaggcatctccggcagccatcaacatgttgcgtactgaatattacttatggaaggcaaagcgtctgggaggagggaatgcggctctgagtacggcgcagtcttctgttgatgcggtattgaaagccggatatgcacttcttcccacgtttgccgatattttcaatttaaacaacgaagccaattctgagcttatctggacattgccctatatcgtcaatgaaaatgtgactccgggaacatcccccaactttttcgcctattatctggcacctaacggtgacagaacccggctgagggaagccggatataccgaggatgaggttcctgccggttcccatgcccagtatgttgtgcccacgcaagcctattgcgatttcctggctgaggatgcacgtgacacgcgtacggatgtttcagtacgggtattcgaggataagttcctgacggaagaagtacagattaaaaggatggttgtgaagttcaaaggctcctttgccaatgatacgcgtagttttgacagtgatgtccccgtctatcgtttggccgaagcctatcttttgaaagctgaagtggaaaatgccttgggaaatacggatgccgctttgcagaatctgaatgtagtggccaagcgtgcttatggggtagacaattactacacggcaaggactcaggatgccatagacaatgccattatcagcgaaatactgaaagagtttgtcgcagaatcaaaagcatggtgggcataccttcgctttaataaggaattcgagcttattgagaccttgaaggggcgtgaaggggagaagaatgttaccttgtggcctattgctcctgcttgtctcaatactaatccgaatataacacaaacggaaggttacaaataaatattgggatgatatgagatgtaagactatacttttactggccttgtctgcttggggcatcatggcatgccaaaattatacggataagatagcggtggagattcggcaaccggtatatccggtgttgacattgaaggagcataatccggtattgtgtctgcgtctgattaggaacagcggcgtggcatatcagttggaaaagataaatttcactttggatggaactgtccgttccggtgatgtcgtttccgcttcgctgttcttggatgagaattgtgggcaggtttgtgcaagtgccaaaccggtgaacaaacaattgagttttaaggtaggccggcagatagaggaagatacactgacatgctgggtgacactccgactgagggatgatgcggcgcaggctacaagcaagattgaaatctcatgcagcagtgtccagacagacctggggctggtgggcatccgccagttgcccgcagtaaagccgctccgtataggagtggccctgcggcagccgggtcaggacggggtacacacttcccgcattcccggattggcgacttcgacgaaaggtaccttgctggccttgtatgatgcacgcaatgaaagagatgacgatttgcagggcgacattgatattgccatcaatcgcagtgaagatggagggcggacttggcaacccatgcagactgttctggatatgaaagaatggggcgggctacctcagaaatataatggagtgagtgatggttgcatcttgtcggatgatttcaccggagacctctatgtcatagggttatggatgcacggagtcttggaccccaagacgggcaaatggatagagaatcttaccgatacctcgaccgtatggaaccaccagtggcgtgcgcacggttctcagccgggatatggtgtcaaacaaagttctcaattcctgattagtaagagtaccgacgacggacttacctggagtgagccgcgtaacattacccgccaagtaaaaaaggaaaaatggtggctgcttgctcccggaccgggtcgtggcatcacaatggaagacggtacattggtatttccggtagaggggcggaacgaagacgggcttcagttctctacaatcatgtggagtaaagacaagggcgaaaactggaccgtaggcgaaccggcctactacaataccaacgaatgtcaggtggtagaactttcagaccattccttgatgttgaacatgcgtgagcgcagcaaccggggacgtcaggaaggtaatgggcgggccattgccgtcactgccgatttgggaaaaacgtggacggaacatcccacgtcgcgcagagctctcattgaaccggcttgccaggcatccttgctgcgccatgattatattgaagacggagaagaacgtcatgtattactctttgccaatcctaattcaaaagagcgccgtaacaacattaccattaaggtgagtttcgatgacgggcaaacttggcccgaggagtattggatgttgttggatgaaggtaggggggcggggtactcttgcatgacttccattgacgagcataccataggtatcttttatgaggggagccaagccgacattcagttccaggctatcccgttgaaggaattattgaagaaataaaagtataacaccttaaaaaatagacaaatatgaaacgaagtgaaatcaatcaatatatccgcgaagccaaagcatttatgacaaagtaccacttcatgttgccgccatgggtggactggactccggacgactggaaaagcaaaggaccggaatgtaatgacatccgggaaagagccatgggctgggacctgaccgacttcggctggggcgatttcctgaaaatcggcctgactctggtaaccctccgtaatggaagtctgcagaagaaagacaaaccctattgtgaaaagattatgtttgtccgctgcggacaagttactcctacccatttccattggctgaaaacggaagacatcatcaaccggggtggaggaatcctctgcatgcgtctgtggaaggccgacaaggaaactgaaatgctgacagaagaaccgcttgtcgtttccatcgacggagtcagtacacgggtagctcccggagaaacggtgcgtcttgctcccggacaaagcatttgttatgagccttatctctaccatactttctgggccgaggacgaccattgtctggtaggcgaagtctccacggtgaacgatgacatgagggacaaccgtttcctcacccccaaggggcgtttcccgcagatagaagaggatgttccggccgaacatctgttgtgcaacgaatatcccgaagtttagaaagtatgaaagataagaccaacctgacgggattgaatcctgataatttccggtccgtaatcaacggaaaggataccggcctttatatactgcgcaatggcagcggtatggagatgtgcgtcacgaactacggggccatcgtcttatccatcatggctcctgatagtcatggtaagtttgaaaatgtcgtcataggcttcgatacgctggaagaggcccgcaggcaaagcaaggactattatataggagctactataggccccgtagccggacgcatattgcacggcgctttccgtgtaggagaaaaagattatcacttacagcttaactctgtttctaatactctgcacagtggtgataacggttttcacacggtggtgtgggaagcacagcaaccgtgtgaaaaccaacttctcctccggcatttccatgccgatggagaagccggttttccgggcaatgttacggtaaggatgatgtataccttgacggacgacaatgggttccgtatagattatgaggcggagacagaccgcgacaccttgttctgtcccaccaatcatgcctattttaacctggcgggcatgggaactcccactacttccattgaagaccatctggtgaggataaacgcggatttctacctgcctatcgacatgaatacgaacaataccggtgaagtcagggcagtgggcgatacgccttttgatttccgcgactaccattccataggcgaacgcatcaaccggaaagacttgcagttgctcaacggccacggttatgaccactgttttgtcttgaagaaacctgcgctgcatgagctctctttcgccgccacctgcatcagtccgtccagtgggcgcagaatggatatctataccacagagccggggcttatcatgtacaccggcaattatttaccgggcttcacgggcatgcatggcactgtgtatccgcgtcgtagcgccgtctgctttgaaacccagtgctttcccgatacaccgaacaatccgcatttcccctccatcgtattacgtgaaggagacctttataaacagacatgtatttatcaattcagtacgcaaccatgaaaaacagaatcattctttgtttgggatgcctgctggcattcctccagctccgggcacaagtcaataccaaccagcagcatttgtgcaatcctaattctttttccatcgtcctgctgggcgacccgcaaaactacgtgaagtatgactataaccagccggtttttgagctgatgacggcgtggaccgctcatcatatagactccctccgtgtaaaggcggtgctttgtacgggcgacttggtagaccagaatgaatgtattctacctcccttcccgcgtttcgggaatcttacgagccgggagcagtggacatttgtgtcgcgggctttcgggcggttggacaacaaggtcccttatctcatttctaccggaaaccatgattacggctacacccgttcggagaactcgatgacccgtttcccggaatatttcccgatagagcgcaacagccaatggaaaaagaccatcgtggctgcaaccaataatagaaacggcctgcctacgctggaaaatgccgcaatggagataacggacgagcattgggggaggattttgattattgccgttgaatttgccccacgtgatgaggtcttgtcatgggcaagggagctggtggctaccccacgcttcaaagaccacacagtgattctcatcacccattcctatcttaccggcttcgacagcaagcgcatcaccaaggaaggctataagataaccccgtccaatacgggcgaaggcatctggcagaagctggtgcaaccttccgccaacatccgtcttgtgctgtgcggacactatgccactccgaatgaacggttggactataccacgggattccgtaccgacaagaatgcagccggacacgatgtgcaccagatgatgttcaactgccaggcgttgggtggcggcatgagtggaaacgggggagacggctggctgcgtctgctcgaattcctgcccgacggacatacggtgcaggtcaggacctattctccgcttttcggcttttctcctcaaaccaaggacaaggcatggcgtacggaatcttatgaccagtttcaattcacgataaaataaaaaatatgaagcgtatatcaattatttattcattaatactcttttgtatgtatttatcagcacagacaagtccggagtggacttccggaaatgcgaagaaatggatgaaaagtgccgtttggtccaatggctggactgtctctccccataaatcagtcaatgctgttgaatttgcctgccaatatcataagaacaaggatgtctgggatgctgcattccgctttcttgccgaacatgatttggaagcgctgtccattggcaaccatgtcattctggaggggaaatgctgggctacggtcagtgaatacattcccaaagaggtggagaaagggaatattgaaagtcacctccgttttgtcgaccttcagtatgtactctggggaaatgaaaagatggggctggcaagtgacgtcgaagtacgtcaggcgtataattcaaaaaaggatgttgctttttatacctcttcccggataaaacactactctgccgatgccggcagtttcttcttgtttttcccttcggacattcaccagccttctgttcggggaaagggggaacttgttaaaagcaggaagattgtgattaaaatagaatatgtagattagtgtgttttcggttctattaaaaatactatttgtttttcaaataaatttcctttaaaatttgtacttttgccgactgtttagagaaatcaacgaaaactttaaaaaacgaaatagaatggcagtagaattgaaagaccttaccaaacgtagtgagaactattctcagtggtacaacgagttggtggtaaaagccgatttggcagaacaatcggctgtacgcggctgtatggtgatcaagccctacggatacgctatctgggagaagatgcaacgtcagttggacgatatgttcaaggaaacgggacacgtcaacgcttatttccccttgcttattccgaaatcattcctcagccgcgaggcagaacatgtggaaggctttgccaaagagtgtgccgttgttacgcactatcgtttgaagaacgatccgaatggcggcggtgtggtggtggaccctgctgcaaaactggaagaagagttgattatccgccccacttccgaaaccatcatctggaacacctacaagaactggatcaattcataccgcgacctgcctatcttgtgcaaccagtgggcaaacgtgttccgttgggaaatgcgtacccgtctgttcctccgtaccgccgaattcctctggcaggaaggacacacggcacatgccactcgcgaggaagccgaagaagaagcggtaaagatgctgaatgtatatgccgagtttgccgaaaaatacatggcggtgcccgtggtaaagggcgtgaagtctgccaacgagcgttttgccggtgccctcaacacctacaccatcgaagcgatgatgcaggacggaaaggctttgcagagcggtacttcccacttcttgggacagaacttcgccaaggcgtttgatgtacagttcgtcaataaggagaacaagctggagtatgtttgggctacttcctggggtgtttccacccgtctgatgggagcgcttatcatgacgcattccgatgacaacggtctggtacttcctccgcacctggctccgatacaagtagtcatcgtacctatctacaagaatgcagagatgctggctaagattgacgagaaagtggcaggcattgttgccaagctgaagtcaatgggtatttccgtgaagtacgacaatgccgacaacaaacgtccgggcttcaagtttgccgactatgaggtgaagggtgttcccgtccgtctggtgatgggtggccgcgacttggagaacaatacaatggaaatcatgcgtcgcgatacactggagaaggagacgcgttcctgcgagggtatcgaagagtacgtgaagaatttgctcgaggatattcaggcaaatgtctacaagaaagcgctcgattaccgcaacagccgcatcaccagcgtggacagctacgaggaattcaaggaaaagattgaagaaggcggcttcattctggctcattgggacgggactaccgaaaccgaagagaaaatcaaggaagagaccaaagcaaccatccgttgtattcctttcgattcatttgttccgggtgacaaggaaccgggcaagtgtatggttaccggcaagccttctgcctgccgcgtgatttttgcacgttcctattaataatacccaccccggattacgcggattaacacagatgattttaggagttctgataatcagaaacttttatctgtgtcaatccgcgtaatccggggtgattgtatatcttgatacgtcctctcggttttaaatttatagagttatctctcatcatgaattgatgaacagctatttatattgcttcagaaattctgagattgttttgtgtacagtttccggagattgttttgaatgaagcattgctgcaatgacaatcctattctcatcaatcaaataatatatcacgttaggggaaagttttaaatgacggacagtaatgttgttaaatagagtagaaaaatcactgtctataattcctatatacggatgttttgctaaaagatttactttgtcttgtatcttttgacgtgttttctgtgccgtcaacatgccaaaattattctctacataaataagtatctctaaaaagtgctcataagccaacttagaccagactatttccatcccatgcgttcatttatcatactctctatttgggagtttgatatacagtgtcctgctttattctcttctaaggcaaatagaagggcttcagccaaagcatctcggggaatactgttgataaagtcgtccatcggtatggctgattgatgataagttgccatcatcggttcttgtgccgtttgtttggaagagtcctgctctttatatggtttaattttacccattgcttttatttttaatcaaaggtaaactgaataaatgaaaactcctaatattcaatccatttattttccactgcatcaaagccaaccaatctacatactattgtaaccttctccacatctcctcgtaacaactttccctcatttttgcagcgtaaaaaaagaaaggaggcccgaatatgaaactgaacagaaatgactataccgtagaggcggcagccggcggtggtttttacgcttatttcatgaataatgtgttgtgcagcgcctacggtgaaacgcctgacgaagcctgcgaaaacctggaacagattgttgacgattttgtcagtgatatgtatatggtcgaggaatttgtctgatgctccggcatcatatgccgaccgaattatcctttttacgtatttattccataaattctcttgaagtcatgtctgcgcgatgccggtgtcatctccgaggagttcgatttggaacgtct

SEQ ID NO: 4511 - DNA, 5358 bp, Unknown
  gut microbiota DNA sequence
ggacttctcggagcattttcgcccgaacatggctttccgctattgggtgcgtagctgcgactggcgtatcctgcgctgtatagagagggaagaaaaagaggaaacctttttcggggtttcctcttcctgccgtcctttttttccggcgacttaaatgctcacgttcattgcattggctcccaatgcccctaagatggcggaggctactgcaattacgactttcagaattttatcccagatactttttttcatgctatatacgttttaaaagttgaacatacgaatcggtagtaaaatcagtcatacttatcccaacggattttcgccctggtctccgtccgaaccgcctccgtctcccgagccggaaccgccgccggagcttcctccttcaccgtctcccttgttcagcaaagcttccaggtcgtagaagtcaatcttctgcccggcacgcgtggcggcgatgtccggtcttacggtgctggaaggccggaaattgattttcaccgctttgatgttcttggcggtgcactcctttacatccagtacgcctgccgtacgcgccgacaggctgaatacgccgaagttcttgatattcaccgactggccgctgtagagggtcgtaatcatggcttccacaaaattggtcaatacactctggatgtctcccagtgtcagcgaactcttctctttcatcacatacgcaatgtcgtccagcgtcgcattgtcgcccagtgtcaccagctgcgggtagaactttgccaccgcatctgcctttcgaggatctttcctcgcaattttcttgaatggtactcccataaacaattaaataattaaaaattaacaattagaaattaaagtctcgtattgcaatactcttctctttctcctttagggggaagaggggtgctgcaaaagtactcctccggctttttctgctcatggctttcttcgggttacgccgtctctttcccgtttcctttctgttcaaaaaaaattcttcgtccgatgcccgtttatgtctgtatatgcttggtcataccgctgatattcagtatctttatggtgtaataatcaaccaataacataaggaatgaaaacagaaaaagaaaagagggaagaggaggaggaagaccttcgtccgttccgcatccacgcctattcgaaggaggagcttgccatgctctacaacccgacttactgcatcagcaatgccatctataccctggcggcatggatacgccacaacaaggcgctgaagggtgagctggagaaggtgggctacaacaaataccggcgcaccttcactccgctggaagtgaaagtgctggtgaagtatctgggagaaccctgacaggatgccggccggaaatagggaaaccttgtaaagaaaacgccaatatatgtaaagccccgtaacaatatatgttgtcatgcacaacaatatatgttacggggcttctctcttctcctcgaataccggttactgatatagctggatgtccactacttcatattcggtcgtctcctgctcgttggtccgtgtaccgaatccgtatttttccagtgcctgcaccagtaccagctgggtgtgcgggttcacctgcacctttccgaatatgctgagcttggtcagtatgacgctggcagggagccattttatctgcaggtcctcgggcagcggtttgcggaagaagacgaagaggttctcctccacggggtctttcatgcggtgccgttcgttgtgcttgttcaactgttctatctcctcgccctcgtaccagtatctgaaaccgcctttcagcaaggcgagggcctgggcgtagatgccgggatggttcaccggggtgtggtagtctatgccggtgatggtgatggggaggaaacgccggtttccgccgatgtcctgcaggcactgccggttgttggtgctcgcgatgaaggagcagtggcggggcagggtgaaggcttcgatgtcgtaggccttgcgctgcgtcacgttgtcctgcgcgatgattcgcttcaatgctgccagctcgccgggcttcacgccttcgaactcctccatgttgatgatgattcgcgtggcgagcaggcgggcatcgtccttgttgctcgggtctattatgccgttgtagaagtactctttccactcgggcggcagcaggcgccgaatccagctgctctttccctttccctgctcgctgtagaggatgatgacgagctggttcatgtcctcgtcgctcagtgcgcaggccaccaggcccactatccaccgtttgaagcccttctgccatagctcccggttctcggtcgtcagggtgtcggcaagttgggcgatgtagtccgtcccgtcccaggggggaagcgcgtacagatagtcggtgtaggggttgaactccttggcgtagttggagtctatcacggctctgaggaaattctggtagcaggagatgccggccatctgcaggtctacgaacatggtgttgtagtcctttccgcgcatggggcggtaaccttttccggcatctgccgacggggtgtagggcatgaattcgaggcggtccaggatgaggttcctgcggatgccgtagtgctcttccagaaagctcatcacttggttgatgacgggctttttctcttccttctttgtggcggcttcgctggttttgtcggtatagatgtaggcattgtgcaggggagattccacgtcgggatactcttgcccgaactcgtttttcgccagtctgatggctgtctgctcgtccaggcccttgctgtagcatttgttgcccagggcgaagaggaagttgtcgcggttgcctgcccggaacctggtggtgcgcttcacggcggtcacggctttggagaatatcagcttctcccaaggctttgcgtcctgcggcgtggcggcaacggaggcggggagggggtgtaccgtttcggcagccgtcttcttcttgccgctttccttcttcgcaggcgggatgatgcgtgccggcaacggggaaatctgttccagcagtgcggcattgatataggcatgcgggtcgaaggacatgaagtatccccgcgagatgtcctttccgcttccatccacctctactccgagaagggcctcgtagtgctctttggcggcgctgtacagcttcaggtgtatctcctcgagcgtggcgtaggtcacctcgccctgccggagacggtcatacagacgccgggtgtattccgtctgcatgaagacgaacagcttgtagccgtgccttttgggggagaggaaactgcccagggtgtgcgggtcttcgttgatgagggtccgggtctgctccaactgcctctcttccaggtcgtcgatgtcgagcgtgatgacggggttgtagcgggtgatgctcggtgcgagccttctttcccggtagttggccgtgagggtcctgaagggaagctgcttcttgacgtggttggcttcctccacctttccctgcgccacgaggctggcgattttgatgattaacttggcatgcttgccgtttcttatgtcagccatgtcctgcgtgaaggttgtctccccgctgacggcgctgaaaccacggtaggtggtcactggaatgttttccattctacttgtattaagtttgccttattggcggcgcaaagatgccgtttatttccttaggaagcaaaaacggccatccgcagtgggacagccgtttttttacaatttgaattccttggtccgttttactccttgggatatagctcattgaagagcttatatatctcatcctcaatacaatcggggttcagcgtattgccgcttccgtccgcgtccataaagtttacaagcagatgcagcaacttggcgaaggggcttacgcccttcagtccgtgttccttttggggatttatcagcagtgggatgaagggtgtcaggaaagccttccgctccttgtattccacggttaacgacttgtgttctaccatagaaagcaggtcgatggccacttgcacctctttgctctctttggtgtacagcacttggtaatctctccctttgatttgcatcacgctaattggcgtttttttgttctcataattacaatttgaaaatctaattttatattaagttaacgaatcgggtgcaaaattaataaaaaagagaagtctgtgcactatgtattacacggattggcacggatttttgtagtttctgtgcgtatcacttttgtgtatgtccgtgcgtatcatccttttgtttccgtgagtatccgtcactcagaacgtagcgaagaattcttctctgtgctcctctgtgccaatctgtgtaatctgtggtgcccctctccgtgaactagtgaagcgtgtgtgtaatctgtatgtatagggtgaggtaccggaacctatggttatatatgtaacacaccctttctttaaaaagataagaaatgacgcgcgtgcgcgtgtatcttacctaataggcgtaattctttgatatatagtgtgatgatgtctgcattaaaaaagattatcattttatcaatcagaatattttgtactttcatttcttgacgttacctttgcgttcattaaacggaacgtgttataaaacatttctttcatcataaacgtttcgttgataacggcttatcgcaagatagcttgaatataactatttcgtcgccttccttccgagatggtggagggttttgaaataaaatgaatgcatatagcctatttaaagtaaccgcattacattacttgaccgggaggtacttcgctactccggtgtcccccaatcatattttttcgtgaacgagaatgcagaaatgcactggtatgcagtgcgtgtcacctatagccgagagctttttttcaaggaatacctggatgcagcgggcattgaaaactatattcccatgcgctatgagtatgtcgtgaggaaagagcgccgcctgcgcaagcttgttcctgcggtccataacctggtcttcgtccgctccacccgcgagcgtatggatgaaataaagaacgaaccgggcatgaacatccctatccgctatatcatggaccgcgagacccgccagcccatcgtcatcccggactcacaaatgcgcagcttcatcgccgtgtctggcacctacgaccaggctgtgctctatcttgaacccaccgagctgaacctctcccaaggaacccgggtacgtatcaccggcggcatcttcgaaggagtggaaggggtgtttgtgcgtgtgcgccatgaccggagggtggtggtgaacatcgagggggtgatggcggtggcgacgacgtttgtgcatgcgtcgctggtggaggagatcgaataataatttgtaacaatattgcccg

SEQ ID NO: 4512 - DNA, 256 bp, Unknown
  gut microbiota DNA sequence
gggatttacgtattggacgtatgcctgtccgatcttcaacgttttgcggccggattacatgacatcggcattcatccccgttcacaagcccgcatcttatcaggaatcaaatcatttttccgtttcctcatcctcgaaaactatctggaagcagatcccagtgaactattagaaggccctaaaataggtttcaaacttcccgaagtactgactgtggaggaaattgaccggattatctccgccgtcgaccgcagca

SEQ ID NO: 4513 - DNA, 379 bp, Unknown
  gut microbiota DNA sequence
gataatgtcgtccacctcctgcgtcaccacgattgcctcgccgtaatattttctgaccgtcttatacatatagcgcagatattcagccatgttcgccgatgagagggccttccaagcctcttccacgataagctgtttccgcacgcctttcagccgccgcatcttgttgatgaaggcttccatgatgatgatggtcacgacggggaacagttcgcggttttctttaatcgaatctatctcgaagacgatgaaccgcttgccgagcaggtcgatgttctccgtggagttgagcaggaaatcgtaacgcccgccccggtaatactgccgcatggtggtgagcatgttgtcgatgttgaagtcggacttctccaccttgatg

SEQ ID NO: 4514 - DNA, 775 bp, Unknown
  gut microbiota DNA sequence
cttcttctccacgtcgaagatgtaatcgtcggtgtagaacgggttgaagctgatgggcttatcttccgtgtaggtgaaatacacaccgtccgctccgcctgtcttgcgtcggatcatgccgcacaagccctgataggagtttcccgtgtccaccaataccacatgtgcgccttgctcataatattggcgcacgaggtggttcatgaagaaagacttgccgctgcccgaaggacccagcacgaacttgttgcggttggtcgtgatacctcgcttcatgggcaggtcggagatgtcaaggtgcagcggttttcccgtgagcctgtccaccatcttgatgccgaagggcgagagcgagctgcggtagttggtttcctctgtgaacaggcacaccgcctgttcgatgaaggtgtggaaactctcttccgccgggaagtccgccgcattgccgggtatcgccgcccagtagagtgtcgggcagtcgatggtgttgtggcgcggcacgcattccatgcttgccaactggctgcccacgtcgttcttgatatgcttcagttcctccgcatcgtcgctccacgccatgacgttgaagtgtgcccgtaccgaggtcagtccgtaggaatgggcttcgttcaggtattggtctatccactcgcggttgatgctgttgctccttgaatagcgagatagcgactgcatgttacgggcggacttctcgaacttctgcaaggtttcctcactgttgtctatcagcacatactggttgtagatatggttg

SEQ ID NO: 4515 - DNA, 911 bp, Unknown
  gut microbiota DNA sequence
tcgttgtcgtttgaacagacgggttatccgccgccggttgataaggtatcggggatggctccgtgccgctcctaatttcatcagcccgtgttcaccgtaccgggcgttcagcgcgaaggtctgccatacaaggagggaggacgatgccgcgccgaagccgatacatatccactggtcgataccgaccatgtagaggatgacgaacaggacgaagagagccagcagacctccgcagaagatgaagaggtactgtgccttcaagcccttgaactctaccggacggccgatacccttgttgattgggtattcagccatacattatttattaaaggaagaatgagcgcaggatggtggcggcaacaatcaggaagatgcacgcgccgaaccacgaggcggctgtcttgctggtgtcggggtcgcccgatgaaaacttgccgtacacttttacgcccccgataagcccgacgactgcaccgatggcgtatatcagtttagttccggggtcgaaataagaactcaccatagaggtggcttcgttgatgcccgcgatgccgtttccctgcgcgaaagcggaggcggttgcggcgatgacaagtgccgcggagaggattgcttttctgtttttcaagatgttcttgttcataaactgttcttgttttttgccgtcaaaagggtggatggtcctttgtcgggcggttgatactttgtttctttactttggttttagtggatgcccgtttgtttccacggacgtgggcgtgtccgttgcggatggggatgcgccttgcgtttcctcgccgcgtgggttgatgtcattctttcatgttcatttcttttattgttgtcatacatagttgcgaatgtcgaactcctcgatgttgtccggcacgacgaactccttttcagatttc

SEQ ID NO: 4516 - DNA, 1014 bp, Unknown
  gut microbiota DNA sequence
attcatcgccatcaacaacgagtggctgacgcgcgacccgttccgcgagtatgaaatcaagaaggaggaaacaacacgcagtttcctgaccaaagatgagatccgcctgctgatggaggggaaactgaaaaacgccaaacaggaattgtaccgcgacctctacctgttctgcgccttcacggggctgtcgttcgcggatatgcgcaaccttacggaagagaatatccgcacctacttcgacgaacacgagtggataaacatcaaccgccagaaaacgggcgtggtgtccaacatccgcctgctcgacatcgccaaccgcataatcggcaaataccggggactgtgcggggacggcaggatatttcccgttccgcattataacacgtgccttgccggtatccgtgccgtcgccaagcgttgcggcatcaccaagcatatcacgtggcatcagagccgccacacggcagccacgacgatattcctctccaacggtgttcccatcgaaacggtcagctccatgctcggacacaagagcataaagacgacgcagatttacgcaaagataaccaaagagaagctcaatcaggacatggagaaccttgccgcaagattgaacggcgtcgaggaatttgcaggttgcaccatctaaaaagaaaagccatgaaacgtgacacaatcatcatcgaggacaaggcagtcagcgtaaccggtaacgacgtgtggatgaccgccaccgaaatagccggattgttccatacgaccgtcccggcagtgaacgccgccatcagagccgtccgcaagtcggacgtgctgaacgactacgaggtgtgccgctacatgcagcttgaaaacgggctgcacgcggacgtgtacgcccttgaaatcatcatcccggtcgctttcagggtgaatacctacaacacccacctgttccgcacatggctggtgggaaaggcactctcacaagagaaacggcagacatacgtgatgttcatacagaacggaaaagccggg

SEQ ID NO: 4517 - DNA, 195 bp, Unknown
  gut microbiota DNA sequence
tcggcttacacggagcagttccgccacctcgccgtccgtcaggtaacgctccccgtccagcggaggacggtaattctccagaaatgcggacagccattttgagcctttgcgcatatcctgcatcacagaggctatcggctcgtcttccatcgtaaaaacatcgttgttctcgtttatcataacttcggattcagt

SEQ ID NO: 4518 - DNA, 508 bp, Unknown
  gut microbiota DNA sequence
ccggctcacacggagcagttccgacacctcgccgtccgtcaggtaacgttccccgtccagcggaggacggtagctttccagaaatgcggacagccatttcgagcctttgcgcatatcctgcaccacagaggctatcggctcgtcttccatcgtaaaaacatcgttgttctcgttcatcataacttcggattcagtgggtgaataaatcaaatcatctgccgtgcggatagagcgtgccgacaagcggtatcagccgcttcacctcctctggcttgtaatagaacctgcggtttatctgcgagtagccgataagccgcctgtcacgcagcgtctgcaacgtgcgcgggcttattctcaactgcccgcagacctcctcgcccgtgagccatctttccatgcgccccgtgtcgcttttgcgcctcagggcggcgaccttctccgagagtgcgccgaatgccgccaccatcatctcgaaagtctttttctcgatagatactatttccatatt

SEQ ID NO: 4519 - DNA, 1402 bp, Unknown
  gut microbiota DNA sequence
cttccccgccatcgcttccgggagctaaatcaatatcatatacctgcccccaagcgtctataagtccccatttcagattactgccataaacactgaaagatgccattttacgataaataccattcaaggctgcacgatatccattacccgtctcaaacagaaattcttcttttatttgatcagatggagatacattcaaccaatcactgcatgaagttcccccaattgccatcatgcctaataaaacaattgttctatatatctttttcatactttttctctccttattaattagaattgtgcctttaatgaaaaatctattttccaagatttaggataacttaatccacgttcttgacgaatagagttccaattaataaaatcactgccactagcttccagacgcagcatattcatgtgtaaatgtttctttatccactcacgattaaagtcatagctcagagtcaaagcagtgagacgaatatactttttgtcttgcacaaaacgagaagtaggtagagtggtcaatttactatcggcaatgttcttaaactgagcaacatcacccggcttctgccagcgatctgtcaaaacacgtaagtctacatttccataagcaataccggcattctccacacgatctaccaacgtctgattatattcctgccctccaaattcatattggaaagctgcaaacaagctccaattcttgtatgaagcgttaaatcctaacgaaccatttagttttggttccgtattgcccactacgacttcctgtgttgcatcccattcatcggtgacactcccatttctgttcagaaataactccttacctgtagtaggatcgatacctaatgagcgaactgcccagatagaagtcagcgattgcccctcagcatattgcgggataggtattgcatagtttgcatccgatgaagactcgtcataaatgctctgactttgttgagcttttttataatactccgttacacgctgattatatgctttctgcgaatctgagatcttcaatattttattcttattatgagccatattgccccataaagctacagtccaattacgatcgcgatagacatcagcacgtacctgaagttccaaacctttgttttccacttctcccatattgttcttataggtagagaaaccggacgtagtagacaacgtcacatcattaatcaagtctttcgtcttctcatagtaatagttaaattctaccgtcaaacgctgattaaagaactgcgcatcaagaccgaaattgaatttatccgttttttcccatgttaagtcattatttcccaatgctttgagcactactccgtatccggtaacataccactcatcaaataaagactcgtacatggtagttgcagcatacgccgga

SEQ ID NO: 4520 - DNA, 583 bp, Unknown
  gut microbiota DNA sequence
tgatgatgcgccataatcaaaacaaaaacgtcttcttctccggcaacgcttatgccgaattgcagcccatcaagaacctgaaaattcgtactgtattcggtgctaactacagtaccaatgaataccgcaacttcaacccgatataccaattcggttctacaagccgtaatactaataccagtgttacccaaaatatgcagcatgtattggaacttacatggaccaatacggctacttatgactggaaagttaatgaccatgccttcaatgccttgatcggtatggagtcctaccaatacaatggcacttacttaagtggtagcaattcttccttgaaagaaggattcgacgattgggaacatgcttacatcagcaatggtacagcttcttctactgccagtggtttaggtgtcagcggttatccattggatgaaaaccgtacggtctcttacttcgtccgctttggttggaactggaaagagacctacatgctgaacgctacggtacgtgccgacggttcttccaagtttgcccgtggccatcgttacggttatttcccatccatctccgcaggctggatcat

SEQ ID NO: 4521 - DNA, 621 bp, Unknown
  gut microbiota DNA sequence
gtctttcctatcaggattcagcgtatcatcagcagtttgcacgattgtcagggctatcccgtggattatgttgctgcggctatccttgcggccattgctgtggggattggcaactcccatctggtgcaggtgaagcgcaactggctggaaagtcccattctgtacatggcactgattggacgccctggagccaataagagtcatccgctgagtttcgctttccagccgtttatagaacatgactattgtcagaatcaggaatatcagaagctgtatgccgagtatgaacgcactatgtccatgagcaaaaaggaacgcatggaagccggtttggatgagtttccgcagactcccgtgcgcaaacgctttcttgtttcggatatcactcccgaaggattgagcctgatacatgcccagaatcccagaggactctgcctttggtcagacgagctgtcggcctggttcaagaatttcaaccgctacaataacggttcggaagaacagttctggctttcggtgttcaatgccaagcccacgatttccgaccgcaagagtacgcaaagttccatttttatcagacgcccctatatctccgttatcggtaccattcaaaagaagatt

SEQ ID NO: 4522 - DNA, 370 bp, Unknown
  gut microbiota DNA sequence
ctgtcttgaaaagcagatggaacgaccgggaaactcctgaagagctggaaatccagtggcaacagattatcgacaaactgattgcacaggattgtccgcatgacgagaataatgagttgcagcctcaatgcctgccattcaatgaagatgccaagcaacggctttacggttggcagcatgaaaatgcacgccaatgtgatatggaaaccaacgatgctttggtcggtatttactgcaaactggaaatctacattatccggttttgtctgattatccagcttgcccgatggacttgcggagagtgcgacaagcatacgattgaccttgaaagcgtgaaccgtgccatcctgctggccgagtattttcggac

SEQ ID NO: 4523 - DNA, 2473 bp, Unknown
  gut microbiota DNA sequence
ccagacattgatgcactattaccgggaaacggatgaattcattgtccgtcaaacgattcataacctatatcaagagcttaaaggcttcgggaaaaagagcagtctgacgcaagagcaggagagcgttttccggctggaagagtttatgggccgccggtatgagttccgctacaacaccgttctggatgatttggaataccgtcagcgcgactccgtccatttctatttcaagcctgctgaccagcgtgcccgcagtacggtctccatgaatgccctgaaggagggtatccgcgtatgggaccgcgacatcaaccgtttccttacttcagactacgtgccactctataatcccgtcgaagaatacctttacgacaccggccgctgggatgggaaagaccgcatccgggcattggccgacctcgtcccgtgccacaatcctcattggcgggagctgttctaccgctggttcctgggcatggtggcacactggcgtggaatggaccggcaacacggaaacaatacttctcctctgcttgtcggttctcaagggttccggaaatccaccttttgccgcattttgctgccaccggagctgcgtttcggctatacggacagcatcgacttcaagagcaggcaggaagcagaacgcagtctgggacgctttctgctcgtcaacattgacgagttcgatcaaatcaacatcaaccagcagggcttcctgaagcatctgctgcagaaaccggctgccaacctgcgcaaaccctacggcagcaccatccgtgagatgcggcggtatgcctccttcatcggtaccagcaatcagaaggacttgctgtccgatcccagtggcagccgccgtttcatctgcattgaggtcaccggtcccatcgatacgaatgtcaccatcaactaccgccagctctatgcgcaggctctgaatgccgtagccaaaggtgagcgttactggctggatgatgccgatgaagccatcttgaagcggacgaaccgggaatttgaacagctcaccccactggaacaactcttccacagccatttccgcgcggcagaagaggatgaagaggggcaatggatgatgcccatgcagattctttccgctttacagacaaagacgcgtgaccgtctggcaatcaacaaggttgccgtattcgggcggacgctcaagaagcttgaaataccgaacaagaagtcaaggcaggggacactgtatcatgtaatgccgctggattaaatgctctgcagtaaccccgcacaagcatcttccagaatgtctagcacatactcaaaaccttcggaaccgccgtaataggggtccggtacatggtcagcatgggtaaactttgtacagtattccgtcatgcggtgtatcttgctccattcggcggttgaaggggcacgatctttcaggtcgtcgatgttgcggtcgtccataccgataatcaggtcgaagttgtaaaaatcctcggtacgtacgggtcgcgaaagatgcgtcagattgtatccacggcgggcggcatgggcacgcatccggctgtccggcagttcgccctggtgataggacagaatgcctgcagaatcgattaaaaactcatccgcacgtccggcttcttctaccagatgtttcatgactccctctgccgaggaggaacggcaaatgttgccgaggcaaacgaaaagtatcttcttcatatttctttagttacgagttatttacatcgggtctacatcataatacactatcaacgacttgaagcggtcttccgccaccatctccttttgcacctggacgagcagctcgcgagcacgtgccattggggcattggtttctatcttcaagacaatctttcggatgaacagggtctgtacgcgtgctacgggcggcttgtccggtcccagtacccggttgccaaagacggtgcggagcttggcggccatagtctgtgccatgaggtcgagcagggtctcgttccggttcttcaggtagacatacaccaggcggtagtagggcgggtagtggaacatctggcgttcggcaagctgcccgcctaccatggcttcgtagtcgttggcaatgacttgcgggatgatgggatggtcgatgcttttggtttgtagcaccaccctgccgcgcttgttcttccgtccggcgcgtccggcaacctgcgccatcagctggaaggcgcgctcgtaggcgcggaagtcgggatagttcagcatggtgtcggcattgagtatgcccacaatgctgacgtggtcgaagtccagacccttggacaccatttgcgtgcctatcaggatgtccgtcttgccttgctggaaatcggagatgatgcgctcgtaggcggtacgggtgcgggtggtgtccaagtccatacgggctacgcgggcgtcggggaagagggctttgatgtcatcttctattttttccgtgccgaagccgcggttgcgcaggtca

SEQ ID NO: 4524 - DNA, 1716 bp, Unknown
  gut microbiota DNA sequence
gcagttcttgcacttgggtacccagccgcaggtgttgcactctatcatgggggcgaagccgcggcggttctgaaagaggatgacttgctctttttgttccagcgcctcgcggatatattgtaggagcagtggggagaacggaccgttcatcttcttcttgcggtgcagctccttgatgtctacggggataatctccggcagttgtatctctttatagcgttctttcagttccacaaggccatacttgccggatgtggcattgtgccaagtctctacagaaggggttgccgtacccaacagagttttggcgccgtacatggaggcgagtacaatggctgcattgcgggcatgatagcggggggcggggtcttgctgcttgtaagtgttttcgtgctcctcgtccacaatcacaagaccgaggttgcggaaaggaaggaaaacggaggagcggacgccgagaataatgtcatagtctgcttccgacagctgcttctgccagatttccacccgttcggcatcggggaacttggagtgatagatgcccagtcgggagccgaatacgcgttgcaggcgctctgtgatttgtgcagtgagggctatttcgggcaggagatagagcacttgctttccttgccggatggtttcctctatcaagtgaatgtagacttctgtcttgccgcttgccgtgatgccatgcagcaggcagacattcttgctttggaaattctctaagatggagtgataagcgcgttgctggtgctcgttcagcgggttgacggggatgacttctttgaggagtgctttgtctatgcgacctatttcctgctggtagacttcgaatacaccacggtccacaagaccgttgaatacggcaggggtggcagaggtgcgttgcagcagttcggctttggagacttcttttatatctcgtccgctgaggtagccggagagttccagatatttcatcagcaggtccagttgcttgggggcacggcgctgcaactcgtcgaagaagatgtgcaggcggtgttcgttgcgggcggcggcggtgaggcgtacacgggtttcggtcttaggcttataggtacggcgcaattcttcctttacgaagatggcctctttgtcgagcagtgacttgatgacagaaagtatgttcttgatgccggtctccttctccagtttcgtcacgcattgctccgggtcggcagagagcatatccagtatcttctgttccttctccggcaggcggacatcggattcgaaatcggggttgtactctacgattgtttcgctttccagcttcaagccagagggtaaggcagctttgtagacgtctccttgcgtgcagagatagtaatcggagagccattcccagaacttgaactgccgcggaagcagtatcgggcgggcatccagcaaagcggacacttcctttacttcgtattcggtgggggcacaatagtgcacgttgcgcacgatggctgtatagtatttcttccgtccgaatggcactaccacccggcaaccggtctgcacttcatccacccattcgtcgggcagggagtaggtgaagtagctgtacaaaggcaaaggcaatatgacgtcggcaaactttttcatcgtggggacaaagatagtggaaagtggagggagaatgaaatgaacgggggcattttttatgctgagaataggatagccgaatgaaaatgaaggggc

SEQ ID NO: 4525 - DNA, 95223 bp, Unknown
  gut microbiota DNA sequence
aagtattatactcactaaaaagaaatttatagaatatttttattaaacattttgcgagattcaaaaatacacgttatctttgcgttcattaaacgaacgtttaaaaaacgccttttccaaacgcaatatttcactgtataacaaccaattacaaccaaataaaaaatatcgtgtttatagaaatcagattcctacaaacacgatatcaattaaaaaagaaattactattctcagaagttaaatatacccaattccgggaaagtagccccttgcactgcaaaacagattccgaagcaagccgcacttacaatccaaaggataaccagcgtccacttcaaaccggaattcatcggctgccatttgaatatctgactgaagatggcccatacaagactgaccaaaggaattcctaccagcaagattcctgcaatgtacatcacaatggcagacaacggagaagtaggcagtaccacatcagccatcgggaaaaaggaaatgagagccgcaccaccaccaacagccaccgctatcgcagcaaacaacagcgccacgaataccactccaaacacaaacagtatcggactgcaaataatggcgaatatcaccagacagattttcaacagccaaccgactaccatcaccaacgtatctcccaacttctgcaagaaagtacggggcttgtccgacctcatataatcattcaccccattggcaaccttctcgaagccatccgtcaccgtctttccgatattctctaccgtaacagcctcaccgcgcatgcttaacttctcggcagccgtgcgggcttccgggataatcagccaacatacgatataaaccggtatcaacgttcctaccccacaaatcaagacgacaagcagcaacagacggagcaaagtcacatcccaacccaaataggcagccattccactgatgacaccacccagcattttgtcatccggattgcggtatagacgacggcgtgtagtgccataagcggtattattgctccatgcaccggcaccataaccacctccggcatttgtactaccggcatcggcactgctgctctctccttctgtctccatgtcctccggttttcccatgcgggcaatcacctcttccacatcggctattgtgattacttgcgaaccggccgacaatttctcggcaaagagttcggaaatacggcgttcaatatcatctacaatctcgtcggcaccggcttccttgcggaagtgcatcttgagattactcagataattatccaaaagacggtatgcgtcatcatcaatattgaaaacggttccacctaaatttacagttaatgtctttttcataacacactatttatttacaatttgactatttacgatttactatttaccattcgacgaatgcggcatattctctgtggtcatttcaagaattgctgatgtgattcaccgtctcgttcaactctttccaggatgtttccagttcaccgagaaagacttctcctttttccgtcaaccggtaatatttacggggaggaccttgcgtagactcaatccattcataccccaaaaggtcgtcgttcttcaagcgggtgagcaacggataaagtgtaccttccaccacaatcagtctggcttctttcaacttctgaatgatatccgaagcataagccggctctttgtgaagcagcagcatgatgcaatattcaagcatgcccttgcgcatttgcgactttacattgtttacatccataatggtatttactatttgacaatttacgatttactatttggctgcacaatagagtaatgagtatccttattcattctattgttgttccttgtatggcacaaatatatgtattataccagtaccttgcattacaaagtaccatatattaaacattattaacaagaaaagtagttcacgctactctataacatcagtaacgtgaacagagaggaagagggatatttactgatggataacaattttatccaatataccggtcagactcgcaattgctactccgtagttggttatggggatgtgctgtgcgcgggcatgggctatacgattgagaacgtacttccggttgaacatgcaagcgccgcaatggataattaaatcatatcgggacaagtctttgggaaagtcatttccagatacaaagtctatctgcaattcctcgccgatgcgctttcgtaacaggcggggaattttgacggtgccgatgtcctcggtcagcggggcgtgggtgcaggcttcagctatcagcacacgcgattggggtgtcaggctatgaatagcggcagctccctctacaaaggcattgatgtctcctttgtaaccggcaaaaagaaccgagaaggaagtaagactactctcggcaggcttttgttgatagacgatggggaacacctgagagtctgtgattatcagcttaggcggacgggcaagggcttgcagggaggcttgcagcttgtcggtggtacagctcatcactaagcattttttatccaacagttcgcggatggtctgcacttgtggaagaatgagacgacctttgggggcttgtatatcctggggcatcaccagcaggacgatatctccttcacgtaccaaatcgcccgtgatagtctgctcaccaaaattctcgggaagcttttcgagaatagcatcgaaaatgccttgaatgccggtaccctctttggcactgaccacaacgggagcctgcccgcattccttttcaatccgaagcaccacggaagcggtgtcttgacgggaatcggctttattcagtatcagtatcacggggatttcgcgctcagccagtagctttagccattgctgttccagcgttccgtcagcttcataaagcaagagggcgatgtccgctttctccaccgtctttaaggtacgctccacgcgcataccgcccagttcgccttcgtcgtcatcaaaaccgggggtatcgataaagaggcacgggcccaaaggatatacttccatggctttggtcacgggatcggtagtagtgccgggcgttgcggataccaatgccgtgtcttgcccggtcaaggcattgacaaggctggactttccgctgttccgtcgtccaaagacggcaatgtgcaggcggttagaacgaggtgtattattcataaatccgaaatctaaaatctaaagtctcttttcccctcccctatctcctgaagattacgttcggctatcgcccgtatcttggggttcgggatatgctccatctcctcacgaatcagccgcatgcccttctccttggtttcggaggaggcatagtcctccagatattcttttaatgtcatcagtgcattgggctggcagcagtttgctatctgtccgcgcttgacgagcgacatgaagcggtctccggtacgtccctcgcgatagcaggcggtgcagaagctggggatatgtcccaggtcgagcagccagctcaccacttcatccagcgtgcgccggtcgctcacatcgaattgggaggaatcttcctctttggcttccggcacggcatagcctcctacgctggtgcgtgaaccgccgcttatctgcgaaacgcccagttcgagcacccgacggcgtacggcttccgactcacgggtggaaataatcattcccgtataaggcaccgcaatgcgggtaaccgccacaatacggcagaacatctcatccgagatggcatcgggaaaatcctcggtcgaaatatcatctgccggacaaatgcgcggtacgctgatggtatgcggacctacgccaaaggtagcttccagatgttcggcatgcatcagcaatcctacgaagtcgtagcgataggtattcagaccaaacaatacaccgatacctacatcgtcgatgccaccctccatagcgcggtccatcgcttcggtgtggtaggcataattacttttcggtcccgtgggatgcaagacttcgtaatgctctttgctgtaagtctcctgaaaaaggatataagtgccgatacctgcctctttcagcaaccgatagttttccactgtagtggcggctatgttgacattcacccggcggatggccccgttcttgtggtggatgctgtagatggtgcggatggactctaagatatagtcgataggattgtttcgagggtcttctccggcttccagcgccaggcgtttatgtcccatgtcctgcaaggcgataacctcgcggcgtatctcctcttgcgagagtttcttgcgggggatggtacggttcttggcatgatacgggcaatagacgcaaccgttcacgcaatagttggaaaggtaaagcggggcaaacatcacaatgcggttgccatagaatttccgtttgatttcacgtgccagacgatagatgcgctgcaccagttccggctcgtcacattccagcagcagggctgcctcccgatgggaaagcccctggcacaaagcagccttgtcaatcaaactttcgatgagcggacggttgttgcggtttgcctgcgcatactccaatgtatccaatatctcctggtgattgatgaattcttccgtttgtcttgactttatgttatacacttcgtaaattgataattggtaattaaataaagaatgaagatttgaaaattatcaattatcaacggtcaattctccattctcataatctcctctctcttttgatacctcgtagcctatccctttcagttgttcctccaatttttgcaaaccttctgccgcttcggcacccgcagaagctttgttatcatagagggagtacttcgcccgctgatgggaaggcgaaagattgggcatcacgacattggcgccagccaatattccccgttcccgtccgtccggagcaagtgtggccagggcagtggtagcaggtatcagtgccgcgggatgcatcagccggaagatagaaagcaacttcaacgtcaactccatatctcccggcggaaaagaggaaaacggagtatcgtgatgtggaagaaaaggtcccatgcctatcatctccggatgaaaccgttcgatgaagagaatgtcttctaccaaatggtccaccgtctgataaggactgcccaccatgattccggttcccacttgatagcctatctctttcagccagtccaagcattgcaaccgatgggaaagggacatctcagcaggatgaagccggtgataatgcccttcgttgcaggtttcgtgccgcaacagatagcggttggcacctgccaggaagaaacgttcgtaggcttcccgcgatttttcgcccaaagataaggtaatggcacaatccgggaaggattgccggatggcggcaactgtctccaccatcccctcatccttcaccgccggcgcttcgcccccttgcagcacaaaggtacggaagcccaaccgatagccttcatggcaacacgaaagaatctcctcctgcgccagctcataacggactatgttccggttctccttccgtatgccgcaatagtagcagttattgcggcaacggttggttatctcaatcagtccgcgaatgaagattttattgccaaagcaggcaagcgcttcttcccgggcaagctcctgcaggtaggctgcaagttctgtgtcccgacaaagaagcaaggctttatactcttcggcatccagcctgcgattgctccgcaatttgtcaatcaaatgcttcatataaacggacaaagggctaatacgtctcttttctctttgccaactcctgcgtcagctggcgctttccggcagttatttcattatgcgaacatggcccggtaatacaaccaccctcgcaagccatcacttcaataaattgccccggagccttgcccgacttggcgtaagcacgcaacgcaccgatagccttcttatccagattagccacttgtacggcattgattttatctgcctcttccttcagataggctttcacggcacccatcacgcctcctgcctgcgcaaaaccatgcgcctcgcgcacggaagtgaaactcatggaatagggctttgcctgctccatctgaatatccagcccggcaagcacggaagccacctcctcgaaagtcatgataaagtccaccgcctcgtcgcgctgcgcctctttgcgcttggcaacgcaaggacctatgaagaccaccttcgcatccggatacttctctttagcaatgcgggcagcataatacatcggcgaaccggtgcccgacacgtaaggcttcatggcaggaatatgcttgttcaccaactctatataagacggacagcaggaagtcgtcataaacttctgaccctcctccagcttctcaatcagctcgtgcgcctcgttgctgacggtatccatcgctccctgagccacctcgatgacatccgtaaaaccgacctgtttcaatgcgccatatacttgttcaatagtcgtcttgaactgccccaggatggacggagccacgatagccaccacctgctcacccttgcggattctgtgcaacacgtcgaacacctgcgatatttcgaaaattgctccgaatggacatgcattgagacactttccgcaatagatacatttgctttcgtcaatatgctctatccccttctcatccttactgatggctttcacgggacaagcttcctcacaaggtacgggaatataaacaatggcatggtagggacaactcttatggcagatgccgcaactgatacacgcatcatggtcaatccatgcctgcccgctctccttgacgtgcactgccttcttgggacaatttacctggcaactgcgtgccgtacatccgcggcagaggttcgtaatctcgtagttaatctgcacacatgccgaacaagcttcgtcaatcacacacatgatattgtctttcggcctgccattttccgctctgtccagtgcacgggcagcgtactccgacaagggggtcagctcatccgtctcgtcctccatatcgagtcccagaagcggcaatgacttgtacttccacaccgcgcgctctttgtgcacacagcagcgtcccgcgtgcttggacctcttcggactcagctcgatgggcagccggtctattttatccacaagttcgttgttattccacagctttaccagttccttcagtaatctgtggcggacaatcataatgttgctcgtaaatgccataatttttaaaatcaaaattagttagttcggtaacggtctgcaaagataacgattgtttcacaaaaaaggcttaactttacaccccaaacagtataaatacaaccgatatgtttaccataagaaaagcaacgacagcagactgcgcactgattcagaaacttgcgcagcagatattccctgtcacgtataaggatatccttactcccgaacagaccgactacatgatggaatggatgtattcattggacaatatccgcaagcaaatggaagaggaaggtcacgtctacttcctggcctacgaagaatgtgaagcggcgggctatgtgtccgtacagcagcaaggagaaaatttattccacctgcaaaagatttatgtgctcccctattaccagggtgcacattgcggcagtttcctctttcgcgaagccatcaagtacatcaaggaagtgcatcccggcccttgtctgatggaattgaatgtgaaccgtaacaacaaggcactgcagttttacgaacatatgggaatgcggaaactccgtgaaggggatttcccgataggaaacggatattacatgaatgactacatcatgggactggaaatctgagccccggcattaaaagccctccaaaaactaaaggctgcgcagttcattacgaacattgcgcagcctttagttttatctttcgtttccgattacttcgccaccttttcaagccatttcagcatgaacagcatggtgaacatggaaatgcagcacgctactacaaataccgtccacgtcatccagataggaatactttcgtaaaggatagcaccgataacgagcaactgattaccaatggcagtagcgccgagccaaccgccctgcatgataccctgatatttgggaggagccaccttggacacgaatgaaatgcccaacggagaaatgtacaattcggcaacagtcaatatcagataggtaaccatcagcaacagcggagtcaccttcaccggagaggtacccaaagcgattatatccttgtgcatcggcaagttgcttacataagaaccgatagccattataaggaagccggtggcagcaatacccataccgatggcaatcttccgcggagtggaaggctctttacccttggcacgctgtgctgcaaagacagccatgatgaccggtgtcagagatacaacgaaaatcgggttcaaagactggaacagctcagcggaaatagccatgccgaacaaattcaaatctgtatattccttggcaaaatacgtcagtgtcaacccattctgatggaacgagaaccagaagaaaattaccacaccgaatacggcaaacaatgcatacatgcgctgtcttacctcttgtgcgctcatctccactgcagtggcatcgcccgcttttgcagccaccttcttgctgggatcggggaatttctttctgttaatgacgaaaattaccaaagaaagaaccatagccaagatagctacaccgaatgcataatggaaaccggtggtaaacacgttcagatattcattggcaaataccgtcatatccgttacgggtgttccggaaatagtggctttcgttgccagtgcactataagtgtccacagcttcgggagtcagcgttcctgccagatgtccgtggcaaagggcaggcaggtcggcatcataattgtagccgaatgtggacagccaccagttacgtacgcctactgcggcaaacggagcaaagatggcacctacattgatgaacatatagaataaggagaaaccagaatcacgcatgctggaatattggggattgtcgtacatctgccctaccagcgcttgaagatttcccttgaaaagaccatttccgaaagcaatgacaaacaaggccgcacaagtaatcaccaaaaacaaggttttattggcaaccggtgtaggagacgggatggcaagcatcaagtagcctaccgccatcaagacaatgccggtaaagatggtacctttgtaattacgggttctgtcggcaataataccacctatcaatgcaagaatgtaaatagaaaaataaaatgttgagtagatcaaacctgcctcttttccatccagtccgaacttggcttgcagaaaaagtacaagaatggccatcatggtataaaagccgaaacgctcgcccaaattagcaaaggatgcggcaatcagacctttagggtgtttgttgaacataaaaattagtttttagaattagtaattggattgatttcttgaataattcctgcaaatatataaattctattgaatatttccttataaaattaaaatatctcggcagaaatagaaaatttattcattaaaaagaacacaaacttctgcacgcacttcttttaccaaatccttcgggtccagtttaagctgcaaaccacgttgtccggcactgatatagatatacggaaaccgtaggcacgtttcatggatataggtagggaaaggcttcttcatgccgatgggcgaacaacctccgcggatgtagcccgtcagaggtaaaagttccttaaccggaatgaggtcacacttcttgttgcccgatgcctttgccgccagtttcaaatccacttcgtgctcacccgggatgacgcagacaaagtagccggatttatcgccgtgaagaataagtgtcttgaacacgcagttgatgtcctcgcccaaactggcggctacatgtacggcgctcaaatcgttctcatccacctcgtagggaatgagttcataggctatcttggctttgtcgagcagccgcgctgcattcgtcttattaattttcaccataacaagttacaaaattagtaattatcccccagctcttcacgcaggaatttcggagtatagcctttctcgctcttcgccacctcttcgggtgttccgcaggagaggagttcccctccccccttgccaccttcgggacccatatcaatgatgtagtccgccatcttgatgacatcgagattatgctctatgacgatgacggtgtttcctttgtcaacaagtttgttcagtacattcatcagtacgcggatatcttcaaaatgaagtccggtggtaggttcgtcgaggatatagagtgtcttgcccgtatcacgcttagagagttccgtagccaactttacgcgctggctctcacctccggagagcgtggtggaggactgtcccagcttgatatagcccaatcccacttcctggataaccttaatcttattcaatatctggggcacattctcgaagaactccaccgcacggttgatggtcatatccagcacatcggcaatggacttgcctttaaagcgcacttccagcgtctcgcggttatagcgtttgccgtggcacacctcgcaaggcacatacacatctggcaggaaattcatctcaatacatttgtagccgttgccctggcaagcctcgcagcgtccgccactgacgttgaaggagaagcgtcccggcttgtacccgcgtatcttcgcttcgggcaggccgacaaacagattgcggatatccgagaacacacccgtataggtggcaggattggagcgcggcgtacgtcccaagggagactggtccacatttaccaccttgtctatatgctccaacccttcaatgctgtcatactccaaagggtcttgaagggagcggtagaacttctgcgaaagaataggctgcaacgtctcgttgataagcgtggacttgccactgccggaaacaccggtaacgcaaatcagcttgcccagcgggaactctacatccacattcttcagattattacccttggcgccacgcagccacagactgtgtccattgccctcgcgacgcttggcaggcacctcaatggcacactcaccattcaagtattgggaagtcagcgtatgcgtccggagcatttcacggggagtaccggcaaagacaacatcccctcccagcctaccggctttcggccccatatcaatgacataatcggcggcgagcatcatatccttgtcatgctccaccacaatgacggagttgccaatgtcacgcagttccttcaaagagtgtatcaagcgctggttgtcgcgttggtgcaggccgatactcggctcatccaatatatacagcacattcaccagctgtgaacctatctgcgtagccaggcggatacgctggctttcaccaccggaaaggctgacggaactacggttcagcgaaagataatccaaacctacatcgagcagaaatttgagccgtgtacggatttccttcaggatttcaccggcaatctgctgttgcttgctactgagatacgggtctacgtttaccagccagtcatacagctcattgatgtccatcgtagacaattcgtagatgttcttgtcgtgaatgcggaatgaaagcgcttccttattcaacttggcgccatgacattccgggcaaacggcagtcttggcaaactggtccgcccacttctgtgccgtggcagaagcatccttctcctgcagcatctggatatactttacaaccccctcaaacgtcacaaaataatcggaagaggtgcctatcagtgaactctttatcttgatacgctcgtccgagccgtagagaatctcgtcgatggcatcctccggcaagtctttgaccggtgttttcagcgtcgcttcatatttctccagcaaggcggtaatctgccagaaaatcatgctgttcttggctttccccaacggtgcgatggcacctccggcaatggagagctcacggtcgggaatcaccttgtcaatatcaatctggctgaccacccccaaccctttgcacttaggacatgccccttgcggcgaattgaaggaaaagttgtgcggcgccggttcccgataggacaaccccgtcacgggacacatcagccgtttgctgtaatggcgcacgctatccgtctgcgcatcgagtatcatcagcaatccgtcaccttgacgcatggcagtggccacgctgttcttcaggcgtgtgtcatccttgtccgtcaccaccagcttgtctatcaccacctccacatcgtggttcttatagcggtccagcttcatgccgggcaagacttcgcgtacctcaccgtccacacgtacgtagagatagcctttcttgcgcacctgctcgaagagctccttgtaatgccccttacggctgcgcaccagcggagcaaggatataaatgcgttttcctttgtaatccttcaggataaggtcgagtatctgttcctcggtatacttcaccatcttctcgccggagagataagaataagcttctcctgcacgggcatacaacaaacgaaggtaatcataaacctctgtcgttgtacccaccgtggaacgtggattcttattcgtggttttctgctcgatggagataaccgggctcagtcccgttatcttatccacgtccggacgttccagatttcccaggaaattacgggcataggctgaaaaggtctcgatatagcggcgctgcccttcggcaaaaatagtatcgaatgccaaagaggacttgccgcttccgctcaggcctgtaatcacagtcaggctgttacggggaatctcggcatcgatattcttgaggttgtgcacgcgcgcaccatatacattgatatattctgtttcttcttgcatgttgatttatcctatcgttttaactgcaaaaataactgtttccccccgaatatcagccgaaaagcgctatttttcagttttgaaatgcacaatattatttcttaacgcaatcctttggtttgaatgccacaatattcgtacctttgcagctactttgggaaattgtaaacataaaccaacgattactgaatgaaaacgattaaccgcattatctgctccctgctgcttgccagtgcatgcagtatcggtgcaatagcacaagagaatcaatcttattttctgcatactatcgaaaaaggacaaagtctctactccatcgccagcatgtacggcgtcagccagtcggacatcatcaaactgaaccccggcagtgacgagaaaatattcatcggacgcacattgcgtattccacgcagcgctgccaacatacaaaaagaaacataccataccatcgaaaccggtgagaccctctaccggctgaccgtgaaatacaatgtatctgccaaagccatctgtgacgccaacccgggactgagcgccgagaatttccgtatcggacaagtaatccgtatcccttccacaaccgagacccaaaccatggtcccggctgagacacaaagcagcactgtagttgccaacaacaatattctcggccccgtagagtcacgatgccgtgacatgcataaagtgaagcggaaagaaaccgtattcagcatcagccgtgaatacggcatcagcgaagccgaactgatagccgccaacccggaattaaaaggcgaaaacaaaataaagaagggaaccttcctctgcattccctatcccaaagcacagacggagcaaaatatccagtcgcaggcaatacctaccgacagcgagctgttccgtgaaaaccggaaaaagacagaacgcttcagcaccatcaaggctgccgtcatccttcccttcctggacggggtatcaaagagcgagtcttcccgtatggtggaatactacgaaggcctactgatggccgtagacagcttgaaacgtactggcacttccattgacttgtacacttacaattcaggtcccgaaagtgcctcgctgaactccatcctgggcaaaagcgagatgaaggacatggacatcatcttcgggcctctgtaccaacagcacatcaaaccgctggccgagtttgccaagaaacaagacacacgcctggtgataccattcacatcgaaagacaacacggtattccagaatccggcggtctatcagataaataccccccaatcctatctgtactccgaggtgtacgaccactttgtgcgccagttccccaatgccaacgtcatcttcattgaagccagccagggcaccaaggacaaggcagaattcatcaagggactgaaagacgaactgcgcaaccgttccatcccgatgaagagcctgaaagaggatgtcaccgtagaatccctgaaaacagtattacgcacggaccgtgagaatatctttatccccacatccggcagtaacctgacattgattaagatacttccccaattgaccttattggtgcgcgaacaacccgaaagccgtatccatctgttcggctatccggaatggcagacctacaccaaagaccacttggaagccttctttgaactggacacctatttctattcctctttttataccaacaatttgctgcctgccgccatcaactttaccaaaaactaccgcagatggtatggcaaggagatggacgagcgctatcccaaattcggaatgttgggcttcgataccggctatttcttcctgaaaggacttgcgcgctatggctcttccttcgagaagaacatgcagggactggacctggtgcccatccagaccggcttcaagttccaacgggtaaacaactggggaggcttcatcaacaagaaggtgttcttcgtgcacttcaccaagaactttgagctggtgaagttggactttgattagggattaatcatctgataatccactatataactattaattcgtagcttgtaactcgtaacttataacttatagcatgaacctgagaacaatcatcatattcgccctgctggtgtgtgcatgtatattgcccctgcatgcgcaggtgggcgagcaacgccacaacttcgctgtgggcgtcaatggaggcatcaatctgaatagcgtaagcttctctccctctgtcaagcagaagaatctgatgggcatcaacggtggtgtgacagcccgatacatttccgagaaatatttcagtatgatttgcggtgcacaaatcgagctgaacttctcacagcacggttgggacgagtattacgaggactatcccacactgagctacacccgcaccatgaactatgtggaaataccgttcctggcacatctggcattcggcaaggaccgcggtctgcaattcttcatccatgccggtccgcagataggtttcctgcttggcgacagcgaaaagatagacggcgactgggacggcactgtagcagaatcctacaccaacatcaccgtggaacagcacggcaaggccatagacaacaaattcgactacggcattgcaggcggagcaggcatagagctgcgcaccaaggcaggcaatttcatcgtagaaggaagatactactatgctttgtccgatttctatggcagcaccaagaaggactttttctcacgctccgcacacggagtcattacggccaagataacttatctcttcgacttgaagaagtaatgcttataggaaacacccgtttccacacgtagggacgacaatttcctctaatgagaacagtataatggaacgactgtaacctcaagcggaaacgataaaaaagcagaccacgtatttcattcggaatacgtggtctgctttttgttattatcaagtagataaaccttcttatcttcttaaacggtctgccgccttcaccatcacctcatctttgtagatggcacggaaggccagatagttgaggatgatggctaccaccggaaggcaaagcgcccatcccaactggaaagtcattgcatccaaatcacccttcaaaataaacataaatacacagaaggctatgtagtagcctatcagcagaatgctgctgaaaatcgtcatgcgtatttgcaacatacggttacggaaaaggaatatcgtacagaaggcaacaagtgcactgagcaacaatatcccgaacaagccccaagtagactgaaatcctccgtcgggcaaagccactcccagaggtttgaaaacatgcgctgtcactccgtccgctccgatgaactgtcctacaggcatgcaaattgccacaaccaacaggatagttaccaacaacaaataaacagattgaatacgttgtatcattactgtaatttttctttttccttagccgggttacgatagtaaatcttaccctccacatattcttgcgttgcaatcaatgtcggcttcggcagtttttcgtaatagcgggaaatctcaatctgttcccggttttcgaacacttcttccaaattatcattgtaagaggcaaactcagcaagctttttggaaaggtcattcttgatttccacactaatctggttggcacgctttccgataatcgctacgctttcgtatacattaccagtatcctcacacaactccatcatatcacgggtcaccgtagtagtaggagcatttgtctttctgtaatccataaatttatctattgattattatattattgctcttcacttccttctcccagcattttctgcgcttctttaaatattcggtcgacttccttcatatacttactttcggggaactcatttttaaaggcataacattcatccacagcttcgcggtaacgttctgcccttttgtcctccacactgtatacagccaactcatacttggcacgcaagataagaatggataaatcttcacgcaggttggtatagggataatccttcaaagcattctgcgcagtgataacgcaagcctgatagttgttacccagataattacccatattataataaagttttgcagacagatactccttcatcaccagcttgtcctgcaaggcaaatatcatgttctgcgcctcctctttcttggaactttgcgggaagtattccataaacatctgcaactgctggatggcgctatacgtgccggattggtccaaacgcggctccggagtatccagatacaaagctttaccggcgtggaaacgtgccagttctgtgaatgtaccgcggggataaacgttgtagtattgaatgaaagtctgcgcagcagtctgataatccttctggttatagtaactcatgcccagcatatagagggattcctctgccttatcagtacctttgagaatagcaatcaattcattgagcaaagtggcagcacggttatactgaccttttgcgaagtaattttttgccgcttcgtacttgtattcgtaatctgtgcttttcagcaatttgttgtattctccacacgaggagagcagcaatgctgcaagcagagttattaggatgttcttcttcattacttttgttcaaataatgcgcaaagataggggttcgcatcgaataaagcaacgatacgagccttaatttttcaaaaaccagacgaacgggcaggaaataaggattaatggttaggaattagggattagcggttagtgccatgcggaataatagcgcaaccaccaaccactaatcgctaatcactatttttacattttacagcttatacaaatcgcttgccgccagcaaatcaacctttttttctgtcaatacacggatgcagttatccatgtcgttgggacgaatgatgacattggccgtttcaccgttggcaaaggaatacatgtactcgatgaagacaccttcatcggagaggaaacggagcactttcgccaatgagccggggatattgggacaactgatgcctaccacatccgttacgttcacagcgaagtgattatttttcaaagccttatatgctttatccggttcggaaacaatgccacgaaggataccgaaatcggcattctctgcaatacatagagcagaaaggttgacaccttcttttgcaagaacttcagtcacctctgtgaggcggccggacttgttctccagaaaaatggaaagttgttttgctaccataggttcatttactatttgacaatttacaatttggcaattacaatttgcggttgtcgatgacgcgcttggctttgcctacgctgcgctcaatactgcgtggttctaccagacggacatctacaccgagaccgagtacgctctgcaggcgggctacgagcttcttcttcagagccagcatcttgttgatttcatcggaatagtattcgggacgaacctcaacctgcaactccatggtgtcggtattgttcttgcggtctaccagcaagaggtagtgaggctcgaactccggcatttcgaggataacggactctatctgcgtggggaacacgttgacaccacggataatcagcatgtcatcactacgtcccaagatgcggtccatacgaaccagtgtacgtccgcaggagcacttatcgtagtgcagggcggtgaggtccttggtacggtagcgcaacagcggcatcccctctttggtaaggtgagtgaacaccaattcgccggtttctccaggggcaaccggttcgagggtcttcgggtctacaatctcggggaagtaatggtcttcattgaggtgggtaccgtgctggcactcgcattcgtaacctacaccggggccggcaatctcactaagcccataaatatcaaatgccttgatacccagcttggtttcaatatcccgacgcatactttcggtccacggctcggcgccgaaggctcccactttcaacttaaactcttcacggggaagaccggagtctttgatggcatctgccagatagagggcgtatgagggcgtgcagcaaagtacggtagaaccgaaatcatgcatcagtgtaatctgcttctccgtattgccgctggacatcgggatgacggaagcgccgatattctcggcaccggcatgcgcacccagtccgccggtaaaaagtccgtaaccgtaggacacctggaaaatatccgagctaccggcaccataggcggtaaaggcccgtgaaaggcattcggaccatgctgaaaggtcttttcgggtatagcctaccacagtgggttttccggttgtgccggaagaggcatgaatacgcacaatctggctcataggtacggcacagaggccgaagggataattgtcccgcaagtcgtacttggtagtaaaaggcagttttacaatatcatctatactgtttatgtcatcgggagtaactcccagttcctgcattttcttacgataaaaaggagtgtcatgatacacacgctccacagtctttttgagacgaatgctctggattttacgaaggctttcgcgatccatgcattcgatgctttcattccaaatcatgttcttcgttgtattacaattattaatggttgttatcaatatagctgcaaagtaaacaaaaaaattttgtttatctcaaagattttaccgaatattgccgcttctaagaagagaaaatgaacaaattcgaactgacatccgcctaccaacctaccggtgaccagccggaagccatcgcacagctgaccgagggcgtgcatgagggacttcctgcacaaacattactcggtgtcaccgggtccggaaagacattcaccatagccaacgtcattgccaacatcaacaagccaacgctgatattgagccacaacaagacgctggctgcccagttgtacagcgagttcaagggattcttcccgaacaatgccgtagaatactatgtgtcctactacgactactatcagcccgaagcctacctgccatcatcggacacctatatagaaaaagacctcgccatcaacgacgagatagacaagttgcgccttgccgccacctccgccctgctttcgggcaggaaagatgtagtggtggtatcctccgtttcgtgcatatacggcatggggaatccggcagacttctacaacaacgtcatcgaagtacagcaaggcaagaatttcagtcgcaatgtcttcctgcgacgcctggtggacagtctttacgtacgcaacgacattgacctgaaccgcggcaatttccgcgtgaaaggcgatacggtggacatttatctggcttacgccgacaacttgctgcgcgtcaccttttggggagacgaggtagacagtattgaggaagtggaccctatgagcggcgttaccgtcgccaagttcgatgcctacaagatttatcccgccaacctcttcatgaccaccaaggaagccacgttgcgtgccatacacgaaatagaggatgaccttcacaagcaagtgcaatggtttgaaaacgaaggccgcccattcgaggccaaacgtttgcaggaacgggtgacctatgatatggaaatgatacgcgaattgggacattgctccggcattgagaattattctcgctactttgacgggcgtgctgccggtacccgcccctactgcctgctggacttcttccccgaagatttcctgatagtcattgacgaaagccacgtcagcgtcccgcagatacgtgccatgtacggaggtgaccgcgcccgcaagataaacctagtggagtacggattccgcctaccggctgccatggacaaccgcccgctgaaattcgatgaattcgaagagatggccaaacaagtgatttacgtcagcgccacaccggcagactatgagctgatgaaatccgaaggcatcgtagtagaacaagtcatccgcccgacgggactgttagaccccattattgaggtgcgtcccagccacaaccaaatagacgacctgatggaagaaatccaagtacgcatcgagaagaacgagcgtaccctcgtcaccaccctcaccaaacgaatggctgaagaactgacggaatatctgctgaacaacaacgtgaagtgtaattatatccacagcgacgtagacactttggaacgtgtgaagattatgggtgacttgcgcgagggcatttacgatgtacttgtcggtgtcaacctgctgcgtgaaggactcgacctgcctgaagtctctctcgttgccattctcgatgcagacaaggaaggtttccttcgttcccaccgctcactgacacagactgccggacgtgccgcccgtaacgtgaacggtatggtcatcatgtatgccgacaaaataacggacagcatgcaactgaccatcgacgagaccaaccgccgtcgcgagaagcagttgaagtacaacgaagagcacggcatcacaccacagcaaatcaagaaagccaagaacctcaatgtgtttgccaccaacgaggcttccggcgaagccgtcctcagcagcgagaagttcacttccagcactccccgcccctatgtggaacaagaaagtacatctacgatggctgccgaccctatagtacagtacatgagccgcaagcaactggaaaagagtatcgaacgtaccaagaagcttatgcaggaggctgccaagaaactcgattttatcgaagccgcacagtatcgggacgaggtgctgaagatggaggaattgctgaaagaaaaagacgagtaagggatttcacctctttttctcaaactatactcccctccttttgttattctatgaaacagagtattaattcataaagacaaaagcgagatgaataaaccaataaagacaatagctgttgcactggctgccatagcctccatgagtgtgcaacaaacagaagcgtgtacccgagccacctacatcggtcctgacaatacagtcattacaggacgtacgatggactggaaagaagaccttatgagtaacatctatgtattcccacgaggcatgcaaagggcaggctacaacaaagggaatgcagtgaactggacttccaagtacggtagcgtcattgccgccggttatgacataggtacctgcgacggtatgaacgagaaaggtctggttgccagcctgctcttccttccggagtccgtttaccaccgcccgggagacaaccgcccgattatgggcatcagtatctggacgcaatacgtactcgacaattttgcaaccgtacgcgaagctgtggatgaactgaaaaaagaatccttccgcattgatgcaccagacctgcccaacggagccgcttccaccctgcatctggccatcacagatgaaactggaaacacggctgtcctggaatacatagacggaaaccttgagatacatgaaggcaagcagtatcaagtaatgaccaactctcccaaatatgaactccagctggctatcaacgactattggaaagaggtaggcggactgaatatgttgccgggaaccaaccgctccagtgaccgctttgtacgcgcatcgttctacatcaatgccattccgcaaacagcggatgcaaagattgctgtacccagtgtattgagcgtaatgcgcaatgtttctgtaccgttcggtatcaccacaccggacaagccccatatctcctccacccgttggcgttctgtatccgaccagaagaacaaagtatattattttgagtccacactgacccctaacttgttctggctcgacctgaagaaaatcgattttagcccgaatgcaggaatcaagaaactctcactgacaaacggagaaatctatgccggagatgccataaaggatttgaaagacagcaaaggatttgtatttcttttccagacgccggtaatgtagcacagcccctacacatagcccctcaataatggatgcttcccacttctttctataagagaaagcagggaagcatttatttttctcattatttttgtgtacgtttgcagatacatactcaatgcagcaatttacatggaattattagtatacaaagcctctgccggctcaggcaagacctttacgctggctgtggaatacatcaagcatttgataatcaatccacgcgcctaccggcagatacttgccgtaaccttcaccaacaaggctacggcagagatgaaggagcgcatactgacacagctttacggtatctggaagggagcaccttcttccgaagcatacttggagagaattaaaaattataaattaaaaattaaagaagaaggcggggacagattgacggacggggagattcgtcaacgggccggcatggcactgcaatacatgctgcatgactacagccgtttccgcgtggaaaccatcgactccttttttcaatctgtgatgcgcaaccttgcccgcgaactggaactgagtcctaacctgaacatagagctgaacaacagtgaagtgctgagtgatgccgtagacagcctcatcgagaagcttacccccacttctcccgtgctggcatggctcctggactacatcgacgagcgcatccgcgacgacaaacgctggaacgtatcgaatgaggtgaaaagtttcggacgaaacatcttcgatgaaagctacatagaacgcggcgaaaaactacggcaatgccttcgtactccgaacacgttgaaactctaccgggatgtgctgcgcgatatggaaaccgaggctctggaacagatgaaaagtttctacgaccagtttgaaggcgaactggaagggcatgccctcactcccgaagacttgaaaggaggtgcccgaggcatcggcagttacttccgcaaactgcgcgacggcagactgtctgacaaggatgtgctgaacgccaccctgcaaaacagcttggcagatgcaaaaaactgggcaacgaaaacatcctcacggaaggacgacatcatctgtctggcagaaaccagcctgatgcctctactgcaggaagccgaaagaatgcgtccgcaacgcaaccgtaccttgaacagttgccgcctctcgctccagcacctcaacaaactgcaacttctcaatcatatcgacgaagaggtacgcacgctaaaccgggagcacaaccgctttctgctctcggataccaacgccctactgcacaaactggtgcgcgagggtgactcttcgttcgtcttcgagaaaatcggcgccaacatacgcaacgtcatgattgacgagttccaggacaccagccgcatgcaatgggacaacttccgcctgctgctgctcgaaggactttcgcaaggagccgacagtctgattgtgggagatgtgaagcagtccatctaccgctggcggaacggggactggggaatactgaatagtttaggcaatgaagaattgaaaatggagaatagagaatcaagttctccattaaacaacttccccgtccgtgtggaaaccctaaaaacaaaccgacgtagcgaaactaacattatccgtttcaacaaccaagtatttaccgctgccatagactacctcaatgcgctacacctgaacgaactgaaagaggactgcctacccctaaaacgcgcttatgccgacgtagtgcaggaatcgcccaagaacacggagtacggctacgtaaaagctgccttccttgaaccggacgatgaacacaactatacagagcagacccttctcgccttaggagaagaagtacagcggctactggaagagggcgtaacactgaatgacatcaccatccttgtccgcaagaacaagaatatcccaccgatagccgactatttcgacaaagaactgcatctctctgtcgtgtccgacgaagctttccgtctggatgcctcccttgccatctgcatgctgatggatgccctgcgctgcctatcgaatccggagaacaggattgcggaggctgcactgatggagaattacaaattacaaatgacaaatgacgagcaaccgaaattcacaacagccactccccttcccgaagcctttacctcccgacgggaaacgctgcgcctgatgcctttgtatgagttactggaagaactgttcagcatcttcggcatgagccgcattgaaaagcaggatgcctacctcttctccttcttcgatgctgtgacggagtatctgcaaagcaattcttccgaactggacagcttcatccgctactgggacgaaaccctttgcagcaaaaccatccccagcggtgagatggacggcatacgcatcttctccatccacaagtccaaaggactggaattccataccgtactgattcccttctgcgactggaagctggagaacgaaaccaacaaccagctggtgtggtgcgtcccaccggaagagccttataatgccatcagcttagtgccggtgaactattccaccaccatggcggaatccatataccagcaggactatctgcacgaacgtcttcagctgtgggtggacaatctgaatctgctgtacgtggcctttacccgtgccggcaagaacctcatcctctggagccggaaggaacagaagggaaccatgtccgaactccttgccaacaccctgccccgcatagccaaagacggagcaggcagttgggacgaagaggctgccatatacgagaacggcaggatttgtccctcctccgtccccgtctcacagcatgacgcagacaaccctgctgatgacgaagccaaacctctatgctgcgaacgtaaacctctatactgcgaacgtaaacctgaggtttatgaacagcaaccggtcaacagactttcgcaaaagccggtcaaactgcccgtccacatggagagtatgctccacgacatcgagttccggcaatccaaccgttcggcagacttcatagcaggagtagacgaagcagagtccagctggcgtttcatcaaccggggacgtttgctgcataccctattctccgctatcgaaaccgaagaagacattgacaatgccatcagccagctcgtctttgaaggtgtgattggacggagtgagacggaagaagaaatacgcaatctcacccaacgcgctttctccctgcctcaagtcaaggactggtattcaggaacgtggcagctattcaatgaatgcgacatcatctggcaggaaaacggtgaactgcggacacgccgcccggaccgcgtgatgatgcgtggcgaagaaatcgtagtggtggacttcaagttcggaaagccaaacaagaagtacaacaagcaggtgcagggatacatgcaactgctggtccgcatggggtatgtcgcagaaaatatacggggttacttgtggtatgtagaggagaacaacatagaaccggtataactcactccccatccactattaattatcaattatcaactaaatcatggaaacattcctccaactggtcgcccgcgacctttacgccaaaataggaaacgacctctcgcgcaccgccatcgttttccccaacaaacgtgccagtctgttcttcaacgaatatctggcagctgaaacggaccgccctttgtggtcgcctgcctacgtcagcatcagcgaactgttccggcaactctctccattgaagtccggtgaccctatccgcctggtatgcgaactgtataaggtgttccgcgaagagacccgcagcgaagaaactctggatgacttctacttctggggagaactgctcatcagcgatttcgatgacgtagacaaaaaccttgtagatgccgacaaactcttcagcaacctgcaagaactgaagaacattatggacaattacgacttcctcgaccaagaacaagaagaagccatccgccagttcttccagaacttttccatagaaaagcgcacggagctgaaagccaaattcatctccctctgggataaactgggcgacatctaccgccactaccgccgcaatcttacagaactgggcatcgcctacgaaggcatgatgtaccgcaatgtcatggagcaactcgacaccgaccgactgcgctacgaccgctatgtatttgtcggcttcaacgtgctgaatagagtagaaacccgtttcttccagctcttgcaggatgccggaaaagcaatgttctattgggattacgacgtgttctacacccgtcttccccttgagcaaaagccgccctatacccacgaagcaggcgaattcatcctccgcaacctaaagctgtttcccaaccaactgcccgaaacttcttttgatgtactgcggaaacccaagaacgtacgctttatctccgcttctaccgaaaatgcacaagcccgctacttgccgcaatggattagggggaatgaagaattaagaaccccttcttcattcaaagacactgccgttgtcctttgcaacgaatccctactgcttcccgtcctccactccattccggcagaggtaaagaacgtcaacatcacaatgggatttccccttgcccaaactccggtgtacagttttatcaacgcccttgtagagctacagactaccggctaccatgcaggtaccggacgatacatctacgaaaccgtaatcacgctgctgaaacacccttacacccggcaactttcccccaatgccgaaacactggaaaaacagcttacccgggacaaccgcttctatccccttccctcggagctgaagcaggacgcattccttgaacaagtctttacaccacagaacggcatcgccgccctatgcagctacctcaccgaactgcttcgcgaagtggccgtcctctaccgccaggaaaaagacgtggaagacatcttcaaccagctgtaccgcgagtctctgttcaaaagctacaccctcgtcaaccgcctgctcagcctgatagagaccggcgaattgagtggtgtgcgcacagacacgctgaagcgactgctgaaccgcttgcttacctctgccaacattcccttccacggagaacccgccatcggcatgcaagtaatgggggtgctggaaacgcgtaacctcgatttccgtaacctcatcatgctctccctcaacgaagggcaattgcccaaagccggaggcgactcctccttcattccctacaacctgaggaaggccttcggcatgaccaccatagaacacaagaatgccgtctatgcctactacttctaccgcctcatccaacgggcagaaaacgtcaccttattatataacacctcttcggacggactgaaccgcggggaaatgtcccgcttcatgctgcaattcctggtagagtcgccgcacaacatctcccttgagtaccttgaagccggacaatctccacagcaagcccgggaaattgagattcacaagacaccggagatgttgcaacagatgttcgacgcctacaacatccaccaacgtcccaaagcgttcttctccccctctgccctcaatgcctatctggactgccgcctgaaattctactaccgatacgtagccggcctgaaagctcccgatgaagtaagcgccgagatagactccgccctcttcggcaccatcttccaccgttccgccgaactggtgtacaacgaactgacagccaacggacgggagatacgtaaagacgacctggaacaattactgaaagacgatgttcgcctgcaagcctatgtggacaatgctttcaaagaaaagttcttccatgtgccccttacggagcaaccggagtataacggtacgcagctcatccattccaaagtcatcgcctcttacctgcgccagctcctgcgcaatgacctgcaatacgccccgttccgtatggagggcatggaacaggacgtcagagaaatgatggaaatagatactccgcaaggaaagcttgccttacagataggcggtaccatcgaccgcctggacagcaaaggagacacgctacgtatcgtggactacaagacaggcggtactcccaagactcccgaaaatatagaacaactgtttactcccgccgacaaccgtcccaactatattttccagacgtttctgtacgccgccatcctctgccgcaagcaatcgctgaaggtagccccttccctgctctacatccaccgggcagcttccgaaagctactccccggtcatcgaaatgggagcgccacgacaacccaaggtaccggtcaacaacttcgctttcttcgaagacgagtttcgcgaacggctgcacggactcctgcaggagatattcagccaagaagaaacattcagccaaacagaggatacccggaaatgtgaatattgcgatttccgcagtctgtgtaagagataaaaaacagaccatccgttcataagaaacagatggtctgtacgaccgtaacagacggtctatttgagtctgacggatggtctgttttacttcaacggaccatccgttctattttcttcgttatcacttcttcaccggaatagagaagctgaatatggagccttcgccttccttggaagtaaaccacagtttaccgccattcttcacgacaaaatccttgcatagcaacaagcccagtcccgagccttcttcgttgttcgtgccgaacgtgctgaaatgcgtatcagtatgcaacaacttcttctgcccctcctcgctgatgccacagccataatcctggacgctgacaactgccataccatctacttcctccatcttcaccagtacctctgagttctccttactgaacttaatggcattactcaacaagttacggaccactgtcttcagcatgtcaatatcagcgttgaccatcattttttccggtttcatctcgcggattcttatcttcttcaggcttgccaccatactgaaaatctcaatgacaccgtctgtcacttcgacgaggtccacatcctgataaaccacgttcaacttaccgatttgactctttgtccatttcagcaggttatccagcaatgaaaacacatcctccgtagtctgattagccatcgtcagaagctcgtacatttcggcgccaattttctcagatggcaagttcaatatcagcatattcagcaccattttgatggatcccatcggagaacgtaagtcatgggcaatcaccgaataaagcttgtcacgcccggcaatagtacgttgcagttcttccgtcttactcaaaatcaaccgtttggcagctaccaaagatatttggtgggtaacacggataatcaattcctccttattgaaaggcttagagatgaagtcattcgcgccaacctgaaaccccttcacaatatctgccgtactattcagtgcggtcagaaagatgattggaatatcagctgtattcggatttgactttaaatgttgagctacttcaaaaccactcatgtccggcatcattacgtcaagcaaaaccaaatcaggattttccttttccacctgttccaacgcttgccgcccgttacttgcagtagcaatcgcgaatttctcatttgtcaaaagcactttcaacaataaaacgtttgacatcacatcgtcaacgatgagaatcttgtattcggaaggatttatttccatgttcatctttctatattgtttttcccgttatcaaaattactatttagttaggaacgatattccttaaaatactctattatatactgtaaaccctcttccagctctatagtcggttcccagcccaacttttcctttgccagagtgatgtccggctgacgctgtttgggatcatcatgaggcagtggcttgaaaatcagtttcgacttggaattcgtcagcctaatgaccttttccgccagttccaatatggagaattcattcggatttcccaagtttaccggaccgataaaatcgtcctccgtgttcatcatccgcaccataccttctatacagtcatctacatattggaaacttcgcgtctgattacccgaaccgtatattgtaatatcctggttctgcaatgcttgaaccacgaaattggaaaccacccgtccgtcattcggcaacatccgaggaccgtacgtattgaatatacggataatcttgatccgcactccattctggcggtgatagtccataaacaatgtctcggcacaacgcttcccttcatcataacaagaacggaggccaattggatttacatttccccaataactttccacttggggatgaataacggggtcaccgtacacttcgctggtagaagcctgcaatatcttggcattcgtctttttggccagccccagcatattgatggcgcccaatacagaagtcttgatggttttaatggcatcatattggtagtggatgggagaagcaggacaagccagattatagatttcgtccacatctgcctcataaggggtttccacatcatgcagtacaaattcaaagcggggattgctcttcagatgagtgatatttccttccgaaccggtgaaaagattatccagacaaatcacctgatgcccgtcgtttatcaatcgggtacaaagatgagaacctataaaaccagcaccgccactaaccaaaattttcttcatgtaatgttttttatagtgccttaaagcacataggacctattctgtttgttttgatgctgacaaatgtaggcgatttgactaaattatgcaagtttgcaacgaaatatttcacttgttaatgaatataaagaggcagattaaaaaatccacccctgaaatattcatttatttatccgccacatactcttctttcttatccggaatgctgaagttcttgttcgcaaacaagtctgccagacccgaaatttgctttaaacgcaacacttcgtcgcgatccattccgatattcttcattatccattcatcagacataccggctctgtccaattccgcaacaatatggcacatcaactcgatattatgcgtaccacgggcacgattatgacggatagtggacgccatacggttggaaagttccttgtcaatcacgaccacgggaagcaacccgttttcgcgctgataaattcttttggatgtcttcaacacctgataacggtggtaaccgtccaccaggatgtagttatcctcttcctcatcatagtaacagacacaaggcatggtgaaaccatcttcccagatggaaagctccagaagcttcatttcgggcggtgccactacattcggattgtaatcgtttgcttgtattttctctattggaattgcccttacgttatataccggacttttatctacgctcataacatcatatttttgaattgttccattatcttgtctcttttgtatgcctcttccttgttcaaggcaaaacccatgtacttgcaggcatggtcattcttcaggatgcatatgcacatccgcttataagtgggaatttcccggaattccgcgatgtcaatatcatccagataatccatgcgcaccggcttcttgtttgtcttgtaattcgtggtatttatcacttcaatggacactcctgcatccctcagcttctggatggtctcgtcagccagacaccccccttttgtacgccagaattcaatgctgacagtaagctttttcaagtagttcctccgggtctcttccggcaaggtggaaagcaggaactgcataaagcctttccacgtatacccttcgggcagtcggaccgtctgccaccccatagcacgcgtccctccgtaaataccggtaaagttcaccccgttgacccgccctatcattcttccccaagtattcgggtcgatgacacgatacagcttcaggctctcttgtgcctcacaaagaaaagggcttgccacacgctggcgttcgatattgactccggctttataatataggtcatacaaatggttatagtcaaagccgaatttgccattggccgtccagatatccgtcgtcttccaatcataaatgggataagcattgaaaatgtcattgcctatcttcgaggtccagcggtaattgtggtacatctgatacttccggttcagatggatgctgcgccagcggttaaaactctcttgcgtacggatgcctatgagaaagcaggcacgcactccatccttcttctcatgcagccatttggcaaagtgcatctggaactcataatcccacatttcgggagtgtagaaaggaaacgtctctttagtgaggcagcctttcggcatcttccttacccaaatgtcctccaaatcctcctgccacggacgccagtaactctggtacatcgacgtacaagtcgttacacggaaaggcacacaaacacgatacacctccaatatatccttattcgcctccaatacccggtccacataatcaatggtcatgctgtactgtatctcatagtccatatggaatacacacagtttacggttcagccggttccggcggatatagtctatgcacaaattcagcaacactccactatcttttcctcccgaaaaagagacgcatatcgtgtcaaattccctaaaaatcacatcaagacgttcttgcgccagttcatacacatttttgggtgtagccataattatctgtttttcttcattttcacataacgggtccataccttgtcttccaaaaagcccagctcgctgaagacatccctatcttcaacaaagctaacagccgtcagactactctcctcgccctgcttctcaagtaccttttccagaagcaattttagcgtgtcaacattcctttccttaatataatagttgttgatgacacattcatacttcttgtgctccaccggcacaaaacctacaacatgtttattatccagagcaacaaaccactcgtactcttccgatgtccggaaagggtaattgtagttctgtttcagcacttccgggctcataaccaaaggggctacaagctcgtacagctttttatccgtaccatgtaattgcactatctgtatcatatctacatttatattatttgtaattacgtgttaaagataaagcttatttacgacggaatattctccttttaaatagatttaagaatatagccctgtaatataaaatattaataaataaatattatccccctaatttgtatatgttgattaatttgggtttctttgcaaaagaaagtcacccgaagagaaataatgaaatatttactgctttttatgacctttgccaagataggaatgttcactatcggtggcggatacgctatgatacctctcattgaacgggaaatcgtaaaaaagagatggatgagtaaagaagatttcatggaaatgtttgcgttgacccagtcacttcccggtgtttttgctgtcaatatatccatattcgtcggctacaagctgcataaagtaaaaggtagcctggtgtgtgcacttgccacaatcctcccctcttttgtcatcatgatgctgatagccatgttcttcgctcattttcaggacaaccaggtgatgatacgcatctttaacggtatccgtccggcagtagtcgcactgattgtgataccctgcatttcggctgcacgggcactgaagctgaagtattggcaactggtgcttccagccatcgccaccatactcatctggcaattcgggctatcccccgtatacattgtccttgcaggaattgcaggaggaatgctctatacattatggttaaaagataaactgagaaaattacagatatgatttattggcagctgatattggtatatctaaaaatcggaatgttcggtttcggaggcggttacgccatgttgtccctcatccaatatgaggtggtggaccaccatcactggctcaccctgcaacaattcacggacgtagtggccatctcgcagatgacgcctggtccgataggcatcaacagtgccacctatgtgggctatgcagttactcaaagcgtgtggggagctgtcgtgaccaccattgcagtatgtcttccctcgttcatcctggtattgctcatctcttacttcttcgtgaaatgcaaggacaacaaatacatcaaggcggcaatgtcgggactgctgcccatgtccgtatcattgatagctgctgctgccctattgctgatgaacaaggaaaatttcatagattacaaaagcatacttatctttgcagccgctttcggcgtgacgtggaagtggaacctccaccctatcttactgataatccttgccggagtcgcaggcttccttctatattgaagaagcggtagagacggacaccatcttgcgggcatatgcccacaccacgcaataggcaaccagcggtacgatgaacgcccacaccatcgtcgtatggtctgccaccagtcccatcaacagcggacctaccacgcctcccacgggagacatcatcaggaaagaggaagccctcttggtatggttgcccagcccgcgcaaggaaagtgcaaaaatcgtgggaaacataatagcctcaaatgcatatccgcacaacagagctgcaagcgacaccattcctacatccagcaacaccaacaaggtagtcatcacagtgcccgtagcacaaaccagcaacatcttctcggcacgcacacgtcccataatccagctaccggcaaaacgtcctaacataaataatcccagtccaccgaaagaaagcactacggaagcttcgcgggcattcatccaattctgctccaccacgtagttgatgaagaagctgttgatggaaatctcgccgacctcataggcaaacaaggctatcagcccgaaaatgaaaagccggtgtgaccacaatccgaccttattaccagcttcgtccacctccacactatgttcaatctcgggcaacttgattcttgaaaagaccaacgctaccagcaacacaattacccccatgcagatatagggcaatgcgacattacccgagcccgtctgcccatccttcgagaagagcagcagtccagccagtactggtgcacagatacatcccagaccgttgaaggattgcgcgaaattcagccggctggcagcagtttcctttgcgcccaattctgtggcataaggattggcggcagtttcaagaaacgtcagtccacagcctatcacgaacaatgcaaacaagaaaagattaaaagacagataatgctgcccggggataaagagcagcgaaccgacgccgtaaagcaacagaccgaataccacaccccggcggtatccgaagcgactgatgaaaaatcctgcaggaatggccataatgaagtatcccatatacatcgtcatctgtataaaggccgaatgtgtcttcgtgatatccagtatctcttgaaagtgcttgttcagtacattcagaatggcatgggcaaatccccacaaaaagaaaagagaggtaatcaaaatgaagggcacaaggtattgtctgcccaccaatggtattcgtttctgtttcataatatgataattccagacaatcgttgcaaggcgattgataattgcgggtgcaaagataaacaaaactcccggtctttacccaacattttcctattcgctattgtacggagcagctttttctctaactttactgccatcatacaatgttaagccatgaaaaatgccatcccacgatacaatttctacaaaactaagtacggaagcgaacttctgatagatgtcgttgatttgcagtatacccggaaattcttgacccagggaaaagtacatattctgacctactatgacatcaccttcatcacagaaggagaaggagaattcactatcggtaaccggacacacttggcagctcccggtgatgtattcttctccaaaccaggtgaggtgcgcagttgggacacagaccgtatcggcaacggtcatgctctaatttttgaggatacctttttgacctctttcttcaaagacccactattcgtgcagcacctcccgttcttccgaatgggaaaaatggtagacaaactccaactgccgaacgggctctatgtacgaatactccaacttctgcacgacataaaggtcgaaatcgactctttccacccacacgatacgggcatattacgcgccttactttacgaagtcctcatgctactcaaccgtgcctaccgcacctctatccctccggagacgggtaaggagccacataaagatatcagcagcttccacctcagccgattcttcgaattggttggggagcacttccgggagcagcattctgtacaattctatgccgataaactatgcatcactcccaactatctgaacgaaatcctctcttcggccataaacatcaacgccaagcagtacatactcaacaaggttacagacgaagcccagcgtctgctcacctacaccgacctccccatttcagaaatagcctccgaactccatttctcaaccgtctcctactttgtacgtagtttccgacaatgtatagggtatactcccctcgcctaccggaaaatggagaaaccgtgaaaagtgacatatcctccttcttttttattgtacaaaagttccacttaccggctatctttgcccttgaaacaataacccataaaaaaaacaaacaatgagagatgcagaaaaaacagtaggaaacatgattgacaaggaaaaaaccatctttgtcggttcggtggatgccgaaggctttcccaacatcaaggccatgttgcaaacccgcaaaagggaagggctcaaacacatttacctatcaacgaacacctcgtcgatgcgcgtttcgcaatttctcaaaaataaccgggcatgcctttacgtctgcaacacacgcttcttcaagggcgtaatgctgcgcggcacgatggagatactgacggacagcaccagtaaggaaatgatatggcaggaaggcgacactatgtactatcccgaaggagtgactgatcccgattattgtgtcctgaagttcaccgccttctccggtaagtattacagcggatttaaatcagaagacttcacgatagaataaacgggccatccgttccagtccatcagcaagcagagcccggggacaagcgatattcagccggataaagccctctccaccgggaccgtacatcgtaccggaattgaccatcagatgctgttgttcttgcaaacgcaaggcgacaacatctgagctgataccggaagcacggcagtctatccaaaccaaataagttccttcgagtggcagcacgggatattgtggtaaccgttccttgaaaaagcagcagaggtattcgtaattcccccgcagatatttccgcaaggcatcaagccattccccaccttcgttgtaagctgccattgtggcgattacgccgaacggattgacgtcgcatacctcgttgatgttaatggctctgtcaatacggcggcgcacctcttcatcggctgcgatgatattggcgatttgcaacccggcaaggttgaacgccttactcggcgaaacgcaagtgacggaattttgcaaaaagcgttcggacaaggaggcaaagggtgtgtagtcatatccttcgtaagtcagttcacaatgaatctcatccgccacgacaaacacctcattccgtaaacaaatatcacctatatgctgcagttcttccggagtccagacccgtccgaccggattgtgaggattgcacagcagcaggatttttgctttcggatcggaagctttcctttcaagatcggcaaagtcgattacgtagcggccatcctgataaacgagattattggcaaacaactcgcatccgtcattacggatagatgagtagaaacaattataggcaggagtctgaacgatgactttatcacccggcatggccaaggctttgataatggctgacagagccggcacgacaccactcgtatagataatccaccgggaatcaacctgccagcgatgccggtcatcgaaccaccggacgaccgcatcataataggcttcgggtacttttgtataaccgaaaataccgtgcgccacccgcttttgtaaggcatcgataatagcgggtgctgtacggaaatccatatctgccacccacatgggcagtacattctcctcttcgggagtatcccatttataagaattcgtcccgcgacgcgggatgattgtatcgaaatcgtatttcataatttatctttttattcgcaacttataaatccagttaccactccaaagcctgacaagaaaaatcgctccccggaaacaaagctcaatacacatggcaagccatacgccccgtagccccatcgtaggggcaagccatgctgccagtgtcagccggacaccccagatactgccaaaattcatcagactgggaacaaatgtattgcccgcacccacaaatacaccgtaggcgacgatagatgccgcaaacatcggctccgcaaaagcttctatccgcagaatcccgattcccaacatgcggatttcctccacaggcgtcatcactccgatgatctgaggggccgccacatacatcagcactcccatgactcccataatcagcatccctgaccaaacggtaatgttggcaaaacgcttgagtaaccggatacggtttgctccaagactctggcctaccaacgtcgtggcagcctccgatataccgtagccgggcatataacaaaggctttcagcgatgatggcaaatgagttggcggcaatggcgacgatgccgagcggtgcgacgataaccgtcgtcataatctgcgctccgcaaatggcaatatgctcgaatcccattggcagggagatgcggacagcctggcgcagcgtctctttccggggaagaaaactgccctgccccccggatagtctcaacatggacgagcgacggcaaagataccacatcatcccaccggcagtgataagttcggccaacacggttcccaataccgcaccttccacacctaaacctacgccgggaacgatgaactcccatccccaccagtctacctgccgtgtcgggaaaataaggaagaagttgaacacgacatcccaaaaacacatcagtacatttagcatactgggtacacgcatattcccactacaccgcaacatgccgcccgcaaggaaattcaactgcaaggcgggtaagaaaagtgaaaatatccggaaatagaaggatgaatcgctccgtatcatttcatcaccacccagccagccgggaagcacaccactgatagaaatgccgacaaccgccaacaaagaactgaaaacaagtgtagccgtaaccgattggcggagtatttttttcgctcctgcaaaatctccggccccaatccggtgtgccacttggacagaaaatcccgttgcagcggcggcacacaatccccagaacagccatgtcgtggttgaaaccaatccgatggaagccgctgcattcgcacccaggctaccaaccatcgaagcatcgatatactgcatggcgatggaggacacctgcgccataatagcagggacactgaggtatgcagtcaggcgtaactgctgccccagcgtcatactcttcccttcgcggataagcgacaacaagtaatcggtctttcccttttttattcccatcaggctatttgcaaaggcatcagtcggtgaaacaagttttctcgtcccaaagcttcaactcacagtcggcaggtgcctttatattttcatcgagaatgatttccccatagctttcggcagtgatactgcctgtccgtggattcttcaccccacctatcgcccccttgatggttgcctgcaccgaactgtattcgaaagcccggtcgcagtcgggaccaaaggtacaattctccaatacgaggtcgtgggcatagcagagcggttgctcaccggttatatggcagttcaccaaccggagattgtgcgaatgccagccgagatattcgccattgagttcggaatcgtagattgtcacattctccacctcccagaaagcatcctttgtagtgactttggcattgcgcaactctacattcttcacatactggaaaacgtatttgctgtcgctctccaatccgtctatgcggatgtcgctactgaacatgaacggataagttcctccatgcaacttcagatttctgatgttcagattctggcaacgccagaatacttcatcggcatcgttcatctctacattctcaatttcgatgtcgtgcatctcgcggaacattttgggtgcgtcgatacgcgtatcggtcattttcagatggtcggaataccacagtgccgaacgcccgccgacatcgaaaaaacaacggtcgattacaaacccgtgaacatgccagaaggggtaattcccttcgaatcgacaattgacagcttcgatgttgctgcattccttgatggctgattctccggcatggataattacattctccaaacgtaagtcatgtgattcaaacaaaggtctttctccaccgaatgctgtatttgatattattctcatcttgttttcaatgttataattattactctattctctttatcaatttcgcggggacaccgcctactattgtattcgcttccacatctttcgtcacaaccgctccagctcccaccacagcattgtcaccgattgtcattcctggaagaatcgtcgcattagaacctacccagacattcctacccaatacaatcggtgccggataggtagtttggcgttcttccggaggcaaaccatgattgagcgttgcaaagactacattatgcccgatttggcatccgtcaccgattatcacaccaccatggtcctgaaaatgacagcaggcattaataaatacgccttcgcccactgtaatattcttcccgaaatcggtatagaacggtgggaatacccggaacgatgacgggacttgataaccgaacaattcggagagtaacccacgtacctcgtccggtgtatgatatgccgtgttcagccggaaagtgatgcgtctggcttcattgctcattttgtccataaagcgatgtatctcctccgtatcaagcgcttgacgcgtctttacatattccttgaattcgttcgtagtcatagtgcccttattaatccattcttatcttctttcaaatctcacaagtatatctccgggcacactcaacatttcaatgccattgccatcaacacgaccgattttaatcaaagtatcactataagacccattcttacaaaaaattgccacatttccccatggggcatagatggttatatcaccggcaataggagcacagccacgcgtaacaccttcaattgccagagccggagagggatagaagattttttctgtagtattattgtaatcattcaacgtaacctccaatggcagacgagcaagaaaatcctgtgtggcggcattgtcctccatagtggcagtaatggtacgattgctaaccatgatatttacctgcaatgaagatacatccggaacttcggattcattctcatcttccccacccgatggtccggaaagttcaggatgttcgggtgtaaacggttcatcacctgaatcttcgcaggctgccattgccagaacggtcatcagcatcatagaaattaatagtaattttttcatattcatctttctgttgattttataattatctttaggattattaatgatgatgcaaaaataggcagtatccgtcatatgccgtgtagacaaatccccggtatctatacccaaattacggattatgcttttcctccggctactaaatcatggtcctataaagcaaaaactcccgcaatcgtttaaattacaggagtttggatggtattacttaagtttatcgtattcttcatccgtcaccggttccagccactcattagaagtatcctcaccgggaacttcgaaagcaagatgggcaaaccaaccatcagaagcggcaccgtgccaatgcttcacatttgcagggatatggataaccgtaccgggtagaatctctactgcctgcttgccttcttcttgataccatccacgaccggcaacaccgataagcatctgcccaccgcctttagtagcgcggtgtatgtgccagttattgcgacaacgaggctcgaaagtgacgttagagatggaaacctgctcgcgtgaaacgggagcaagataactgttgcctatgaagtactgtgcatatgcagtgttcggttccccaatggggaaaatcatttcacgctggaatgcggctttggcatcttcaccggcagtgtcctctgcccatacacctttggccagattaaacgctgcccacgctttgggccaaccggcataaaaaccgatatgggtgatgatttcggcaatctccgtacgggtaataccgttcttctttgccgactgaaggtggaacacgagcgaattatccgtgataccctgactgataagagaggtaatggttactaaactacggtcacgcagaccgagtttgtcggtgcggctccagacctcgccaaagaggacatcgtcgtttagttccgcaaatttaggagcaaactcacccaactgggtgcgtcctgctgtctgtactatcttttcttgtgccataacattgagtgttaaaatgctgaatactgaaattaaaaaaatcttgttcatagtcgttctatttattgcatgaagttattgagcttgttagccggattaagtggcgtctggtcagacaagaccaatgatttgaccatgtgcaacgttccttgcttgtatttctgaaagtgttctgatgcaatatgtttttcataagccgcatggctcgcataggtttcgagaatagtcaccttgcagggattctccttctcgccgaccgcatacatagtcagcacgcccgattcggtacgcagagagatttcgcctacttcggttgcgtatttcatatactcgtcgagatactgcggataaacctcgattttcgacaaccgcacgataccgtcagcactcatcggctctttggcgcacatacccggccgcttatccagattcaggcatttgccgataatctctcccgtggcaaggtaggaataggtcggaaattcaaacaatacgggtttcagcttcgtatagtcaagtttcccgttattatcaagcacttcaggagcagcgtatgtattgactatcgcacaaatgaaattgtcgaaaccttcagtttcatagatgtctaccacctcacactccatggtgaggggtgatgcgtctataacgggggtaccgttttcgccaatatggtaggcaaacacctccgacttattgaccgtcgcaccgcttacacttcccacatagtcagctttcggcaatatttcacgactcactagattgacggaaagtcgttttgagtcctttatcccttgattagtgtaatggcttttactcatgctgatgagtatccggtcatgtccaataacacccgtatgccctaccactagccagtttactttcccttcaacctctgccccgacaaccgtcatcggcttgggatagagcgccaacagatttccgagatttttcttgttcgtttccattatattgggttgaacggtgttctcctttacgggaatactgcacgacattatgacaagcagtgacagaactcctaaaattgtttttgccatacgttatattactctatttttcttgctaaacttctgatgacaaaggtaccgcgatagcacaagcgaaggtgtatatgatttacggatatttgtacccgaattcccgattataccgcaagaaagttcaagttcatcagatgagtatagtaagactggcagaaatcccacgaataatcccacgcatgatttgtttttaatcgttattcttgccgatacagaaaacaaaaaaagctctgaaatccttgaatttcagagctttgctttaatttattatttactttcgcggtgcgtacgggactcgaacccgtgaccccatgcgtgacaggcatgtattctaaccaactgaactaacgcaccattatttcattctttcgttgctatctctctcgattgcggttgcaaaggtagacaaaattcttatatctgcaatagcttgaaagaaaaaaaatcatcttttttttaacatagcttgattataagagatttatgttacctttgcaaaactaaattaatattgaaatcatgagaaatactcctattgaacgtaagttgatagatgaaactatcgcagattttcatatcacagactttgccaaagcaaccatccgtgaagtaaaagccattgcagccaatgccgaagcggcatcgggtgtggaattcataaaaatggaaatgggtgtacccggactccccccctcagccgtcggcgtaaaggccgaggtggaggcattgcagaatggtattgccagcctctacccggacattaacggacttcccgccttgaaagaggaagcatcacgttttatcaaagcctttatcaatgtagatgtagcccccgaaggttgtgtaccagttaccggctccatgcaaggaactttcgcttcatttctcacatgtagccagtgcgatgagaaaaaggataccattctcttcatcgatcccggtttcccggtacagaagcagcagttggtcgtgatgggacagaaatatgaaacctttgacgtatatgactaccgtggcgacaagttgaaagcgaagctggaaagttacctcagcaaaggcaatatctccgccatcgtctattccaatcccaacaaccccagctggatttgcctgaaagaagaagagttgcgcatcatcggcgaactggcaacccaatatgacgtcattgtgctggaagacctcgcctactttgccatggacttccgccaagacttgagcaaaccgttccaagcgccttaccaaccttctgtggcacactatacggactattacgtgctgctcatttccggttccaaagctttcagctatgccggtcaacgtatcggtgtcagctgcatttcggacaaactgtatcatcgggcctatcccgggttgacacaacgctacggcggcggcaccttcggcacagtattcatccaccgcgtactctatgcgctctcctccggcaccagccactctgcgcagtatgctcttgccgccatgcttaaagcagccaatgaaggtcaatacaacttccttgatgaagtgaaagtatacggtgagcgtgcccgccgcctgaaagaaatcttcttgcgccacggtttccacttggtatacgacaatgatttgggtgatcccgttgccgacggtttctatttcaccatcggttatccgggcatgagtagcggagaacttgcgcgggaactaatgtactacggtgtaagcgccatttcgctggtgaccaccggaagccatcaagaaggattgcgtgcctgcacttcctttatccaagaccatcagtacgaccagttggacgaacgtatggcgatttttgccgagaatcaccccatccaataaaaaatatccctatataaataaggtatctctaccagttgatgccggtatcccaccacaatcgggtaccggcattgtcatccccacccagtgcctctaccaaagcggcatactgctcggcattctccgtcttcagtccgccgggaaagttcagacggcgaatcattgtctcagtatctatgcacccgtctttactgtgattaaagcgtacggggaatagccggggataccccgtccggcgctgttcagcccaagcctcacacccttcgggaaacatggcaatccatttttgggtaataatcttctccagtttcgtatccctatccgctgactccagccagcgtggcgaaacttggcaacgggcggtaatatcattctccatatcgtaggtatccacaaaatcggcaggcaacaagtcgctctccagataagcgtcggactgcaagatgccatactgacggaaagaagccattaccccttcttcatagcaggttttcgccgactcatcggtccatccccgtagggcagcctcggcacgcaggaaccagacttctgctgccggcatcaacactgcatcagtctgctgggtgactttcaattttgagagtgtattataatagttatgtgcaaagcatgtaccctgacgaatgccgcgatactcgcctgcaaactgttcatcctggcaagtggcaaaatagatttcacgacggggatcttcatatccgttcagtatggactccatcggcgctcccatataagcttcattccaaacaaggtttatctcgcccaacggattggtatatccactcgccgtggaaaccgccaccgactcgtccgcctcccgaatgactccgtattcattatccatcgctttacggaattccgtttttgccttctccggactggctaccgcaatgcgcatggcaagccgcatcctcaacgagttggcaaactttatccaagagtcataatcaccgtccaacaacatatcgaaacgcgcaaactccgaagctcccggatgctcgacaatataatcggaaagtacagctacagccgtatcgagttcacagaaaaatgcattatagacctctttctgcgtgtcgggcatataacgggcttcgggatcggcaaaatgactatacacaatagggccgtaatagtccgtgacacggtgcatcacttccaccttcagtatcttggtaatgccgaaaaaggcaggcatacggtcacgtgtggcattctccgactgatatatctgcgggaaaacatactcataggtatgtccccacatggcgctgttccatccatcctgcaagttgtagtccgaattgtgcgaacctccattcagaggcttggcatcgtgcatgtaaccgctgaacatgtcggcattcaaattctgggtcaattgaaaaggccagttcttcccctttccgtagtcgtaattgaaatagatgccttgctggatgattccaagacggatgccatgttcgttatagtcggcctgcaagtcctcgtccgtcacgccggacttgtccgtattgatttccttaaagtctcccgtacaagccagaaacacgaaaaccatgccaatcagtactataatcctcttcatatcaagtctccctccccctcttaaaattcacacttcaaagaaaatccccaactacgcgtggtaggcataccgtagacttcaattccctggttatcgttgcccgtagagagtaccaggtcagggtcgaaaggcgcctttttgtagaagaagaacaagttgcgtccagaaaaggacagttgtgcccgcttgaggactttggtcttttccatccaggctgcaggcagttggtagcccacggacagctcacgcagcctgatgttcgtggcatcatacatataatattccgtcaccccggcccgtccgcctacaacattcttataaaatcctttcacattatctatccggttaccttcaagcattacataacctttgtctctggcccgggccgtgacttcagaaacgccatacatatccatatccgcctgcgtctgggacaaaatatcgcctccaaagcgacaatccaccagaaaatagaaagaaaaattcttgtaagacagcatatgattccagcccagcatcagttttggattggcattgcccactttcaccgtattgccatcaccttccaccaaaggcatgccggtattgtctccttccgtgccgtaaacgatattgcccacatcgtcacgtacaaaagcttttccgtagatgtcaccgatagagccccctttcaccaatttcatggcataactggacgagaagctggtaggaccgtaaagaaactccttcagcgcttcgtgcagtgaaattatcttgttgcggttggtggagaagttcacctctgttttccacttgaaatggtttgtcagcaaaggaacggcatccaatgaaatctcccaccccacattctgtatatcacccgcattgacataacggtaggcatatttatcgcccgacagagtaggaagcttgaagaactggttccgggtattcgtcttatagaaagtggcattcaaaccaatgcggttctttaaaaaacgcgcttctatacccgcctcaaaggaatgcgtcatctccggttccatatccttgaacggcgcggcatcacttgccaggaactctccacccgccgtgatatgcgaggaaggatttgtgatgaacatgggaatatcattgcccaccatgctgtatgccccccttatctttgccagtgacacccatcggggtaaagtcatcagcttattgaatatcagcgaaaatcccacggagggatagaagaacccgcttttctcatgagatgtataagccagtgtggaggaccagtcattacgggccgacaaatcaagatagacaaactcgttgtagcccagttgtgccgtcgcaaacaaggactgcaattggcgccgtgcatcaatcttctggtccagcccagcggaaccattcatgatgatattggccagattgaacacattggcatatttcagcgaagctgttttagagtcatagcgggtggagttcactgtcttgtcattgatactggcaccgagcgccgcgttgagagagaatgcatcccactgctttttcatcatcagtatggcgtctccgtaatattgggtttcctgatagtccatctcgatataacgcccattggctcccgctaacgccggagcggtagaggcatagaactgctggcgcaccttgtcgttaatatagtctacattgccacgggcctgcaggcttaaccaatcgtttatcttcagattggcagataaggagactatgacatgcatacggttctccttgctcaatatgcgattggtaatccagtagggattctgctcaaaatcctcgtaggaggtatgccaattctgtatgttcaggtttctaccctcatcataaacctcgaagttctccttataataagaaatatcctcaccccgtggaaaacggtagagccccaccaaaggattcatgtagaaaccacccacggtaggcttgttcttcaccacctggcgcatcaagttcatactgccatctaacttcagacgggaattcaacagaacggaagtctctctgaaagtgaggttgtgcttcgaaaggttatgtttcccaatgatgccatgccccgtagtattggcataggagaaatagttctgcaacttctcattgccgtgactcaaggagatggaagttatggaggtgacaccagtagagaagaagtctctcagattatcatattcgggaaggtttgcccgttctccccaactgtccacaccgtcacttactccatagcggttctgcatcttgggtagtgcaaaagcattgtcgaacatcaggctcgtcgagaaagaaacactgcgctgcccgtgcgactgccccttctttgtagtaatcagtatcaccccattggcggcctgactaccatacaaagctgccgctggagctcctttcaggatactgatactctctatatcttcaggattcagattggaaatgccgtctcctccgtcacggttgccggcattggccgttccgcctatggcagagtatgcttgctcggaagtggagttcagaatgggaacaccgtctatcacatacagcggttggttgtcactcgccaccgaacggattccacggatactgactttggctgaggctcccagaccggaagaaacctgattgacacgcacacctgccgacttgccggtcaacgaagtaattaagttgggcatttttactcgcgtcaactcctcgttttttattaaatctgtggcgtaagaaagagaattttctttcttttcgatacccaaagcggtaacaataacgttatccagctctatcatatcttctcttagtgtgatatgaaaggtcgaatgtccttccacctcaatatcctgggacatgtagccgataaacgaaacacgaagcactgcattatcggcaaccaccagagtgaattttccttccgaatccgctatcgcaccattggcagtttctttctcttgaatagtggcaccggccaacggaaacccgctttcatccagcacacggccacttatcgtcactttagaaagctgtatttcagaatgtcccggacgctgcatacgctccataaaatcctccgggcaatccgtccatcctatagaaaacagccctaaaattaacgtatataatgtagtatatttcattgcattaaattgccaattacttgcaaacttaagtattttctccgaataaaaaaagccataaaatctgagaaaagaaacttttaaaatgaaaaacagcgaagaactttggtttattgtggaatattatgtatattaggggcatgtatagcaatataaatctattcaagatagaaacaaaccatgtggttcctgcccagggaaaggtcttgatttccgaaccctttttgtgtgaccatatgtttggacgatccgtcattctactggtggaccatacacatgacggcacaatgggactggttctgaacaaaccgctccccctattcttgaatgatgtgctgaaagacttcgactgcccggaaagtatacctatctataaaggaggaccactcagcacagatacattgttctatctgcacacgctcgagggtattaccggagcgctgtccatcggcaaaggcttctacctgaacggtgactttgaagccattaaaaactacatcatgcagggaaatcccgttcaaggcagaatcagattcttcttgggatactccggctgggagtacgaacaactgggccgggaaattgaagaaaacacctggctggtaggcaaagaaaacatcagttcgctaatgaacgaggcggccagcggcacactctggaagaaggcattgtgcaagctgggagcaaaatatgaaatatggtcgcgtttccctcagattccaacgctcaattagtgcttcggagaagttgcaacagcacgacatccttatagcatcctcctacgcgccaccactccttcaaaagcccgcaacgcacaaaaccgcaggattcaaaaaggcggatacttgcctcattatccaccgagatatggactatcaactgtttcagatacaagaaactgaaaacatagtcgcacagcaaacgcagcgcttccttggcataaccattgccctgatactccttccgtatggcaatgcccacctctccccgggcatgcatgggagaaaactctgtaatatcgatggtacctatcagcgcatcatcctctgcacgtacaatcatcatacgcagctggcggtcggcaaacatatcgcattcggaattctcaatatattgtttcaagacaaatctggaatagggtacggtgaagttcgtcacatcccaagtctgggaatcattctccatagcatacatcacttccaggtcttccggctccatagcacggagacgcaccctttcactgcagaaataagatttattcatatcttccagtcggttacatttcttcttctttattgatatgcagttctttacgcaggcgtccctcacccggtaggcagaacagagaagccgtcagtcctatcagtgcacacagtgcacccgtactgctcaacatgatataataggtgaaaaagcctgcaagcaccggtatggcaagcaatgccagccgcacgccactccacagcgcatagaggcggagggcttcgggaagcgtcactacatctattttccggattaatacccatgaaaagagtttcaaggctatgggtacgcaagaggcagccagcagaatggttaccgtctcagccatataggtgacacgtacatctccggcatacatacctacccatccgcctccggtttctccaagtagaacgagcaggatgggaagcatccagaaataggcaaaagttgttcggacacgcgctgcggtcttctttatttgttcttccatttagtaaattgatagtggataatgaataattgataatggcccaaacaatcaggcagttccggaaaatggagtgcggttcacaatactgcgtcccagagtcacttcatccgtatactccaattcgtcgccgatggaaatgccacgggctatgacagagagcttcacacccagtttttccagcttgcggtagatataaaagttggtggtatctccctccatcgtcgtgctcagcgcaagaatcacttcattgatgccgccggcggctacccgctgcacaaggctttctatctgcaagtctccggggccaatgccatccatcggcgagatgacacctcccagcacgtgatacaaaccacggaactgttgtgtggcttccacagccatcacatcgcggatgttctctaccacacaaaccacagaagcgtcccgttgcggactggaacagatgcggcacgtctccgtatctgatatattatggcataccttgcaatatttcacttcatgcttcagcgtcacgatggcattgccgaacgcttccaccactgccgtatcctggcggagcaggtgaagaaccagcctcatagccgtcttgcgtcccactccgggcaacttggcaaactcatttaccgccttctccaataatgtagagggaaactgtccattcatacttaaaattctcctattggccacaaagatagtgcaaaccgaatgcagaataaaatgaactcgttcattttttatgctgaggtgcagcctatcttcgctttctgggcaaagatagtgcaaacttatgaaattagtgctacctttgccacacgtaaaaccccaaaaaggcaacaaaatggatattacaaacgctgaattcgtcatcagtaacacagacgtgcggaaatgccccgcaggcacatttcccgaatatgctttcatcggacgctccaacgtaggaaaatccagtctcatcaatatgctgaccgggagaaaagggcttgccatgacctctgccacaccgggaaagaccatgctcatcaaccatttcctcatcaacaagagctggtacattgtagaccttccgggatacggctatgccaaacggggacagaaagggcaggaacaaatcaaacgtattatagaaagttatatactgcaacgcgaacagatgacttgtttgtttgttcttatagatagccggctggctccccaagccatcgacctcgagtttacggaatggctgggcgagaacggcgtaccctttgccatcgtcttcacaaaggccgacaaactgaaaggcggcagactgaacacccacatcaacgaatacctggaacagttgaaggaacagtgggaagagctgcctccctacttcatcacctcttctgaaaaccgcatgggacggaaagagctgctggactatatcgaaagtatcaacaaaagcctgaatagcaaacaatagacataagtaaaatgaaaagattagttttttggcaactgtttgttgccgcactactgctgaccggcaatagtcacgcacaatccatcaaggatttgttcaacaaagaaaatatagagaaggcggtaaatgccgtgaccggcaagtcaacagcggatatgaccggcacttggtcgtataccggctccgccattgaattcgaatcggacaacctgctgcagaaagccggcggtgccgttgccgccacagccgcagaaaagaaactggacgaacagcttgccaaagtaggcatcaaagccgggcaaatgtcattcacattcaacgccgacagcacattcagcgccaaagtagggcaaaagagcatgaagggaagctactcctacaatgcatccacccaaaaggtcaacttgaaattcgccaagctgataggtatgaatgccaaggtcaacgctacctccacaactatggacctgctgttcgaatcggacaagctactgaaactgataaccttcctctccagcaaaagcagcaactccactctgaagagtatcggctcgctggccaacagctacgacggaatgatgctcggattctcattacagaaactgtaacaacaacttccatacaacaaaaaaatcccgcaagcaccgaacaatgcttgcgggatttttttatctgaaaagagcggaaaacgagactcgaactcgcgaccctaaccttggcaaggttatgctctaccaactgagctatttccgcaatgtataaaagcgtgaagagaaggagactcgaactcccacgacataattgtcactaccccctcaaagtagcgcgtctaccaattccgccacctctccaacttactttcaacaattcaaagaaccgactgctttaccttggtgcccagaacaggactcgaacctgcatgcctctcgacacacgcacctgaaacgtgcgcgtctaccaattccgccacctgggcataggtaattgcaatctaaactgcgttgagcggaaaacgagactcgaactcgcgaccctaaccttggcaaggttatgctctaccaactgagctatttccgcgattgcggatgcaaaggtagatattttccttaaacctgcaaacattccgcagacttttttcacacagaaaagtgtacattttcgccaggcatacaagcagacttttgattatcaactcattcgcccacgataatcttcataagaaaattgcttgaaaacttcagcttttccttcttttgtccacattgcaatggccggatggtgaattccattgaacatattcgtctttacagtggtgtaatgtatcatgtcctcaaagatgattctctcccctatctgcagctcatggtcgaaactccacagtcccatatagtcgccgcttaggcaggagtttcctccaagacgatagacataaggacccgcatcacccatctccgctccacgcactgcaggctgatagggcatctccaggcaatccggcatgtggcacgtaaagctaacgttgagaatggcagtacgaatgccgcggttttccacgatgtccactatctccgagctcagcacaccggtctgccaagtgaaagcggaaccgggctcaagaatgatttgaagatgcgaatagcgccccttcaagccctgcaacagacggacaagatgctctacatcataatccttacgcgtcatcagatgcccgcctcctaaattcaaccacttaatctgtgagaaccagcgggagaattttccttccaagtgctccaatgtgtgttccagttcgtaggaagaagactcgcaatgacaatgacagtgaaaaccttcaatacccaccggaagttcttcgggaagcgggtcggccattacaccgaagcgagtaccgggtgcgcagggattataaagctccgtttccacctcagagtattcgggattgatacggataccgcaggaaatgccgcttccctccgccaccactaccggataaaagcggtggaactgcgaaagcgaattgaaagtgatatggctgctgcaccgcattatctccggaaaatcggcctcggtataggcaggcgagtacgtatgtgccttacttccgaactcctccaatgccagacgggcttcgtagacggaacttgccgtagagtggtctatatactccctgaaaatgggaaaggaacgccacatggcaaatgatttgaaagcgaggattatctccacacctgcgcggtcggccacactttttatcagtgcgaggttctttctcagcaatccttcttccataatatagcagggagaagggaaaagggaaaagtctttatttgtcattcttctatctatatttactattctaaattgtccgtatgtatcgttctaactgtctttttttaagataccacggtcctacacttataccatcatcctcttacaaatatcccgtttttgtgtgagacaaaagatgcgactatcctatgacagcactttgaaacgcgcgaagcgcagcaaaagttgtttgtctcccgcattcttgaagcggatggtggctttcgcattgtctccttcgccctccactttcaaaacttcacccaggccgaaacgttcgtgctctatcagttgtccctgctgtacacagttggcagacccgccggcagaaggcgatgtacttgccgtatttgcagaaggcgccacccgtttcaaattacgtggaacggtcggcgcaataatctgctgtttcggtcgtacagacacacgttcttttcctccatacggagcatcttccctatcaggcgcaaagcctctggcgttctccctgcggaaagcggcggcttcctcctctaccctgcggaacattcccgcatcctgaggcagacgcaggaaacgtatatctatatccttcaggaaacggctgggactgccgaactccatcttgccataccggaaacgtgtctttgcatacgacaggaaacagtgttcttcggcacgtgtgatggctacataaaacagccgccgttcttcctccaatgcccggggagagtcacccaccatgccgctgggaaaaagattctcctccatccccactacaaacacattcttgaactccaatcccttggccgaatgtacagtcatcagggttatcttctcatcgtccccatccttatccgaatcctggtcggtaagaagggaaacttccgaaaggaagtcacccaacaacacgttcggttttccttcctcctgccgttgggcacaaaaatcactcataccgttcaccagctcctctatattctccttacggctcagattctcgggagagttgtcctgacacacatcattgatgatgcccgattggcggataatgtcggcaccaatctcataggcattcttctccgcagcatctgtgataaaggcggatataagttcgcggaatgcctgtaactttcccaccgtacctttattgaagttcaagccatacgccaacggctcacaaagcacagtccacaaactgacattgtgcccggtggcggcagcaatgatttttcccactgtcgtatctccgataccccgtgcaggataattgataatacgtttgaaagcctcttcatcattgggattcactatcagacggaagtaagcgataacatctttgatttccttgcgttgatagaacgacaagcctccataaatacggtaaggcatactgcgtttgcgcatggcttcctcaaagatacggctctgtgcattggtacggtagagtatcgcaaaatcagagtaggcatagcgcttttcacgccgcagttcagctatcttattcaccacaatatccccttcttccacatcactgtatgcctggtacacaccaatggcctctcccttctccttttccgagaacacttccttgcgtatctgccactggttcttttctatcaggctgttggccgcgcggacaatggtctgggtggaacggtaattctgctccagcttgaagaccttcgtatcgggatatactttcgtaaagtagagaatattgtcaatatcggcaccacggaaggagtaaatactctgtgcatcatcccccaccacacagacatgctgatggttcttggcaagttgcagcacgatgctgtgctgtgcaaaattggtatcctgatactcatccaccagaatgtaacggaactgctcctgataacgtgccaacacctcggggtggtctcggaacagcaggaatgtgtagaacagcaaatcgtcgaagtccatcgcatccgcccgccggcaacgctcccaatatctctggtagatgtcgcgaagcgccggaaccttggcagcacggtctccttcgtaagcctccttgttgttggcatagcctgccggagaaaccagatgattcttggcattcgagatacgcgcctgcaccatccccggcttgtacactttctcatccagccccatttccttgataatggaacgtatcaagcttttactgtctgccgtatcgtaaatggtaaactgcgaagtgaagccgatatacccggcctcgacatgcagaatgcgcaggaacatggagtgaaaggttcccatccacagatggcgcgccctctccggccccacctgacgggctatacgctccttcatttcgcgcgccgccttgttggtaaaggtcaatgccagaatgttccaaggctggtagccattctccagcagataagcaatcttgtaggtcagcacgcgcgtctttcccgaaccggcaccggctatcaccagtgacggaccgtcattgtataacaccgcgttccgttgtccttcgttcagttcctctatataatcgggcatatccgtataatcttaaaatgatgatattttttcttcctttgtttttacggaggcaaagataaaaaaagcttcggagacgtacgaacatttctataggttatagtgtttatatagtaaagttccaaaattaaataattgaaacttatgaatacaatattaacgattttaatgataacagttatgacttacgaaatgccaaaacttccctacaccaacaatgcactggaacctgtaatcagtcagcaagccatagattaccactacggtaaacatctgcaaacctatgtgaacaacctcaacaacctcgttccgggaacggaatttgaaggcaaagacctggtaaccattgttgccacagcaccggacggtgccatcttcaacaatgcaggacaagtgttgaaccacacattatacttcttacagtttgctccgaagcctgcccacagcgagcctaccggcaagctggcagaagccatcaaacgcgacttcggcagctttgagaatttcaagaaggaattcaacgcggcagctgtcggcttgttcggctccggatgggcttggttgtctgccgacaagaacggcaaactccacatcaccaaagaagccaacggtagcaatccggtacgcgccggtcttgttccgctactcggattcgacgtgtgggaacatgcctactatcttgattaccagaaccgccgtgccgaccatgtgaacgaactgtggagcatcatcgactgggatgtagtaggtaaaagactgaaataagtaacaaggtcccactaaacatgttaatgacgcattcttgagcaactaaggttcaagaatgcgttttcttgtttaaaatagccatctaacatattttaaagaaattctttggcttctaccataagtattcattaactttgctaaacttaaaagttaaacaaaagaaatgaaactcatcgtagtaacagcacccacattttttgtggaagaagacaagattatcacggcactattcgaagaggggctggatattctacatctgaggaagccggaaactcccgccatgtattcagaacggcttttaacgctgatacccgaaaaataccataagcgcatcattacccatgagcacttctacctgcaggaagagttcagcctgatggggattcatctaaacacccgcaatcccaaagagccccacgactattcgggccacatcagttgcacctgccattcactggacgaagtgcagaacaagaagcatttctatgactatctgttcctaagcccgatatataattgcatcacaaagtccggagtcacgtccggcttcacagccgaagagttgcggcaagcaggaaaaagtaaggtcatagacagtagagtcatggctttgggaggcattactcccgacaacatactggagattaaggattacggattcggtggtgccgttgtaatgggtgacttatggaataaattcaatgcctgcaccgaccgcgattatctggaagtaatccgccacttcaagaagttgaagaaaatggctgattgagccttcttggactggcaaatcaaaatttaccgtactctttgtattcaataccggcaggcaacgtgaaatagaaggtggagccttcccctttcttagactccacaccgatacctcccccatagtgctccacaatagatttggtgatggaaagccccaaccccgtacctttgatattgtagttcatcttcacaaaccgttcaaagatggcatgtcttcccacttcatcgataccacagcctgtatctgccacataaaaatagaagttatggttgctcaatctcctgcaaccgattttcacactgcccatctccgtaaacttcaaggcgttcctcaccaagttacctatgacttgggcaaaacgcacgcggtccaccaccaaacggcattgaggcaaccgttctacaaactccacctgaatgcccgtgggatgcgagcgcatattctccgtcgtacagacttcatcaatcagcgcgtttacatccacttctccatcgttatattccagagtatttgcctcaatcttcgaatagtccagcaagtcattgaccagttgcagcagcgagtccttgttatcattaatctccttcagaaaagccatacgggtttctctgtccagatcatccatttcggcaagcatagttgtaaagcctacaatggcattcaaaggagtacgaatttcgtgagtcatattagcgatgaaagcattcttcagctggttggattcttcggcaacctcattgatgcgctgcaacgtcttcaaccttttgctcttgctgatggaaatgattatcatgatgaccaaaagcagaatgacaattatcccaaaactatataccaatgcttcattattctgatagaagtcattcgtccaaacatcgtatgctgccgtaattgtcaatatcatcgttttttgcttgcttattggaaactataaaattatgggaagcaaatatactaaagaaaatacaaataaattaatagaaactacagttttttccaacaaaataggccgcatgccattaccaagtaaagcatgcagcccataaatgtcattattcagtattattgaaatcagccttcaatggcagcctgcgccgcagccagacgtgcaataggcacacggaacggagaacagctgacataattcaagccaactttgtggcagaacttcacagaagaaggctcaccgccatgttcgccgcagataccgcacttcaaatccggacggatagcacgtcccttttcagtagccatgcgcaccaactgtcctacaccattctggtcgagtacctggaacgggtctactttcagaatcttcttctccagataaatcgggaggaaggaagcgatatcgtcgcgtgaataaccaaatgtcatctgagtcaagtcgttcgtaccgaatgagaagaactcggcagaggaagcaatgcggtcggcagtcaaggcggcacgcggaatctcaatcattgtacctaccttgaagtcgatgctgtcacccacttcttcaaacaactgggcagcctcagcacgaatcacttcttcctgctgcttgaactcatacaagataccggtcagaggcaccatgatttcaggatgggtttcaacaccttccttcttcaattccaaagcagcacccaggatggcacgcgtctgcatctgtgtaatttcaggatatgtatttcccaaacggcaaccacgatgacccaacatcggattatgctcacaaagtgcctcaacacgttgctggatatactggaggctcacgcccatcgtatctgccatttcctgctgtcccttcaggtcatggggaacaaactcatgcaaaggaggatcaagcagacgcaccgtcaccggacagccttccattgccttgaaaattcccttgaagtcagcttgctggtagggaagaatcttagccaaagccttgcggcgcccttctgcattttctgccagaatcatctcgcgcatggctttaatcttctcgccttcaaagaacatgtgttccgtacggcaaagaccgatacccacagcgccaaaattacgtgctactgcggcatcatgaggagtatccgcattggtacgaacctgcagcttcgtatatttgtctgccaaatccatcagttccgcaaagtcaccggacagctcagccgcttttgtctccaccttgtctttatatacttcaccggtgcttccgttcaaggagatatagtcaccttctttcaacagtacaccatccacttccactgtacgcgccttgtagtcgatgttcaaggcacctgcaccagacacacagcacttacccataccacgagcaaccactgccgcatgcgaagtcataccaccgcgggcagtcaggataccttcggcaactgccatacctgccaaatcttccggagaagtctcgatacgtaccatcaccacacgcttgccggcagcatgccattcggcagcatcatcggcaaagaatacgatttgtcccgtagcggcacccggagaagcgggaagaccacgagtcaacaccttagcttgtttcagagctgtcttatcaaataccgggtggagcagttcgtccaacttattgggctcacaacgcatcaatgcagtcttttcgtcaatcataccttgatggagcaagtccatggcaatcttcaccatagcggctccggtacgcttaccgttacgggtctggaggaaccagagtttaccctcttgtactgtaaactccatatcctgcatatcacggtagtgattttcgagttttgtctgcaaagcatccagttccttatagatttccggcatagcctcctccatggaaggatatttgctgacacgttcttcttcgcttacaccggctaattcagcccaacgttgagaaccgatttttgtaatctgttgcggagtacggataccggcaaccacgtcttcaccttgtgcattaatcaaatactcgccattgaaaaggtcctcaccggtagcagcatcgcggctgaagcaaacacccgtagcagagctctcgcccatattaccgaataccatagcctgaacgcttacggcagtaccccattcgtcaggaattccctccatcttacgatacaagatggcgcgttcgttcatccaggagttgaatacggcacaaacggcaccccacaactgctcgtaggcacaagtcgggaagtcttttccggtttgttctttcaccgcagccttgaacttcttcacgagttccttaaggtcttccacctcaagctcgttatccagcttcacgcctttagcatgtttcacatcttctataatagcctcgaacgggtctacatcttccttgttcaccggcttcatacccagcaccacgtcgccatacatctgcacgaaacgacggtaagagtcccatgcaaagcgtgcattgcccgtcttgcgcgtcaggccttccaccacttcgtcattcaagccaagattcaggatagtgtccatcatgcccggcatggaagcgcgtgcacccgaacgaacggaaaccagcaacggattctccacatcaccgaatttggaacgcatcagcgtctccacatgggcaatggcctgttcaacttcgttcttcaacagagcaacgactttatcctgccccatttcataatattccgtacaaacttctgtcgttattgtaaagcccggaggaaccggaacccctataaggttcatttctgcaaggttggcacctttcccacccaaaaggtttctcatatcggcctttccttctgcctggccgttaccaaaggtataaactctttttttgtccataatataaatttaaagtttttgatagtgatttctcttttctgttcgcaaatctaagtatatttcgcagactagaaaactttttcagaaaaaactttatgctaaaatgcaatttcgacattgcaatctttaatatttcatttcatagagagaaatcccgaaaaaatgtctatttttgccgaagaatttattagattggtgtaaaagtggcaagaaagagaaaagaacttcccctactggagaaggtgacaattacggatgtggctgccgaaggaaaagccatcgcaaaagtcaatgatttggtgattttcgtaccatatgtcgtccccggcgatgtagttgacctgcaaattaagagaaaaaagcatcattatgctgaagccgaggctgtgaaattccatgaatattcggcagtacgggcagttccattctgccaacattatggtgtatgcggcggttgtaaatggcaggttctcccctattccgagcaaatcaagtataagcaaaaacaagtaacggacaacctcacccgcatcggcaaaatcgaattgccggaaatctctccgatattaggttcagaaaaaactcagttctaccggaataaactggagtacactttttccaacaaacgttggctgacgacagaagaggttcagcagaatgtagtgtacgaacagatgaatgccgtaggcttccatattcccaatgctttcgataaagtgcttgccatagagaagtgctggttgcaggacgatatatccaaccgcatccgcaatgcggtacgcgactatgcctaccagcacaactattccttcatcaacctgcgtacgcatgaaggaatgctacgcaatatgattgtgcgtacctctaccaccggcgaactgatggtaatcctcatctgcaagatagagaaagaggaggaaatggctctgttcaagcaaatgctgcaatacatagcagatacattccccgaaatcacttccctgctatacattattaataataagtgcaacgataccatcaccgacctcgaggtacacaccttcaaggggaaagaccacatcttcgaggaaatggagggactgcgcttcaaggtaggtcccaaatctttctatcaaaccaactccgaacaagcctacaacctctacaaagtagcgcgcaactttgccggactgaccggtaacgagcttgtttatgacctttataccggcacgggtaccattgccaatttcgtatccaagcacgcacgccaggtaatcggcatagaatatgtgcccgaagccattgaagacgccaaggtcaatgccgagattaacggaattaaaaatacattgttctttgccggagatatgaaagacatgctgacacaagacttcatcaaccaatacggccgtcccgatgtcatcatcaccgaccctccccgtgccggaatgcaccaggatgtagtggatgtcattctgtttgccgaacccaaacgcatcgtatacgtcagctgtaatccggctacgcaggcgcgcgacctgcaactgctcgatgcgaaatataaagtgaaggccgttcaaccggtagacatgttcccgcacacccaccatgtggaaaacgtagtattattggaattaaaagattgaaagtacaagtagttttcaatcgtaaattgtaaattgtctaatcgtaaattaaaaccagtcgtggcaaaagaaaaaattacagcaagagcccgcacacaatatacggactacatggtgaaggaaccgatggagctcatggagtttctggcagctaaaatgccggacgccagccgcaccaagctgaaatcattgctaagcaaacgcattatatatgtggacagcgttatcactacacaatacaattttcccctgaaaccgggtatgaaagtacaaatcagccgtgagaagggacgtaaagagttcaaccataaactgatgaagattgtatacgaggatgcctatatcatcgtgatagagaagatgcagggtttgctgtccgtcaacactgaccggcaaaaggaacgtaccgcctataccatcttgaatgaatacgtgcaacgctcgggcaagcagcaccgtgtacacatcgtgcaccgcctggaccgtgacacctccggcttgatgatgtttgccaaagacgagaagacccaacgtacactacgcgataactggcatgacattgtaacagaccggcgatacgtagccgtagtggtcggcgagatggaaaaagatgcaggaaacgtggtttcttggttgacagaccgcaagctgtatgtatattcaagtccgacagatgacgggggacaagaatccattacgcattaccgtaccatcaaacgagccaatggatactctctcgttgaactgaacctggaaacgggacgaaaaaaccagatacgtgtacacatgcaggatttggggcatcccattatcggcgacggacgctatggactggaagacgtaaatcctatcggacgcttggccctgcatgctttcaaactctgtttctatcatcccgtcacgggagagctgatgcggtttgaaacaccttatccgggagagttcaagaaattggttttgaagaataagtaaaaagctgacatacaataaaaaacggagcaattgatttgctccgttttttattgataagcatgtcgtcattgccgacgcatacgaaaaggctgtccgtgaatattatcttgatattccctccagctattataccaagtaccactgaaagaataagaatcagccatggctccttcaatgtaagccatgctgccaccatcatagaattccaattccatcagattgtaagccccactaacccaattccatctgaaaagcaaataattcgggtcgccatatgaaccaatagtaccttggttgcgcgcgttaaaggtcataatcgtccccctaccccaagtatatgccccgaaatctatttcttcagatgtataccattcaccgggcagattatattccgtttcttcctcactatcacatgatgtcaatcctaatacaaggacaaacaacaataacatttttgtgtatttcaacatattattcataagccatactttatttataattagcatctaccatcataacaaccgttccatccagtttaccggataaataatgttcgcgcacccatacattatcaaagtacttgatttcaccggcaccataattcagagtcaacccctccatagacttatccatccatttccaagtaaaagtacgtgaagtcgtttcatagggacgggactcgcctccgcgataatactcccagatttcctgtccagaattatcagccttggcaaacttcagctgatgactgcataacacttcaactccatctttgttttccgtctgatattcttctatccacgtcttcccacacaatttgtcgtcgctattctgcatggtataatatacatcatccccacaagacgccagcccaatcgtaaatacacacaacagcaatatcttcacataattcaaagtcttcataagttatcgagtttagttaatacttgcggacaaacatacacaaaaaaaatgaaacacttaatacttcgcctgaaatttcttgtagaagacaaggaataaaataaatcccatcagtgcaaacggtacgcctgccaatgcgggataacgatagcctccactcaaggcaaggcctccgatataggctccgatagcattccccaaattgaaagccatctgcacacaagcgcctcccaacatttctcctccaggggccacacgaatcatcaacacctgctccggactggagacggcaaacaaacctgccgtacagagtgtcatcaatattgccgaacaccacggatggggcgagagtaaaaatatcaataataaaataacacatatcatcccttgcaccaccgtacctaccttccccggagtgtaccggtcggacatgcgcccactgaccagattgccggcaaccattccgaatcctgccagtaccatcagcgccgtaatgctttccgcactaaaaccggaaacctcggtcagcaacggggtgatgtagctataccagcagaatacgccaccgttgcccaaagccgtagctcccaatatgagccacggcgccggcttcttcaaaaaacggaactgtcctttaaatcccgtgtctttcagtccttcgacctgcggtacccaacgccaaatgtagtacagtgttatcaatccccaggcacctaccagcagaaacgtggcacgccaagacagtgtatggctcaacgaagtacccaacggcacaccaaacagattggccacagtcattcccgctatcataattgaaaccgcctccgagcttttccccttatcagccaattttcccgcaacaatggaagccaccccaaaataagcaccatgaggaagcccggaaacaaaacgtcccaacagcaagacccaataatcgggtgccatagacgcacaaatattacccacaatcattaatgccatcaagaccagcagaatctgcttcaacggacgtttacgggccaggagcagcatgggcgcaccaaaacaaacacccaacgcatacgcagaaatgaaatgaccggccacgggaatgctgattcccaaatcagtagccacatagggcaaaatacccatcatcgtaaattcggcaatccctagccccaatgtaccgaacgccaatgcaataagactcttcttcataccttaaaaaacaacctatattttttaccgggcgcaaagataatgacattgcattctccaaataaaaaggataccgaattattttcagtatccttcttcattttttatcttatatcaattgtatacccacctttaaagactcctcccggcgccaagtgctgcatccagtccttatccttatattcgcccttataatgggcacggtcacaacgcccgtaccacggctcgatgcagacaaacggagcattcttggccggaggcgaccacaaccccaccaccggagtgtcgaaatacagactgagatagggtttcttctccttattatataatgtaacttctttcacttgactgttttccagaatcagggcatctttatcaaaggagtgtatgtccaaaggcagcaggccatctgtcaactcaagcaaatattccttatccggagcggcacatcctttctcggagataaggatatagtgcaaaccttccgtcttatcaaagccgaaatatccacggtccgttgtctccgcatcatagtccgggtaatagaaagccggatgggcccctatctggaagtgcatttcgcgtgttccggtattgatgactttccaaagcacctcaatcttctttccctctatccgatagcctatctcaaggcaaaacgggaaaggatatttcttgcgtgtttcctcactgtcaaccagtcgataacgcacttcatcttccagttcaagcatcaattcaaaatccatatcgcgggcaaaaccgtgttgcgtcaatgcataggaaacgccttcgtggcggtattcattctcccaaacgctgcctacaatgggaaaaagcaccggagaatgccgtttccagaaagcagggtctgcctgccaaagatattcttttccatcatgcaagatactgcataactcggctccatgcggtgaaactttaattgtcagttctgaattagaaagtgttttcatatcatatatcattttgttattttctcatatagtgtggcatctctccgggtatttccatcgaaatctccaccaggccaccgaccactccgtcctgcttccatgccgtctgataaatcattttcttgataccgttcttctcaatggtgtaggcattcactccccccgtctccagcagttcgcgtatcttggcttgcgattgcgggttgtggcaatcaaagagattcttgcctatcaggtcaccgtgtttggcaaacgtacggcatgctttctcgttcatatataggatgattccctttgtgtcgcatacagttacggcacagttcatttcattggcccattcgtacataattctttatttttaattggctattttctatgcacttgaaatgcatttacagaaaactcttcaaagtcaaatgtccttttctctatcgaattattattgcattaatcctccttctatgaagaaaacgacttcattcaatcgttctttattcgattcttcatctttgaaaatagctggagtgaagattatcctatcttgaatcagattatctaccaaatcccacatgatttcatggtacagcatcaccattgccactttttcattgtcaataccatattggcttgctaaggagccacaattattctttagttccgcactgatagagtttaccaatttttcagttatttgatgaaagcggtcttgccgtttctttataataggaaataatacatctccattatcatctaccagcccataaggttttaactgagaaacgagtttggcatctgttacttttccgaattgtgctatttcatcagcacaatggtccataatgtcgttgtcaggagcaatgccgctattgatgtaagtcaaaatcaaattctgttctccgcaaccattcgtaccgcatgcaaagccatttcttgattcgtataatacccagtaacagccactccagcttgtataattgtcaacatcctcaaacaagactaactttgtccacatttttccatccagaaggtatgaaaaaacaagtgagagtacattgttcttgaatcccatttcactgatagtttgtgccaatgatataaagtctgcctttgttttgacatacatggattcagcaatctccttacttaagcttcttagagaattggtctgttctttgtcaagaatgggtatagtagcttcccattttccttttgttttactgacaagtccacctacttccaataacaataattggctatcagagcatttaatacccatttcacgaagttcggcttgagtacgtggagtccgtaaattgtatagtatttcccaattattatctggcgttacatagtcttcgggctgatgtccgttcactgcaacaaactgggttgcttcccattcgctataaggtcttatcgatatttgtgctttaatcattgtggtaacggacaataaggcaaacaacaataataagtccggataatgtttcatatatcgcttaattttagttttgttcatcattcatgcacttctcttatgtaacaaagataacgtttttttcaattcctctctcaaacctataacaaaaaacttcccgactaccaataaaaaacttcctaactactaatagtaaagtttgcaagtatagagataaagaattaccttcgcccttggtttgtctatcccaagccttgggatagaaatccccaaccttggcatacacatccgcaaccttgggacaaactttgtaagccccaataaacaaacgaacctcataacaacgctaccatcatggcagaatacaacatgcaggaactgaacctgccgggagaagacggcaaacgcatcctctacccacgaatgaaactatacgggcaggtggacttggaaaccatcaccgaaaagatagcatacgcctcatccttcacacgaggagacatcatcggactggtacaagccatcaccgacgaaatagcctaccaaatggggcaaggttactccgtgaagattgacaacttaggagtattcacccctgccctcggtctgcggcaagaccgtgaacgggagacgggcgaagaaggagacaccaagcgaaacgccgtcagcatctgcctgaaggacattcacttcaaggcagacaaggaactgctgtaccttaccgctcgccattgccacctgaaacgttccaccgacaaattccaacgctcctcacaaatgttttctccgcaggaacggctggaacgggcaaaaaaatacctggagaagaacagcttcatgacccaagccgactattgccaactgaccggcttattgaagtccgccgcctcccgcgagttgcgcgaatggatagccaatcccgaatcgggcatcgactacaaaggacgaggaacacacaagatttatattctaaggaaaccataacccacatccattgaagtaacaaaaacaatgaaaatactacataccagcgactggcacctgggacacaccctctacaaccacgaccgcaccgccgagcagcaatccttcctacggcaactcacccgcatagtaaccgaagagcagcccgacgccatggtggtaagcggagatatctaccactactcctctcccgctgccgccacgcagaagatgtacaccgacgccatgctgaacatccatcaagcctgccccggaatggccatcgtagtcaccgccggaaaccacgacagcagctcgaaactggagatagacagcagcctctggcagcacttcggcttgaacgttgtgggaaacatcgaacgtacagccgaggaagtgaatctggacaagcacatcatcgagataaacaatgaaaaaaagacaataggctacgtcattgccgtgccccacgtctacccgcaaaacttccccctgctggacactgaaacaccgcgcgaccaacggcaggcacgcttcttccaggcactgctggacgaagtgaagaaacggaatacggcacagcttcccgtcgtcctcatggcccatctctccattgaaggcagcgaccgtagcgggcacgatgagagtatcggcggaatagagtatgttcccctcagcgctatgggagaagggtacgactacctggcactcggacacatccattgccctcaggacatcaaaggcagtcatcaccacgcacgctattgcggcactcccctccccgtcagcttcgacgaaacctatccgcactccgtctccatcatcgagttggagaaaggggcagagccacaaatcagtacaagggaaattgaaaatccgattccgctcgtcacacttccccatgacccgacacctttcgaagacgccttgaaactgctggaagaatacccggaagagaaacctgcatacctccgtctgaacgtgctgacaaaaggctacctgccccccgactgcaacgaaaaagcctcgaacgccgccaaaggcaaggcatgcaaatattgctacatcaagactacccgagagcggcaggccgacactgacgagagcaagcctatctccatccaagagatgcaggaaatgtctcccctggaaatagccagactctactaccgcgaaaccgaaggagaagagatggacccagaactttgccagctgatggagactgtcatgcaaaaagtgaaaagcaagaacaactcctaatcatttgtccggaacatgaaactccagaaactcaccataaagaaccttgcctccatagaagatgccgtcatcgactttgagaacggaccgctaagcgaggaatcccttttccttatctgcggtgagacgggtgcagggaagacaaccattctcgacgccatctgcctggcactctacaacgaaacgccccgcatggaccatgccgagaacgaaaaatacaaagacctgagccagactttctctgccaaaaaggaagatgttgccatcaacgacagccggcaactgatgcgccgtaacaccagtgaagcatggacggagctggagtttaccggctcgaacgaaacgccctacaccgcccgatggtacgtggcacgggcacaccgcaagatttcaggagccgtgcaagatgtgcgctggacactggaaaacaagaaaagcggcgcacagctcaacaaaaagaatgagataaaggcagaaatacaagctgcagtggggttgaccttcgaacaattctgccgcaccaccatgctggcgcaaggcgacttcaccaagttcctgcaaagcaaggaaagcgaaaaatcggatattctggaaaagctgaccggtacaagtatctactccgaaataggtgccgaaatatatgccgccaccaaggaaagacggacggaatacgaaaaccagaaccggaagctggaaggcatccacatcctggcagaagaagaagtcactgcaatcaaggaagccatagccacgcaaaatgctggagtcaaggaagccaatgagcagaaaaccatcgccctcgcaaaaagggactggctgaaaaaatactccgaactcctcctcacccgtgaacagcaaaagaagatgtgggaagggaagcaagcgcaactgcaatcggacgaattcaaacagaaagaactcctgattaaagaatggaatgccaccgccgacgcccgcaactggctctctaccttgaaacagcagcaacagcagcaacaacagaaccatgcacaagccgggatactgagagcatcctttgcccggctggacggaggaagcaagtggctatgcggtttcctgaaagagcaagaagacaagctgcatcgtgccgagaagtatttgcaagagcattcgcccttactgcccatgttcgagcaaagccaatccatcattaccggcctaaaatccgcactcgatgcccaaacacgcatcggcacctacaacgcgcaccttgaaagacttgccgcgcaacaacccgtaaaagtcaaggagcgtaccgacaaggaagctgccctcacccggaaagaacaagagaaccatgcattgcaaaacgaaataaacctccggaacaagcagcttgaaaccatggaccgccctgccctgcaagacaagaaaaacaaactcgatgccggacgggagaacctgctacaagccttgagcgccttgtctttactggctgaaacggaaaggacactgaacgaggcgaaggaaaacgaaaaggctttgaacgccaaagtggaggcgtgccaaaagcaatacgtcctcctgcaaacggcattcgacagcaagaaaacaagttatgatgacatccgcaccctctacgacaagcaaaaggaagccgtagaagagtgggcaaaggaaacacgctcccggcttgtcgtcggggatacttgccccgtgtgcggacaagaaataaaatcgctttgcaaagatgaagatttccagtctgtccttgctcccatacgcacctccctggaaacaaaagagaaagaatacaaggaagccgagcaggcattgaacaacaaccggacagaatccaagacctacggaacgctggcagagaatgcccgtcagtccacagcaagagcgctccggagctacaaccttgcccgtactgacgcacaagccaaatgcgcccaatgcaacggcatcggcctctccacaaccaccggcgaaaccctgaagaagctactggaagagaacaagctggaagcagacaaactgaacgaaaagctcactgaagttcaaaagctcagcgcacaaatcataactctgcaacggcaaaaggacgaatgccaaaaacatgtggacgctgcacgccaagccttcaactctgccgacagagtgctgaatgagctgaaaaacaacatcgtcaattacgagtcgctcaccgccaacgaaaaggagaacatacgtgccaccatggaccgcgtcactccccacatcctctgggaaggatggaacacggaatgggagaactcccccctctcctttattgaccgcctgacgcaagctacgcgcaactaccgtctggcgcaggaaaaacaaagagaactgaaatccgccattgcccttatccacaaagagctggaagggataaacatcaacaaggaaagcatcgatgccgcattccccgactggcgcaacgcacctgcagcaacacaggaaatggaaatcaaggacctggggattgcctggaataatctgaatacacaagcaagcggactgaaacaaagcatatcctccaccgcagaccaaatggcgaggctgcaaaaggatttaaccgggttctatgccgccaaccccactctcgacgaggagcgtatcaccgtcctatccgcttggtccggctcccggatagaagcattgcgtgcctcactgcagacacttaaagaggaagaagtagctgcatcgacctcctttcatctggccaccggacaagtggaagagcacatcaaccggaagcccgaaatagaagaaaacgaaaacctcgaaaccctggatgcactcatcgcgaatctcgaagaaaagataaccgccggcaaccaatccatcggccagcagaagttacgcctggaagaaaacacccgcaacatcgaccggataaaggaagaaaaggaacgtgccgaccggctgcgcgaagagtatctgaagtgggaccgcctctgccgccacttcggtgacgaacggggaaagaacttccgcaacatagcccagagcttcgtcttgaaagaactgctggcaggcgccaatttctatctgcaacgcttgaccgaccgctacgaactggagtgccaggccggttcgctcaccatcctgctgcgcgacttccatcaaggaggctcggcacgtccggcatgcaccttgtcgggcggcgaaagcttcctggtatctctgtcacttgccctcggactttcttccctcagccgccagagcctctcggtagacacactgttcatcgacgaaggtttcggcacactgagcagcgactatctgaacaccgttatggacacattggaaaaactgcaccagatgggtggcaagaaggtaggcatcatcagtcacgtggaaggactgaaagagcgcataaagacccagatacaagtacggaggatagacagttcaagaagcgaaatagaagtggtgaataccctctaagctggtatcgggataaagaaaacgaatgttttttcggctcttgatagtacaagcacctgcattattgtgtatttttgcagtctcataaaaaagaaaagacaatgaaaaagttcatgaaaggagtccggtttactcctaaaaactattccgacgaagtagaagccaaaattcaacattataagaaagaaggatataaactgccgatgcgaagcgcactccgcaccgaggagcagttggccggtatccgcgcaagcgccaaaatcaacactgccctgctggattatctctccgagaacattcgcgaaggcatgtccacagctgaaattgaccatatggtgtattgcttcaccacagaccacgacgccatccccgcccccttcatgtacgaaggcttccccaaaagtgtgtgtaccagcatcaacgatgtagtgtgccacggcattcccagcaccagggaattcctgaaaagcggtgatattgtaaatgtcgatgtatccaccatttacaaaggttactttgccgacgcatcacgcatgttcatgattggcgaagtcagccccgacatgcagagactggtacaggtcaccaaagaatgccgtgacataggcatacagaccgcacagccctgggcacgcctcggtgacgtaggcgccgccatccaggagcatgcggaaaagaacggatacagcgtggtacgcgacctctgcggacatggctgcggcgtcaagttccacgaagaaccggatgtggaacacttcggcaaacgtggtacgggcatgctgatagtgccgggcatgacgttcaccatcgaaccgatgattaacatgggaagctacgaagtctttatcgacgaagccgacggatggaccgtctgcacagacgacggactgccttctgcccaatgggaaagccaaatcctgattactgaagacggaaacgaaatattgacacaataaggcggacacttcaaaacacttatggagatagtattactgattatagggataatcatcggaaccgtagtcggctatctggcggcagaccgcaagtctgccgcactgagggcagaaatcagcgggacaaagaaggaaatagaattattgaagctgcagaaggaagaagccgaagcgttgcacaagcgcatgaacaccgagttcgagaatctctccaaccgtatcttccagagcaaagccgaagactttaccaggctgaataccgaacacctgggcaatctgctccgcccgctgggcgataacctgaaggacttccgccaaaaggtggaacaagtatacagcaccgaagccaaagaacgcttctcgctgggtgaacgcatcaaggaactggtggaactgaacaaccgcctcagcgaagatgccaacaacctgacccgtgccctgaaaggagactccaaaatgcaaggcaactggggcgaaatgattctggaacgtttgttgcaagcctccggactgattgaaggcgaacactacttccgccaggagtttctaaaagacgaacggggcgaagccatcatcaacgaggaaagcgggcagaagatgcagcccgacatcatcgtgaaataccccgacgaacgggaaatgattatcgactccaaagtgtcgctgactgcctatgctgcctacacctctgccgaaagcaaggaggagcaggcacacttcctgaaagcacacctgcaatctgtccgctcccacatcgacgagctcagccataaagactactcgcattacgacgcccaatcaccggatttcgttatgatgttcatccccaccgaaggtgcctacctcctcgccatccaaagcgatgcccacctctgggaatatgcctacaacaaaaaggtggtactaatgagccccaccaacctgattagcgccctgcgcctctcgctcgacctttggaagaaggagaaccaggtaaagaatgtgcaggccatcatcaagcgcggcaccatcttatatgaaaagattgcaggctttaccgacaccttcctcggtatcggcgaccggctggccagcctgcaaagggattacgacaaagccttcaaccagctctcggacggtaacggcagtgtagtacgccaggccgaaatgctgaaaggcatgagcctcactcccaagaaacgcatttctccaagatttctgcccaaagataccattcaagaagaaacagaagaggaaaacgataacattcaataaaacatccaacatgaaaactctgaaagaccgcattctccttcaccaagaaccattcatacgaggtctgtgtcaacaggaattaccaccggagaagtaacagccattctggcaaatgcaccgattcatatcaaggaataaagaaaaagcgacgaagaatccactccactttctttcaatagagaggaaatgccccgaacaaaaaactccggcaaagccctgaaggacaagccggagtttttttatctcaagacggacaaggaagattatccgccaaagttatcgaacatcaggttctgagccggaacgccgaggtcgtcgagcatcttctcaacagccttcgacatcgggccgggaccacacatgtagtattcgatgtcttcgggagcttcgtggtctttcaagtaagtctcgtaaattacgttgtgtacgaagcccggagtgtacttcacgcccgctgcatcggctgccggatcgggacggtccagtgcaagatggaacttgaagttggggaaatccttttcaatctgcaggaagtcttccagatagaacacttcattcaatgcacgtgcaccgtagaagtaattcatcacgcgatctgtagtgtgcagtgtcttcgtcatatgcataatctgtgcacgcaacggagccataccggcaccaccgccgacccacatcatctccttcttggagtcgaatatcggatggaagtctccgtaagggccactcatggttaccttatcacccggtttcagggtaaagatataagaagaagcgatacccggcattacatccatgaagcccgggccctggtctttcggcttgaacggaggcgtggcgatacgtaccgtcagcataatgcggtcgccttcggcaggatagttggccatagaataggcacggatggtttcttcgtcattgcggcacttcaagcccagcagaccgaatttctcccatgcaggcagatactcatcaccgataaggctcttgtcgatgtccttatcataatccatcgaatatttaggaatcttaatctgcgcataagaacccggaacgaaatccatgtgctcgcctttgggcaatgcaacgatgaactctttgatgaacgtagccacattcttgttggagataacctcgcactcccactcttttacgcccagtacgctttcgggaaccttgatggccatatcgcctttcactttcacctggcaacccagacgccagtgatcttgtatttgcttacggctgaagtgcggagtctcagaaggcaagatttcacccccaccttccattacctggcatttgcactgtccgcaggaacctttaccaccgcaagcggaggaaaggaacacaccgtttacagacagcgtattcagcaatgtagaaccggaagctacgtccagttccttgtcgccattgatagtcagttttacattacccgaaggcaccaagaaattcttggcaaccagcaggataacaacaagcaggatgacaaccacgaggaatactccaatgcttgctaatatcatattcatatccattgttttattcctttcttttagatgttcaaaccagagaaacacataaatgccattgccatcagacctacagtgataaacgtgatgcccagtcctttcagtggagccggaacgtcagaataggccattttctcacggatggcagccaagcctacgatagccagcaaccaaccgataccggagcccaacgcataagagacagcatcagcaatgccaccgatgaatttcgggtcgctctcacccagcgtgatgcgctgctgcatgaaaagagaagcacccatgatggcacagtttacagcaatcagcggcaggaagatacccagtgaagcatacagcgaagggctaaaacgctctacaatcatttccaccaactgaacgatagctgcgattacagcaatgaaaagaataaagctcaagaagctgaggtcaacgccttcaatgattgcgttggcagccagcacctttgtctgcaataaatagttgaccggaagcgtaaccaccaacacgaaagttacggcgatacccagtcctacggcagtcttcacattcttcgatacggcaaggtaagaacacataccgaggaagaacgcgaatatcatgttgtccacaaagatagagcggacgaataaacttattaaatgttccatatctcttcgataaattaagaattaaagaattaaagaattaaagcaatgagaacttgtactgcagcagagcagcccatttttcattctttcatttttcattcttcatttatttattactgcttttcctgcaattctttgtgacgtgcacgctgataccagatgatgcaagcgcagagaatcaacgccattggcggcatcagcatcaagccgttgttcacatagcccaacttctgcagaggttcatagttcaagatgttgaaaccgagcagcgttcccgaacccagaagctcgcggaagaaggctacgattaccagaatcttggcatatcccaaaccattacccacaccgtcaaggaaagattcccagggaccgttctgcatggcaaatgcttccaagcgtcccatcaggatacagttggtaataatcagacctacatatacagaaagctgcacacttacatcgtaagcaaaagctttcagaatctcacttacaatagttaccaacgcggcaacaaccaccagctgaacgatgatacggatacggttgggtatcgtcttgcgcagcagtgaaatcactacattggagaatgctgtaatcaccgtcactgaaagccccatcacaatggcaggctccagtttggcagtaacagccaaagcagaacagatacccaatacctgcacggtaacggggttgttcagtcccagcggagtagagaatacttctttattcttctttgaaaacaattgtcccatattcttattcctcctcattattattagttaaaaagttcttgtagctgctcagacaagccttcaacatggcatccacacctacagaagtgatggtaccaccggaaatgccgtccacctgatagtcaggtttctctaccttgccgttcttcacaacaccgaggactacctcgccgttctccaacgttttcttgccggagaactctccctggaaatgcgtgctggcgatttcggcacccagacccggagtctcactggcatgagagaagtaaacaccataaacggtatccttgtcgctgttcagcgcaacatatccccagatagcgccccaaagaccggcaccgtaaacgggaaatacatatttcttctcaccgtcaacctctgccacgaatacgtgcagacggttattttctttggcttccttctcgtaagcggtagcaaatgcaccggtattctctgtcagagtaccgtcaacgttcatcagcatatcgccctttacatatttattatattcagcttcggcatccttcacgtccttgatgttgagtgcagcaagaatctgcttcttcgtgtcaagttccacattcttgttctgcgtctcgcgcaaggaagaacttacgaatgccagcaggaatgcaacgataacaaccattaccgaagcataaatgatagtataactattactattggtattcatttcttttccggtatttaattgttagacttgattgcacgtttttcgcgacggctgatgttaccctgtaccacacagtagtcaatcagcggagcgaagatattcatcagcaggatggcaagcatcataccttcggggtaaccgggattgagcacacggataatgatagccatggcaccaatcaggaatccgaagatgtacttaccagtctctgtacgtgccgatgtaacggggtcggtagccatgaacacggcaccgaagcagaaaccgcccagcacgaggtgttcgtaccaaggcatctgtgccatcggagtgtcgggaccgattgcattgaacacccatgccatgaaggcaccgcctacgaatacggagaacatcgttttccagcttgcaatgcccgtccacaacagcagaatggcacccagagcgatggcgataacgcttgtctcaccgatagaacccggaataaggccggtcaccatgtcccaggagaactccggaacggcgcccgaggtagcggctgcacccaacggagtagctaccgtcagaccatctaccgactgtcccagaccgaagatactgtcgcccgatacccaaacggcatcaccggacatcttcgtaggataggcgaagaataagaatgcacgggtaatcaaagctacgttgaacacgttcatacccgtaccaccgaatacttccttagcaaaaattacagagaatgcagtagccaccgccagaatccacaacgggcagtctaccggaacaatcatcggaatcaagataccggaaaccaagaagccttcctgaatctcctccttcttccactgagccactacgaactcaatgccgagacctactacataagatacaatgatttttggcaatacagccagaaaaccgtagatgaacatttcccagaagcctccggcagcaccggtagcgtggaaatgctggtaacctacgttatacataccgaacagcagcgccggtactaacgcaatgaccaccatcgacatgatgcgtttgctgtcaatggagtcgtgaatatgcgttcccgatttcgaagtggcattgggcacgaacaggaatgtttcgaagccatcaaacaccgaacgaaatgcgtggaatttgccgccttcctcaaagttcggctttatcttgtcgagataatttcttaacgctttcattaatatatttacgattttacgatttacaatttacgatttgccatacgccccgattatgccatttcggcacgaagcatatcgagccctgcacgtacgatgcgctgcacttccactttggaagaacatacgaattcgcagagagcgaagtcttcgggagctacttcgtagatgcccagagcctccatacggtcgatgtcacctgcaatgattgctttcaccaagtattcggggaagatgtccatcggaaatacgcggtcgtattcgttggacataatcatgtgacgttcaccacccttgatacgggcatctatcacatattccttcttgcccatcaaccagctgaagtaagagcggttgacgctgaactgattgaaacgcggcataatccaacccaacatttcatggatttcatctccttcgggaataacggtcaattggctgtcgaaagagccgaggaagccgttcggagaaactttcttaccggtcagcacgttgccgctgatgtagcggaggtctttgtcggtagtcacgttacctttgaaaacgttcgtcaacagagcgccgactttcagcttgcaataagcgggtttcaacacttcggaacccgttacagccaccgtacgggtcatgtccacacgaccggtattcatcagacgtccgatgaagagtacggcttcggcactgatggtccagaccgtttcactcttcactaccggagagatgtggttaatctgtacacccacgttgcctgccggatgtggtccgtcaaaagctgttacggtaacgttctttgcctgcacaagagcagcagacttttgttttacactaatacccagatacgtctttgccatctttgacaaagcgtcgagtcccgtctggaagtttgcttcttctcccttcagcgcgaattcaaaatcgggagccagcggattgctgtcgaaagccgaaatgaagatagctttcggagttaccgtcggatcagcgataacgtcgtacggacgttggcggatgaaagcgaacatacctgcttgcaaaagagcttcttttacttgctggccgctcatcttggacgggtccatcttgccgaattcctcatagtcttgctcagtggcagcctctacgacgatgttcagcaccttgcggcgtgcaccacgctccacgcttgtcactacgccgctaacgggcgaaacaaatttcaattcaggatgattcttgtcgataaacaagggtcccccggccatcacatattcctgctctttgaccaccactttcggagtgatgcctgtatagtcatcgggaaccagcgaatagaatcccggttccttaacagacacaagttcctgggcagcagcgcctttcaggttgatgtcaaggcctttacgtaacttaattacatttgccatgcgtttatttaaaataatggtttcattaatttgccgcaaaagtagcaaaaaagaacgtgaataaagagtaaaaaagaaaggaattacggagaaatttccgtaatccctttcgttaacgaacacgagaacaaggattaggggttaagaattagggattaataccctgcggaatcatagtgcagcccactaatccttaatccctaacccctaatccttatcatcacttttcttcagcgaacatcgggtcccatgccggcaggcagacgggcttttgtttaaacagttccatcactttggcgggaacatactttgtctccactaccagacggaacatgtattcattgaaccactcgtcggtcatgatgagatgtccctgataaccggaagcggctccccaactgttctctaccatccattttacgggctttccgtctttgttcaagtcaacggccatcaaggtcatggcgtgggaagagccactggagaaagtctggatacgttgcttcttgtccatcccgaaggtggtgcccatcagtgattcgtagtcatagtttttcacatcgagcagaccgcgttcggagttcaggaacttgcccacatcgcaagagaagtacatcatggtgctgtccttcaaggaggcaatggccatctctttgatctcctctacgggcaggttgacataagtccagttcttgccgtcgtaacggtggcggtcatagtctatttcatagcacttgtaatactcgcgactggggtcgttcatcagcattacgtagttggtcagcagttgtttgtctccatatttctcaaggaaagacatgggagtgtgatgctctgtctccacaggattacccttggcatcgtggcggacatagtcgaactccgtgggaggtacaccgaggttcagcaccagcatgcggtagatggttccgagcatcgtagttttctccttctccagagcttcgggcttggcaccggcggcagccatgtcacgcagttgcagaccatactctttcagcttcagagagatgaggttggccatgcgggaggtattttcactgctgtttgtttcgggcatggcatctttgggaacaaggccgtatttggaaacaatgtcggccacaccggtaaaggtacccccatcgctcagcggatgctggaagagccattctacggtcttatcagtcaggggactcttggaggtgtcgatgatgccttgcaagaagaggtttgccttctccaactggtcccagaagaagggatagacttcggagaactcgaaagactggaaaccgtattcggcaagagtcttggcacgcatcacattcagccccgtaaacagccagcagcggccagacgacttctggtcggtgatgcctttggattctaccttgatggagaagtgggtatccatgccctgcatattctcctggttgagtgccagtttacggatgtcattattgcctatggcattgcggagcgccttgtcggcagccgtgccttgataactttgcttgatttgtccaagcatttcggggctgatacccccttttccctcttgtgcctgcacagagaacagtgcggcactcagaacaattacagataaaaatcgtttcttcattcagattatgtgtttttagttattgatgtcttgcttcgtgaagcagacaaaagtaatgtcttttttgataattttagtgacatctttagatttattatctattacagtgaaaactattcgggataaaatagtttcctttgcacccacatttcgtacgacatgaaaagatatatactaagcattatcgcactggtgctgttcgccaccaccttttatgcccaggaacagactgcggccgccacaaacgacagcgttcctgcactgaccaaaaaagaactacgcaagcaaaaggtagcgcgtcggaatctgcattacaatattctgggcggacccagctacacccccgacttcggtgccgtgctgggaggaagcgccctaatgaccttccgtatgaaccccagcgacaccacgcagctgcgctccgtagtgcccatggccatcgccttcatgttcaacggtggcatcaatctcttctccaaaccgcaactcttctttaagggcgaccgtttccgtatcttcggaaagttcagctataaaaatacggaagaaaacttttacggcatcggctataataccaataaagattatgtacgaagcgacagtaccagcaaataccggtacagcggcgtgcaaatcaacccctggttccttttccgactgggcaacagcaatatctttgccggacctcaaatcgacatcaattacgaccacttgacggagcccggcaagttcttggtggacgaaccctcgtacaaagaggcaggcggtacggctaatggctataacaacttcaactccggcctcggtttcctgctgacatacgacagccgtgacgtccctgccaacgcctaccgtggtatgtatctggatttccgcggcatgatgtacgccaagttcatcggcagcgaccagaccttctaccgcctagagatagactaccgccaatacaagtcactgggcaagcgcagggtgctcgcgtggacggcacagaccaagaacgtgttcggtgacgtccctctgacgcaatatgccctcaccggaacgcctttcgacctgcgcggctactacatggggcaatatcgcgacaagtcctcgcatgtggtcatggcagagtacagacagatgctcaataccgaccgcagcacttgggtgaagcggatgctcaaccacataggttttgtagcctggaccggctgcggcttcatgggccccactcccggcaagatagagggtgtactgcccaactatggtgtaggtctacgcattgaggtacagccacgcatgaacgtccgcctggatttaggcaaaaacacggtaaacaaccagatgttgttttacttcaatatgacagaagcgttttgagtaacgccctgcctacctgcccatccctttcctatggagaatgatgtttgaaagcctttaatcgcctctcactcacaaggttattcaagctcacctctataggaagctcacttccttataacatcggaacaccttgagaaacaaacattttatttttcttttatttttcttgcatcggtaaaagattatccatacttttggcaatcacatttctttttatcaaaaaagaaagcaaacgagcggatacatgaaagcccttgaagtactcttctggataagtttattcatagtgttctatacttatataggatatggtatactattatatatcctggtcaagataaaagaatgtttccgtaagcctgcgccccgtccgatgcctgccgacgatgctttacccccattgacgctatttatcgccgcctacaacgaagaagatgtagtggatgaaaaaatgcgcaactgcctggagctggattatcccgccgacaagctacgcatcctctgggtgaccgacggcagcaacgaccataccaacgaacgcctctcccactggccgcaagccatcgtcctccaccaaccccaacgccaaggcaagacagccgccctgaaccgcggtatacatttcgtagaaacgccccttgtcgtgttcaccgatgccaatactcacctcaaccgcgaagccctgcgggagatagtgcacgccttcaccgaccctaaagtgggatgcgtggcaggcgaaaaacgtatcgccgtgcaaagcaaggacaatgctgcctcggggggagaagggctatactggaaatacgaatccaccctcaaagcgctcgacgcacgcctctattcggcagtaggcgcagcgggtgaactgtttgccgtgcgccgcgagctgttcgaggaaatgcagacagatacgctgctcgacgacttcatactctccctgcgcatcgtcatgcagggacacaccattgcctattgtgccaatgcctatgccgtagaaagcggctcggcagacatgcgcgaggaagaaaagcgcaaggtgcgcatcgctgccgggggcttgcagtccatctggcggctgcgtccgctgctcaacccattccgttacggtacattctgtttccaatatatttcccaccgggtgctgcgctggtcgctcactcctatcctattgttcctattgcttcccctcaacacaattctcatctttacgacaagcacgccattactgtatgccatcatctggctgttacaagctcttttctacctcatgggaagttgggggtactacctttcaatgaagcatataaaaaacaagatacttttcatcccctactatttcctcttcatgaacgtcaacgtcatacgaggattcaactacctgcacaagcgcaaaggcaatgcaagcggcgcatgggagaaggccagaagggcatgaaactaatactgtaagaatgaaaaacattttgaaacaagctgaaaacgccgagagactgttgaagctgacgtcagataccatgctccttctgaaccgggacggcatttgcatggacatcgcagtgtacaatgtaaacctttggttcatgaaggaagaaaagctgctgggcaagaatctgctccaactgataccgccgtccacttactaccaagtatatccggagttcaagaaggtactgacgcaaaaggtacgttcagtccataattacgaaatgacactgggtcacactacctattactttaaatgcatcatgtacccgtacgacggcatggtcctctgccagtaccgcgacatcacagaacgcagccagcgcaaactggaactcgaaaagaaaaaccacgagctcaacgaaatacaaaaggccgccctcatcggaaactggcaatacgatacccagacccgcatattctgttatgcaggccatacgggcatcatgtgttcggaagaggtgcagcacatcaatatggacaattatctggaactcatccttcctgaagaccggaaaagctttaccggctggatgaaagagaatctgaaaggcaagatggaaaacagcgtggactaccgcatcttcctccaaggaaacattttctatatccgcctcaaagcgtttgcccgcgaacggcagaaagacgggaatgtcactatagaaggatacatacagaacattaccgacatacagaaacggcgcaacgacatcaatctgctgacacatgccatcaacaactccaccgaggacatttattcggcacacgaagacggcacgctgatattctgcaaccgttgcttcaaggaacggcatggcatcggtaatggccaagacatcacccggatgaagatatacgacctgccctcatacggcagggatgaaacatcctggaaagagtttgccaaccgtgtcaaacgtggagagacgaaccacggatacatcgtctaccatccgctgcccaagcgtccggaagtacccgccattgaaggaaacgcttattgggtgacaagcgacaaaggggaaggaaccatctggacattcggaagagacgtatcgacacgcatccggcatgagcagcaaatcaaacagttcaaccagattttggacaaaatcatcgaaaacctcccggcaggcattgttgtgaaggacatcaacaacaacttcaagtacctctaccgcaaccgcgaatcatataaccgcgaaatccccatacaagaggcattggaaaaggatgactttgacttttatcccctggatactgcccaggaaaagagggcgcaagacatcgaaatagccagaaccggcaaagagatgcactggattgcggaagaacgcgacggaaacggaaatcccatctatctggacaaacggaagatgaagattgaaagcaacgacttctcccccatcctgctgaacatcgaatgggacatcacggaaatggaacagatgaaacgggaactgctcgtagccaaggagaaagccgagacctccgaccggctcaaatctgcctttctcgccaacatgagccacgagatacgcacaccgctcaatgccattgtaggcttctcacgaattattgccgaaagtaccgacgaggaagaacggctaggctattacgaaatagtggaatcgaacaacgaacgcctgctccagctcattaacgaaatcctcgacttatcaaaaatagaatcgggcatcgtggagttcaccatcacgcccgtacgcctccatccactctgcaaggagatacacgacgcacatattttccgctgtcccgaaggagtggaactgatatacgaaccctctgacgagaatatcgtgattgacggagacaagaaccggattttccaggtcatttccaatctgataggcaatgccttcaagttcaccaccaccgggcacatcagttacgggtatcgccaggaaggcaagtatgtagcattccacgtcaccgatacgggtatgggcattgcaccggacaaggtggaccgggtattcgaacgtttcgtcaaggtgaacaactttgcccagggcaccggattgggactttctatctgcaaaaccatcatcgaacgtctgggtggcaacatatccgtcacttcagaggtgggtaaaggcaccacatttacttttgttctcccgctggaatccaccagcaaaacagaggcggaaaagaaagaagaggacaaccaggaaacgacagcagagacacactccacagagcagaggggcaaaaatgcagcccccggagattccccgaagaatgaagaggtcggagcactccctacccctccttccaagaccatcctgattgccgaagatacagaaagcaacttcatcctaattaacgccattttaggccgactctatcggctgaaacatgccaaagacggcatggaagccgtaacgatgttcgaggaagtccaccccgacctcatcttgatggacatgaaaatgcccaaccttggcggaatcgacgccactcgcatcatccgtgaactggtaccggacatccccatcatcgcccttacggcctatgcctacgagcacgacaagcaagctgccctggaagcaggttgcaacgacttccttaccaaacccttcactcaagaagtgctgaaggaaaccatcaagaaatggctggatgataaaggatgactgaaaaacagtcatcctccactttatgcaaaaatatcacttcgctggatataagcaatcacatcccctttattgaccacatccccttgcttggcacagacttccaccacacgtccggtaaatccggtccatatcttctcgtattcgccccacggcgtagagatgtagcagaacacctcatcatgctggtacttgcgtccgatgaaaggagcagaagaaggaccttcgacggaaacctcccaaagcacttgccccttggaaggcgcgattatcgggtctgccttggcacgcttcagcttcttgatttcttcttccgagtatccgtttttggccatcgccgcatccttggcacgctgcaggtcatcctcaaaacgtttcttggcaacgccggatttatagtcgcgatactgccggtcgtgcatggcaagctcgaagagttcctcgtcatcatcgccatattcccaaccgttttcgtccatctctttccggtatgtatccagagcatccgggtagttcagctgcgggtccgtatccacgaactcaaagcctttggacttagccagttccactatctcgggcgctaaagtaccggggaggcgtccactcttgcccagaatcatgtcccacgtatggttgtctatcatcgtccaacgctcctctccctttacctgctgcatgaggttcatcaaagccacattcttcacatactggctgaaaggagtcaccaaaggaggataacccagcttgggccatacatattccacttcgtcgaacagcatgacgagcaggtcgtccagactgagttccggctcgttcttaccgcgcagtatcatgttgatgccggaatgcactcccttcaagtcggccatcatggagcccatcatgccacccggcaaaccgcacttcagcaagagtgaggacatatgtttattggtggggtccatgaaataacccaagaactcgtcaatgaactcctgcgtcatggcacgggctttcatgtaggctttcatgtttatgtcgggcacttggaaacccaggtctttcagcatggcctgcacggagatgatgtccggatgaaccttgccccacgacatgggttccatcgccacatcgatgatgtcggcaccgttctcacagacttcgagaatggaagccatggaaagtccgggaccgctatgcccgtggtattgtatcagcacatcggggtgcttctccttaatggttctgacaagctgtcccagcatacccggacgtccgatgcccgccatatccttcaagcagatttcaggtgccccggcttcaatcaaccggtcggcaatactggcatagtattccaccgtatggacgggagaatacgtgatgcagagcgtagcctgcggtatcatgcccgcttccagagcatatttgatagaaggaattatattccgcgtctcgttcaatccgcagaagatacgggtaatgtccacaccctgggcatgcttcaccttgtacatcagccggcgcacatctgccggaacgggatacatgcgcagtgcatttagcccgcggtcgagcatatgcgtctgtatgcctgcttccctaaaaggtgcggtaaaggcgcgtacagccttgttgggattttcaccatacagaaggtttacctgctcaaaagctcctccgtttgtttcaacgcgtgcaaaacaacccatttcaactatcaacggagcaatacgtaccaactggtctacccggggttgatacttaccggacgactgccacatgtcccggtaaacaagactgaatttaatttcctttttcatcatagtcaataataagagattttccttcggttaacttaacatatacaaatataaaggattattctgacatatagtcaagaataacccttaaaaattcatcagaagcaatatgttatatatcatattgctactatcaaattattatcagatgaaatctttcaattcatcctgcaacttctggcgcgtaaagaagatgcggcttttcaccgttccgagcggaaggccgaggcgttcggcaatctcgcggtacttgaaaccggacacatgcatggagaaagggactttataatcgcgtggaagggcattgacgatgcgatgcatttctttcaggtcgtaggcaccctcggtactggcaaaaccagagtcctggggcatgctgaggtgatactgattgtccgtctggtccacaaaagtctgttcgcgaactattttccggtaattattgataaagatgttgcgcataatggtatacatccaacctctgaaattggtgtcgggttcaaatttgtcttcgttatccaaagccttgagagatgtctcttgcaacaaatcattcgcttcttcccggtcggctgtcaacttgtatgcaaagcgaagcagttcttcttgcactgcaagcaaatcttttctaaaactgtaagtattcatactttgctcaatttttaaatagttaataatggtttaggttttacgattgcaagtataaggaagatttgaagccccgggggacggaatacggtttttattaggggtgtgtcttatcctgatataggtagacacatttacaaactaataaatgtgttactattatgacttcaaaacga

SEQ ID NO: 4526 - DNA, 329 bp, Unknown
  gut microbiota DNA sequence
aaaaagaagaacgacctcgaccgcatcatggggctgtacgggaacatgaacgaaagatactggtagcctatgaagttcgacaaccttcatcagattttacgttcactttatgagcagatgatgccgctgtgtggggacatggctggtgtggcgaaaggcatcgccgggctgggtgcgctgttctacgtcgcctaccgggtatggcagtcgctggcgagagctgaaccgatagacgtattcccgatgctccgtccttttgccatcggtctgtgcatcatgttcttcccgactgtggtgctgggcacgataaacagcatcctctcacccgt

SEQ ID NO: 4527 - DNA, 159 bp, Unknown
  gut microbiota DNA sequence
actggaatacgaggcgatggtacgcaaccccgaaaccgcctacctcgtgtccaacgaggaatttgacaagcaactggaggaactcggctggtcgccctccgacatggtgacgatggcgggaatgtatatcgaccggggaatgtacaacatgaagaagag

SEQ ID NO: 4528 - DNA, 430 bp, Unknown
  gut microbiota DNA sequence
ctgacattagggaaatggcatttgttttagggatattcagtaaatgttcctctttctaaaaaatcaagagaaaagctttgctttacgtgagcttttctcttgattttttcgttcaactctcccagtcttctatcttttttgtagaatattgtttacatattcttattttttccttcccacccatgcattatgtacatgtcttttttaggggaagttaaaacctctcctgtttttcctgttattttagttagattatgctgcctttctttttttcttttcgaccttttctatcatacataccgcattggctgtatgtatcccaaagaaaatccaaagtacttccgttttcctgtttctagcttttatcctggccagtgagtaatgttgtttctgcgttccaaaacttccttccaggcgggtagctctttca

SEQ ID NO: 4529 - DNA, 455 bp, Unknown
  gut microbiota DNA sequence
tccgccccctcgaggtctacccccggtatggcatgaaaacgaatcagattcaccctgcaatccagcccgcgaagaagtttcagcaactctttggcatagacctgcgaatcattgagccctttaaaaacaatatattcaaacgaaagtcgacgttgtttactaaaatcatagttttttaacagttccaccatttcggtgattgaaaacgccttttccgccggcattaattcagcacgctgaacggtcagcggagagtgaaggctgatggcaaggtggcagtcattttcttcgataaaacgctgcaatcctttccgtagcccgacagtagaaagcgtgatacgcttcggactccatgcgtaaccgtaggtagcggtcagtagttccaatgctttcaatacctcatccaggttatcgagcggctcgcccattcccatcattacgacattagtcagttt

SEQ ID NO: 4530 - DNA, 278 bp, Unknown
  gut microbiota DNA sequence
tctactttattcttccgtgagtctcttctgcatgaaatgtatttcagcgaaaaaccgcgtctggcggaactgactgtccgctacgaggcattgagatgtgatattatgcagcagtattacatgaataaagactatgataacgtgattcgtattgcaacgtctttggattttcacgatgatactgaccttaatgcttcctgtctggtatattattacaaagcacaggcttatgtgaagttggagaattatccaatggcgaaagaggctttcttcagaga

SEQ ID NO: 4531 - DNA, 489 bp, Unknown
  gut microbiota DNA sequence
ttcgcgggcaaagaaagataaataaggaaagagttgataagaattatcataaagacctttattagcaggtttcgacgaattatccgtaccatcatcatcctgatatttgaaccaatgccatccgatacaattcttagcttcaagcaatcctaatgtaaaatgctgataagcataagctctctcgttttgtgtagggacagaatatccggctcccgactggttattcagatcagagtcctccacccctttcgtataaaactcacttacaagaaacggtttgtccgcccaattagcccaatcagcaatcgctgttgtcagttcaggactccaacggctataatagttgatagaaataacatcacaatattttccggcagctctcactactccttccatatatttaggagttccatgtaatcttgttcccagataaagcaacttatcatctactttcttcactgcctctttcactgctttataatatttctc

SEQ ID NO: 4532 - DNA, 219 bp, Unknown
  gut microbiota DNA sequence
gaaaacgatctaaaatccgagaactgtttgaagagaagtttatctcattatcagaaaagaaacctaacacattaggatcccgcaaataatctgcgaaagcactacctgccaaatatgattcacaccattcactccatccattataaaacacaagacctgccgcgttatcatcgcttcctccgggataactataagacttcgcactcttgaactggctta

SEQ ID NO: 4533 - DNA, 95700 bp, Unknown
  gut microbiota DNA sequence
gtttgtctgaaatacggtcgttacctacgataccatacgaagctctgattttgagaaaattcagccaaggaagcttttcttgcatgaattcatattgggtaggcacccaaccaccggatatggccggaaagaagccaaagcgtttacctttctcaaagttttctgaaccggtatatcctatgttgaaatcgagcagatatgtatctctgaacccataactgacttttccagacaaaccctgatatcttaaaggaatagcagccataccgtccttatttaaatcttttgtgtttttgctatcactcatttcataatgtataagagcggaaatacggtgttcatcgttcagcatagctttccaggttagatttgcctgaagaaagtatttccggtactggctgtctctgtttttagtatattttgttccttctttctttatagtgtgtataagttccagatttccgttctcatccctgcgttccgcccaatacatgtcgggcttgacagaacgtgtctcttcaaaataagagctgttgctgtaggccccctgaatgttaagagccagatttctcagtagaaaactgaaatcttgctgtaagcgtattgtataggtaccagagtaagtattgatgtttttcaaacctgtataattcaacatggcatagggtgagtacacatcttttgcgcccgatttgtaggtgggcagttctcctgtagaataacggacaggaatagtgagcggagtcagtttggcttgggcatcccataattggtcggttgatgctccttgcccgggtagtgcttgtgaggataggtagatatccgaaccgaaataaagttcggttgtcttggtcaggttgaagtctacgttcagacgcattccgtaagtgttgtagtgcacatccttgatgtacttgctgttttcgtcttgcttgtagattgccgattcatttgacatattcatactgacaaaataacgggcgatactaccacctcctctggcactagcgtaatatgtttgctgaagcgaggttcttttcagaatttcatcctgccagtttacatccggataaaagtcgggatccagatgatactgaatggctttcagttcaatgtcatcataaataggctgtgctccacgcatggcacttgcttcattggctaacacagcgtagtcgtatgcacgtaaatattcgggaagcttagtgagataggagattttgacattagcacgaacgtttacttccatcttgtcggatgtcccatgcttggtagtcaccagtacgactccattcgcaccgcgtacaccgtatacggcagttgcggaagcgtccttcaatacggagaaactttcgatatcggcggggtcgatgctgttcaagtcaccttcgagcccgtcgataagtacaagtgcactcgagcttgctccaaacgtaccaataccacgaatccagaattcagacatgttagagcccggttcaccgctggactgtacggagataataccgggtacacgaccaccgagcatattagttagggaagtggctggtgtctgtatctgtgatatatccacattggtgacagctccggtcaggttgaccttcttttcttttgttcccataccggtgatgacaacttcatccatttgttgtgaatcgcttttcagcataatccgcagattcttttcatctttcaaaacgatatgttccatctttttgtaaccgataaaagagaatataatcatatctcctttttgggcagataacttgaaggctccgttaatatcggtgctggtacctactcctgcgcggtcctttaggtatacgctgactccgggcagcgactcattgctttcgtcgaatacatgtcccgaaattgttaattgtttctcctgccccatcattattgatgcgttgcagaagaacagtaatgatagtaatatgtattttttcattagtgtcttctttacatatgattattggggttaacgcagactcaacttgcggacacatccggacccgcagtctgaaatatacaaatctccttcggcagtcaatcctactcccttgggccagttgaaggtggcttccagtggagtgccactttggttacctttaacattttgtctgcctacaacggttgttaccatacctgtattcatatcaattttgcgtatggtctgggttccggcatctgcaatgtacatgtttttttgtccagattcgtctactataatggtcatttggttgttccagttaaacaaacagtctgtccgatatccattaattacttgagtagtactcgtattatcagctcttacattaagatgtccggcatatattatttcttcagattcaggtttcgatacatcctgcatggttataacagaagatgctccgtaagaagtatatagatgagttggttcagtcgggtcgaacatcatgctgacaatatagctgttttctgtttctggagttgtcgagttatatacatcgtttttgatgtattcacataccatatcttccagtttaaatcggaataattgtttggttgccgtacggccgtaaaagtagccatctgtagtacaataagctatacaagctgtagagttgtagtcaatttgtttggcaggagggtcttgtggtttcaagtaacgtcgcttaactttccagtcgttggaaggatcaatctcataaatgacgtttttttgtgtacctacggcgtacagtttctcggttacattgtgatacattacatcattaaccatttctgatatgattttctttgattggttttttttctcactgattaacgcaagacctccattatttccaaatgaagaataacatgaataataattcccttccggatcgcagcatcctacttttaatcgccaagcttcaaaggttgtactggcaagatctccgccaatattatatccactacctgttttaccacatacattttctactgtaaaacgggagatgtagcggaatttgttgtcgaaagtaagagaatcatttccttttactacagagatgatacaggtgtctcccggtaatttaggtgcataaaccatcagaatatttccggatgcttgtgaaatgtatcctttctttttattaaagtagactgacaatttagaagcatctgttcctagattttcaccttctattataattttggaggaaagatatcctgaatccggataaaaagtggttagttttagaggtccattataatttccgcctgatttatcgtcatccgaacaggcaaactgcattattagggataatcccataactattggcagtaacgtttgtgtgattttctttttcataaatagtatttaaatgttaatactcctcggcaaggggagagatttaagttgctaaatgtatacttggagtaaacagagaactctcgcttggcgagatctccgagtggagtcctaggatgtgttttccatgaaattgatattagttaaactattaaggttatttcaaactattgtctgtataggcaatctttcattgtgttttccttgatataggatttcgcttcgttgtatacatgattaattttaatcatgtattttctgtaatgttgtgtgtacattaaatagtttaatatttatttctccataggcattattgttattttatttatactaaaaggctaacatattatatcttttttttctgcaatgccgaactgtgctgttttgtttctataaaaaatacaaattagattatagttcttgtggaacttgatataattatatggagaatagctaaatagtagtctatgagttgcttatgaataagaatgacttttattatattttgagtactaatatagagactcaaattgtattattttgatgagtattcgttggaaaaaacattttattaggaggaaaataaagaaaaaatggggttattatatcattctttaaaaaatagttttatatttgcacagacataaatatgatattggtgaatacaaacagtattggatttattaaaagacagagttaaccaagttccacaagaacttatttgaaatcttcaagtaatagcatcgaaagtttatccttttctttattccgtcatgaattaaagcatctataaaacgtgaagtagtgaatcattatcagattcctacaagggacttttattctcaccgcaatgagaagtttttctcattgcaatgagaaaatattctcaaaggcatgagtattttttctcattatggtgagaattttttctcaaaggcatgagaacatgttgagaatataatgatctgtatctatttgtatattaacttaataatagtagtatgctttccgttttatactactgtttaaatggttgcaaaaaacgctttatccctaaattatatatattcacttgtttgtatggaaaggtatgcttgtctctttaagaatagaaagtgtgtatagtacaactttatttttctattcatatagagactgttcataaatgaccagttgaaactgaaatcttagggttttatgtgtgagtttgggtaaacataatcattgttttcatcgttatagcctataaatataatggatttataatatgaaagggttattgttaattgggatttttatgttttattctatttccagtgtttggggacaggatgtaataaaacaatatgcaggaacagcaatgctatatcctgttcaggaagattcattccatctttctactagtgatatggtgccattttatatcaaccatttgggaagacatggagcccggttcccaacttcagggaaggcactggataaggctaaagaagcacttatactggggcaacaggaaaacagactaacaactgatgggaaaatattactctctacattacagcatttatctgatagttttgagggacagtggggaaaactgtcagtgttgggagagttggaacaaaagggaattgccggacgtatgatgagacattatcctcaattattcagtaattcggttaaagtcgaggctatagcaacctatgttcctcggtgtataaatagtatggatgcatttcttactcgtttgatgcaggataatccttctttacgtatacaacgaaatgaggggaggcaatacgatgatattctccgcttttttgatttaaacaaatcttatgtaaattataagaataatggtgattggctttctatatatgaagcatttgtacggaataaaatatcttctgcttctatcatgaagaaattttttattgaaccggaacgagagaccgatgaagaagcggaagaggttgttatggctttgttttccatagctgccatacttcctgatacaggtctattgacgaatttagacgaccttttcacaatggaagaatggcgtagctattggcaaactcagaatttgagacaatatatgagtaaaagctccgcacctgtcggaaggatgttgcctgttgccatttcatggcctttgttatcagatttcatttatactactgatgaagtaataaaaggcaagtctgataatgctgcgaactttcgttttgctcatgcggaaacggtgatcccttttgtggcattgatgggcatagagaatacggatgttcaaatttccaatcctgattcagtttcccgatattggaaagattatgagatatctccaatggctgctaatgtacaatggattttctaccatgataaagcccgtggggtatgggttaagattcttttgaatgaaaaagaagcgaaactccccattgcaacttctcgttttccctattatccctgggaaaccgtttgcgcatattttaaagaacgaatagaaatggcaaaaaggatacttgtcaaaaactaatttgaatctatttcttgtcagctatttcaaagggaacgcgtaccgaaacccctttcttcatcagattagttaggttggggtagagacgttgtttgaatgattcccaattacggaatttcatttgtgtccatccggcttctgccaatgcgaaagcgcggggatatgccatataagttgcccggttaatgtctcgtatcgcttctccccataaagttcccataactccggtgatatgagcctgatcttcggcaggcacgccatatcccgggtcgaattgatacgacttttccaaagtagtaacgggcataccccaattgttgaactcgggaaaatctcctttcagttgcggataatccagataagcgtactcacctggtgccatgataagcggattaccgtgttttcgggtaagttcaagacaggtaggtgtcaatcctccacgccagcttactaaagttacgttcttgggataaggaaagagatagtcgttggcaggcggataaatattgtccagttcgcaccaaagtataggagtcttattgttctcttggacgaaagaaagcatacggctgaaaaaaggaatcatgagctgtgaagctttctgataacctagctttttcatcatggcctgacaacggctacattgggtccagttcttttctatcacagcttcgtcgcctcctaaatgtatgtaatcggatgggaacaaggaagatatttctttgatgatatcctgatatacggaatacactttctcattgttcgcgcaaagcattagatctgtagttttgcctactatcttaggtagcgtatcggtgtgtgtacatcccaattcgggataggcggctagtatagctactgtatgtccggggatatccagttcgggaatgacttcgatattccgttgggcggcatattgaatgatttcggcaagctgctcttgcgtataataatctttgccgactaatttaggatgtttttttatttcgactctccatccctggtcgtctgtcaagtgcaactggagtatgttgtatttgtaacgtgccatctggtcaatgaagaacttcacatcatttaccggaaggaaatgacgggcagggtcgagcatcaatgcccgatgagggaagcggggtgcatcatcaatgcggattggagaaatctccttgtgtgcagtggcgcacgcgtcacctaatagaagctgatccatcgtcatgactccataatagaccgctcctgcggtagctccgctgatagtgatccctttggaggttattttgatacgataatgctcttttccttccattgcaggatcaaccagcaaacggatgtccgcacggccggattcggatgcaagtggaacctttgcctgcatcctgtcttgtaatatcgtttgcagcgtctttgctgtaaactgcaattccggctgattcaaatagatagccgtctttccggaacggacggtaaaaggtttcccttttaccggtgtgatctgattgggcatgggcaacaaagccgaagtattattctgggcaaccagatatccggctaagaaaagcaaacaaaggcaagtataaattttcatggtcgatattgggggtaaatgtgttcatctgaatgaaatagattcagtgctattgtctgatttgggttaatccattctctttgtcatatttaagttgatagctacgtccttttgcagtcttgaaagagattgttttaccggcatattttacggtacaattttctcccgccttggatagaagggtggcttcttgcaagagcccgtctttccatatcatatctatctcgaaatttcctttggcgcatacaccttgaatcgaaccgtctttccaggcatccggcaatgcaggcagcagttggatgaatcccatgtggctctgcaacagcatttctgtgatacctgctgttccaccgaagtttccatctatttgaaaaggcgggtgtgtatcccaaaggttatctactgttccgtttttcaacagattaccaaagagggtataggcgtgatttccatcctgcaggcgtgcccattggttcaacttccatcccatactccagccggtagcaccgtcgccacgatgcaccaatacaactttggcagcttctgccagttcgggagtagtgataggagaaacagtgtgtccgggatgcagaccgaagagatgatttacatggcgatgttcgtctttcggatcgtcgatatcggttgaccattccagtaactgaccataacgacctattttataaggaacgagattggcaagcacatgttcccattgtttgcgttcttttttgtctattcccaactctttgctcgcttggatggcatccagcaggatttcacggacaactgcatgcacaaatgtagctccctgatcgatagggccgtgttccggtgaagtagagggggcagccgtatacgttccgtccggtttatgccagagatagtcaacagtaaagttggcactgctcttaatcagttcatatcctgtttctttcaggaatttcaggtctttggtatagtcataatattcccagacgtgagttgccagccaggggcctgccatcggattaaagttccaggacatgtcctgactttctaatggggtggtaaagccgaagatgttggcggaaatagatgctgtccatcctcttgcgccaaaataagactgagcggtcttttctcccggtttcactaaggtacggatgaaatcgattaacggaagcatacattcatccaggtttgtagagcaggctggccagtagttcatttggatattaatgttattatgataatccacacgccaggggccgtctatgttgttatgccagatgccttgcagattggcaggcatatttcccggtcgggaactggctatcaacagatagcgtccgaactggtaatagagtttctccaagtagtagtcaggttgtcctttccgatagtttttcagtcgttgagcagtgggcagattggatgttttcactgtaggattcaactccagtttcacccggttgaacaaagaagcgtagtctttgtagtgttcgtccagtaagttggcatatcctttggctacggcatccttcatccattgctgggttgtttcaagcggattaacaccgacatatgttttaggatcggtaaagtccggtgcgaaattcattttataatcggtatctgcagtcacatagaatacgacttcatcagcttctttcactgtaatccgtccatctgtgttgtttaaggtaccgccttttactgttgcctgaatacggactgcatatttcattccattattatccagagaagccgtataaacaagaccattattaccgtcggcagagaactgtcctgtagataccggattgggggcatatctgaaagtgagattctgtttgcccggttggtcggcactgaaacgcatcaccatcacattggcagggtaagaaataaaatagttacgctgatatgctacgtcatcttttttgaactgaaccaccgccattgccgaatccaatgataagatacgtttgtagtcactcatacctattgtgcttaatcctgtttctacatagaattctcccattgtagtgaagttaccaaaccggaaaggcttttctctggaaaattcataagggacttcactgttgaaattctcgcgtgtcagtttttccgcttttttctggtctccttctacgaacgctttacgtatttcgtccaggatgtacgcggactgtttgttcacattccaatagtaatctgctcctttggctgtattaggaccgccacgccaaagcgttttctcattaaaagttatgcgttccgcctctattgaacccaaaatattagcaccgatacttccattacctataggcaatgactgtgattcccaactggcatcctgtttggaactatgccagacttcttttccttgtaatgtattgggagaatcaaaccagatagaaagtcctttggtataatccgtatcttctgcatgtcccgtaaaaatcgtaaataaggcacaaaataggagcgaatgtttctttctcattgtcgtagcgtgtttattattagataaaagtatatttcatgaatttaagtgtgttacagctctttggggctgaaagcacaaaagtaataaaaaaacagctatatacaaacaatatgtcttgtaaacagaaaaaagactgttcgtctaaaaggaacagtcttttttctaaacctagtattaagaaggctattgttcccggattttattctattccgctttgatccggattttgtttcagatagtagttaattctttcggtccaaggtttgttttcgagtggaaagacattacattgtttcgcccatttattccatttagcctctagttttttcactagcttcggatattgggcggacaaatccttggtttcgaacggatctgccgataagtcgattagctcccatggttcattccggctgccgcgtaccagtttccaatgattggaaataatggcgcaggaactttgatgctcaaagtataattctctgggctttatcttttttccatggattggagggagtaagctcttgccgggcaaattctctttgaattctgacggataagtagctgtggcaatatccatgcaggtaggcagtatgtctataatgtgggcaggttgcctgcaaatctgacctttcatcttgtttttttcggcatcgccataagataagataaaaggggtacttgtgcctccctgaaaacattgtgacttatagcttctataaggagtattgctcaaatcagccataagctggcccaggtatccgccttctttggttgcaccgttatcgcttaagaagataaatacggtattgtccagcatccctttctccttgatggtttccaccagttcaccgattccgctatccacaatttcgatcatggcggcataggttgccatatcggtaatccattgctcctgttgctttggtgtgagtgtttcccaagagggacgttttccgtcaaattctttttggtagacaggataatccatttcgtccaaaatgaacttcagctcctttaacctgtcgaaacgttgtttacgcaacatgtcatatcccactttatatcggtctctgcatttctctacacgatcggcaggagcttggaggggtaagtgaggggcataatgagctacgtacataaacatcggtttgtctgtagggtgttgcttgacaaaactgacggcggaatcggtgatggcagtggtatagtaatagtcatcggggaattctttgattcgggtcagattgctgtataccggtgttggtttataataactgcctcctccgctcaggcaaccgtaatatttgtcaaatccccgttgggccggatagctgccattgggagtatcaaaagctccgtccactgtgacgtgccatttaccgctcatatatgtgctgtagccattcgctttcatcacctcggcaatggtggggatgttttttgtaatttgtcctctgtatccggggcggtgttcatctactgccgtcatccatcccatgccggcttcgtgctgataatgtcctgtcagcaaagcagcacggctagggcagcttcttcctgtatttttgaacaggctgaagcgtaccccgttttctgccagacggtctatgttgggagtctggatttcacttccgtagcaacccagatcggagaatcccatgtcgtcacataaaatcaatacaatattgggaggagtacttacctgtgcttctgtactggcgaaactcgctcctaataaaaatgaagtatatactattctatttatcataactgtattttaataagtttgtgttttttctgtttatagatagaactatgcgcattattcaaagtcactctgttgtttttcgacttctttcagtttcaggcggttcagttcctgttgtaattcaagtacacgtttctcacaatcggatggagcggtatttattttatttccggcatctttgcttgcggattgtgcttgtgtcagttcatctttgtctgctaccagcgtatgttctgatggaaaagtaggaataatcagttctgccggaaccggcgtatgtttgccttgccataccactgatgcacggattttaatttctcccggtgtagtggtggaccttaccagcaccggagcagttccccaaagtaccggacgtggattggtgaatgtttcttcattggcaaccagttggccctggccttcgatttcgaactttacttcataattattcaaacgcttgatgtttccgttttcatctgcgatggctgcaatgaccgtcacgatgtccgatccgtccgctttcatctgtattttctcgtcatctgcccaaagcaacagttttgacgggcggcgtgtgggtgttactttatgtgtcgcaaccacttttccgtccattaatccttctgccagaaggtaagaatctgcctgtttcttttggcgtgacagctttttatcatacatgacatcaaatacatccttgaatgtgatgacgggtgagggcattccgctttcatttgccggcttatgataagtatattctttgcctcccttgcaatacgtgaggcgaacttcgtcacagttgctatatatcgttacatctttcggagagaatggggtcatggcattggctatgtaaatcatcggtccattatctgcgatcaattctttgttgggttcggcaggacgctgggaacagaacatataataagatagtttaggttgtcggaaggcatccatgatacctccgtaaaacgggtcaggatgatatcctctctggtgatcgaacgagtgccacaggcaaccgcccatatgttgtcttgaagttctgtatagtccatcataactggtgagttggtaatcgtttttggcatatccctgtgcctgaatcagcatcggtacttctccccagccacgattgacccggcttggtgagttgtgagagttccagtcatccacattatctccccattcgcgggtgaaataactgattttcggatccagattttcggtattaaaggctcctccacctccgttcatcggatgggtgaagtgtatcggaaagtattcgtgtccacgtgcggttacatcacatccggcatagcaataaggatacggatattcttcattgagaatgtccactacatttttagcaaagtcagccggataccatgtttcgttcagaatcggttcccacatccatacactggggtggttgcggtcgcggcgaaccatattgcggatatcactatatactctctgagcaaatatcggctgatcattccagaattgccatcccggtgtgttgacaataacaaacagtcctaattcatcacaagcatccataaacgccggatcttgcggataatgggcgttacggataacacgcattccggcatcacgcaacttcttcgcatcccgccaatgaaggctgttgggtaaggcgttgccaatcactgcaaaatcttgatgacggttggctcccatcagaggataggggtaaggtttgccatttagccagaatccgtcttttcctttaaattcaatgctgcgaatgccgatacggcggtaatatccgtcgatggtgttaccggctttgtcttttatataaatgtgtagtttgtaaagataggggctgtcgggtgaccataaatgaggtgtttctacggtcactttgcaagaaatttgtttcgcaagatccttgcttaccgacaaaccggtctccttagagagaacacgtttgtcgtcgcggtcatagagttcatagattattttaccactgaaggattttccggaagtgttacgtatatgtgcatccagtttcaactgtgcggattgctcggaaactttgtcgaaagagacaaacaatccgcctccggctgtctcattctcataattcggatcggtaatgaatactttgttgtgaactatcatccagcaatctcggtaaattcctccaaaatatgcaaagtccagtgcatcttgcggtttgccgggagggtaggagggatcgtcactgttgtctgcccatacggtgataacattgtcttctccatacttcagactggaagtgacatctacgatgacaggtagaaaaccaccgaaatgctctttcagcaactttccattcacccatatttttgattttcccataatggcttcgaagtggaggaattgttgttttcctttccagttttcctcgggagtgaaatgcttgcgataccagatttcaccctgataattgatgcatccgcttgcctcggtggggagatattctatgccatcgggtaatgatacgatgttccagtctttatcattgaatctcggctgttccgctccttcgatattgcctttataaaatcgccaggcaggattcatgttatacactgtgcggcctgtgttggaaagctgataaaagcctgctgtggagtaagatggctggtaagtgtcggcgttagctaccagtgttccagccaataacagaccactgagtaagattttccaccatgttgaagtacttttcataattcttagatttgcttgattgatctatctttaatatattaatgtcagactgttttgttttgcattagaacttcgtcccgccaaggtacaaattttccaatagtttgaagcataggacgctgagctttattttttcttaaacattagcccggtgcatcctacactttttaccatatccgaaatgacctatatctttatttaatacctatcgggccttcattggcttgaattggccatcctggattctggtaaataatagaagtactcagatcgttaggatttgaggccgtaattctgaagtgcgtgatagcgataggattcagataatgcgcttcacaccatgtgtatcctgcatcatacatcagattatttgtcttcacagaacggtaaggacaaagatacttaccgctattaacatagcttgatacattggaggtttgtccttccgttccttcctgtatcagaagattttttccgtcctgcatgtatttatcctttaaatcggattcccacaagttaactccttggattacaaattgtttaacctggtccagtgctctccagcgttttaagtctaacatgcgtaaaccttctgcaagtagctcacaacgccgttcacggcggatgttatatagtagaggagagactagtttacctgccgaatatatggcccagtccagttctttggacagatcggtattgttcacggtcactgtatagtctcttggtaatccggctctttcgcggagatctccccaatatcctgctgcctccgaaccaatggaagttccattatgttccatacagtcagcctcgatgtaattgagataagcttcggctgcacggtataccggacacccttcaatcgctgtgttgccatcccgataccagtttcctgataatccttacgtacctgatagcctgttacgcatctcttttccgttatatccagaagttgtggaacctccggcagcaaatcgggagtaccattcatcacattcgggctgagagtctcacccggtgtcatcaggaatagttgtagacgtagatctctgtttttgcgtacattcaataatgattcgtcacctttatactggtcggttgcatagatcggcttaccgtcacggcaaaggaaactttctatatattgccgggtaaatccggtatttccacctacgcgaatatagaaaggagctgagtgcacaatcttatagtcaagcagattatacgcacgccacattaatatttctgaatatccttccaggctgttcgctgagaactgagcaaaataggggttgctcattttatatttgtcttcgtctgttttaactgtttcatccatgcagtcttttgctgtattctgtaccaaggctgcattgcctatcacttctttggctgccgctttggcctccttcagaaaaaatgcgatttccgtatcgatattaaagtccgcaatgtcttctgcctttcccggccatcccggaccacccggtactagagcagtgcctttgtgataagtcagccaggaagcttcaaacagagctgctctggatttcaataacagagcagcatttttggtaattcggttcttcccaccggatatattattggttagcaaactgattgcctgatccagatcttccagaataaaatgtgctactttatagcggggggcccgtttgctggcctgaatcagagattcactttcatccggcaatgtgttttttataatcgggaagtcaccgaaggtctctagttttgacaaataattcttagcgcgcaggaaatacatttcacctatataatgctttatgtttgtttccgaaccttctatctctcccttttcgaagcggggcactactgtttcgaggaagtaattagcttcacgaatggtagagaaataccacggatcattacttgctggattatcataagcttccggaactttccattgaccgggaatccatttcttatcatagtcagtggcagcttgattatctgtagcattgtcgtttttccagattccggcattaaatccctcatgcgtcgtgaagttgtaatgcttcacagcataggcagccaagtcattttcagtaaagaaaaagttgtccggggtcacactgtctaaaggttccctgtccaaaaaatcattgcaagaagcgagtataaagcttccccctgtcagcaaaaataaatatttaattatctttttcatacgtcatcaattaaaagttaacactaaatcctgtggaaaaagtacgggacaacggataagtttttcctgaactgttcgatccgtctttcgctccataaccggtattaattgtttccgggtcgaatcctccgggcaatcccgtaagggtgaataagttttctcccgagaagaagactctcaggttggaaacacctattttgcgtgtgatctgggcggggatggtatacccgatctgcaaattcttcaaccgtacataggcggcattctgaagatagcgggtttgcgtcttttgattttttgcgaagttatcaaccaagatacgcgggaaataagcgtccttgttagcgctccagaaatcatccccttcttcgcggaagaaatcaagatgagaagtaaagcaggccgattgccagatccctcctgtagctccccagaacatgttgtcgttcaaccaggcatcgcgttttgccactccttggaagaataagcgtacatcaatgcccttccaggatgcattcagatccagaccaaaacggaatcgtggggaagtattgccaatcacttttttgtcacctgggtcattaagcgtagctccatcggaaatcttgccatcaccattcaggtcccgatacatgatgtcacctgcgccccatttgactcctaatgcatcttgtccgccgttgggcagtgaagcaagatgagcatccatttcttcctggcttttggctatgccaatggtttcgaatccccatatatctccattatatttaccgacataccacgtgtttattttaccggtcgtgtttgggtatttgaggattttctgacggtcgtccgaaagcaacaggtgcactccgtagtcaaaatctttaatgcggtcccgccatcctagatccaattcaaaaccggtagactgcatatccgcattgttcattttgggtacatttgcccctaaagttacaggaagttcgggagctggtcctaccatattgatagtcttccggttgaaccagtcaaaacttacggtcagacgattgttcagcatacccaggtcaaaaccgatgttccatgaccgcatggtttcccatcctaatagcgctgaaatcaaatccggtgcattcgctgtgttgggacggctgttgttaatcagccagtgggagtcgggatcttgggcgacaaacttcattaactggatatacggatataggttttctgtattctgattgcccagctctccccaggaaccgcggatctttaacgtattaatgatatggctggtaggttccatgaatgcctcacgggctacgttccatccggcagagaaggaagggaacaaattccagcgtttgtcttttgcaaaacgtgaagtaccgtcataccggagattgacttccagcagataccgttctttataatcataattgagtcggccgaagaaaccggctgttgcccaatgtgtcagtttggacttatcgatagtcgattcacccgtagcggcattaatactgggcacggattctgagatcaagtccagcttggacgcctgcaactgccgccatttatttacttcggcctgaaaaccgaccattgctttcagatggtgtgcgtcggcaaatgatctgtaatattcactgtagacgttggcattgaaataattggtacgctcggcaccttcggtaactttcgacgttttccatgtatcaccggaataaggttcgccggctacattcatctgcggcacctttaaataatccgtatgggtgaaggcatctatcactttataattgatttctccgaagattttccagtctttgatcggttctatcaccacctggaactgttggtatagccagtcagtctgcgaattgttatcgcctccatagagaatcggccggataatcgtattacccatcggataaccgttggggtctacagttggttccatcggccagcgtttggctatattctgatataaggtattatcagtcatcgcggtaggcttgctataatctttccgcatatatttcatgctgtaattcatgttcagccacggataaagctgtgcgttaatcttgctgctcaccgaataacgctgtaatttatcacggcggatagccatcattccttcctgtcccatatagttgccggagaaataatactgtattttttctgttcctccgctgacgctgagagaatgctcctgcgagaatgccgtacctccgaaaactacgtcataccagtctgtattcgtattaccgatccagtcccagatagtgggagtatttctgttcggttgggtagtagtggtaattgtgcctgatgcgtaatctttgatagcctgaagacgggtatcgtcaaactgtaccgctgttttaccatcattcaactgcattttgttgaagtacatggcataagtgtaggcatctgctacatccggcagattaatggcttctgaccagcggaaactattattataattaatgttgactttccccgcttttccttttttagtcgttatcaacactacgccgaatggcgcacgggaaccatagatggaagaggcagccgcatccttcaacaccgaaatactttcaatatcattggggttcagcatattcatgtttccttccatgccgtcgatcagaatcagcggagatgcattggaaccgtcaccgatcgtaccggctccacggatattcactttcatgtctgcaccaatttcaccaccgttgccatccgaagcataagaaaaattcattcccggaactaatccttgtaatgcttggcttacattagaaaccggacgtgacagtaaatcctcggcatttaccgtagataccgaaccggtcaggttgactttcttctgtgtaccaaaacctacgacaacgatttcgtccagtgtcttggtatcctctttcaggatgaccgacagacttttgccgggctgtgccttcacggtctgggacatatagcctacgtaagaaaccgtaatcgtcacattggcagatgctgtattcaatatgaaattcccatccaggtctgtaattgtaccattctgggtgccatcttccattacggtagcgccaatgaccggatcgccaaacatatccgtcacttttccctttatctgcacggtttgtttcgcggcaggcgcttccactatttgcgtagataatattatttttttattacgtacggcatatttgacattggtgtttttaaacacttcattcaataaggtaaatatattgctctgttcggtaactaccgatacccggcggtctacatcaatatgatggtcattgtagaaaaagctaaaatcagattgtgcctcaatttgtgacagaacttctttcacagtcaagttttgtgctttcacagagatcatagtacgttgggcgtagctgtcgttagcacatagaagcccaacaaaacaaaaacagaaaacaaagagcagtttcatagacaaaggaatttttttccaaacaataaaaacgggattatccgcccacaattgttggacataattgtttttcttcatatatttgcatgaattaaagttaagaaataattttctctgtttgtattcaaacaggttaaaggctttctcatacaggctggatgcgggaacatctgcctgtatgcttttttttaaggcggttggaagtttctcatacgtattataattttattggttaaacatgaaaggctttaatatatttcaatctgcctcctttcttcactttgattatttgtcagtttcacattacgccagcgtatgtgtgaggatattttaaaattctccagaatctcttctatatattgttctgtaaacgctccggtaaatgtatatttgtcaaatttcgaagtgtttacaataaaatctacattatagcgtttcttcagtatatgcaatgctgccttaaatggagttttatcaaaaataaccttttggtccatccaggcaagctccgattcgccattggtgttgtatgacagaatctgtccgtccttattattataaatcactttttgtccgggacgcattagtattttacttccctgtccgtctttctcataaacaaattcgacctttccctctaccaaagtggtaatcacctcatccatctcatcaaatgcttccaggttaaagtgtgtacccaaaacttccactttagatttttggggagtcgaaacaatgaatttatgttcagggtctttcgcaacttcaaaatacgcttcgccattcagactcacttcacgaatgttaccggtgaaaatggaaggatactttaagactgagccggagtttaagtacactaaagtgctgtctggtaatctgaaagaagttatcattccgggttgtgtccggacttcgaatatctgggcatggacgggggcggtagattggggttggttaagcaaaaccaaaatagtaatagccatcggtatgagtaaggcaacagctgcacgttgtatccaaccccaccaggaaatatgatacttattctcttgcatccgtcccttcacttttgatagctcctcatccatatccattttttcagtaacctgttgcgtgtcagtcataagaagaagtgtgtaaatgtccatggccttctttttattttcatctgacaatttgatccaggcttctatttcctgaatttcgtctgctgttgctttaccatcataatagctgatcagcaagtcttctatagttgaatgatgcatttccatgataaatttattaaagagacaagcgggaaaataaaactactaaggttatttaaataattaacattaataaactttatggttaataactgtgttattttacgcttatttaaaatataagcattatcattgcagccatggaatacagcaatgaagatgcgtacttattgatggcactaaggagaggggagatgatcgcttttgatagtatatttaaaaaatactacccgattctttgtgcgtatggaaataggtttgtagactatgaagagtcgaaagaaatagcgggtgacgctattttatggctgtgggaacatcgcgaaacacttcaggttgaaacttccttaggcagatatttactcaaatcggtttaccatagatcacttaactgcatcaagcaaaaacagctgaagaatcatgctgatactatgtattatgaggagatggaaaagctgatacatgatgcagagacttaccagttccaagagctttcaaaaagagtgaaagaagctatagatgcattgcctgcttcctatagggaggcttttgttatgcatcgttttactaaaaagagctataaggaaatagctgagagttccggggtttcagtaaaaacaattgcttatcgtatacaacaggcaacaaagctgcttcgaaaagatcttgcagacttactaattactatgatcgtttgtgtattgttagtcgttcgttaactattgctcaggcttacctattgctgaaaaaaagaactttcttaaaaaaggaatatttaatcagccaaggaatgctgtaaattacattacggataaataagaagtagaaaaacgcctgcatttgcttgaatgaaaatctctctttcttttatttaagttgtatgctgaatagattgatatgatattacttcttatgttttcttttagatgatgtattgactgaaaggataactttttgtttaatcttgccttttcgctatttgtgattagccagcgtgaaaacaagctccggatagtctttttatctcttcctcaccgaggaaaaacaggttcctcggtgaggaagaatacgttggttttaaaccaaggaggcgttcctttaagaccaacgagtggtttagtgatagaaaaagatgcatatctcatgtgaatttatgcaataataatctgttattccgtatattattgcactaatttatgcgctttattctttgttttactatttttatttcaactgtatttttgtttaatcttaaaaatagcacattgatgttgggctgcatgtacatatttctaagagaacgatgggtttatcaactttcttgtttcaatgattcgtctttctgaatatagacagtccgtgtcggaaaagcaaggttcaatcctgctttattaaaagcagccagtatttccatattcatatttgaggttacgcctaaaatatctccttgtttctctataaaatagatatacatgataaccaatgcggaatctgagtattctgtaaaaacagcgactatatcagaagggttagaagatacattttctactcttttggggatggatttcaatagttctaaagcttctttcatcttttcggaagtcgtatcatacgtcagtccaagattcaagactactcggcgcataggttcggatgaaatattaacgatagaagtatcggtaatcttataattggggaaagttataatacgtttgtcgtaattcattatttttgtgcttcggactcctacgtctactaccgttccttcataactatccacgcgaattgtgtctccgatgctgaaaggtttatccgtcagaatggtaaacgcaccgaaaacgttttttactgtatcttgtgctgccaaagcaaatgcgataccaccaatacccaaagttcccaacagagcgctgatgttaactcccacattactcaaagccatgacgatgccgatgagccagactataaccaagatggttcttttgatgattggcatcattttgttagcttgtccgttggactgctttccccagtaaacctgaagtaaactactgaacaaacggccgaaaaaccaagtaatatccagaacaatcaaaatgctgtaagcattgtcaactactttcacaaaactgtccggataaaccaaccgatggatagcgatccagattcccaacagaattatagcaaacttaacaggcgcttccaaagagtaaaaaatgacgtcgtccaggtgattgtcggttcccgtaacaaaaggtttgataactttcttgcctaatagcgataataatttcacaataataattgctcctaaaataataagaatggaaataccccagttttcaatagtatttccccataattcattttctaacatagtctaactgatttataattgtacttttatttaataatatcaagttgatctcctttttattgacgatacaagataagagctgaagatgctgcgatagaaatatcccctcccgataaatgctcctgactgtctagatcaatttgtccgttatggcagactataatccaatcttgttccgggatattgatgtctgcctgattccggttaccgttgtatgcaactagaatttctttccattcatcaccgttagcatactcgcctagagtataagcgatgacaccggaatcgcctgtatcaagaaaatgaagccatttctctaagccctctgctgtaggaatacggaaggcgggatgttttttgcggagtgcgattaatgttctgatataattgaatatatcacggtttttagcttttaacgcccagtctatttggttgacggcgtcagaagacttgtagctgtttggctctccctgtttgtcctgcatgatttcttcaccgccacgaataaaaggaataccttgcgaggttaaaagcacggtgtgtattaatttgtcaataggaaccagttcttcttcagaatgttcgccttgaacagataatttcagcttatctaccagcgtatatccgtcatgacaggaaacaaagttaatcatttgagagggagcagcggcatatggaccgtcacagtaaagtaacccgctataatctacctgtgggtgttgtgttccgccaacgattccatatttgacaggttcaaaatgcccgttgatatttccggaggcataccctggttcctgttcgtcaaaggtacttcctttcagaccgtcacgaaattcatcattaaatacggaaatacctttcatttttcgtacattctcctttacagcccgttgctcgaaaggtaatggagaatctgctgctacccaaccttctccgtatacaaaaatggtggggtcaatttttaataattcctctcttaactggttcatggtgtcgatgtcatgtatccccatcagatcgaatctaaaaccgtcaatgtgatattctttcgcccagaatttgaccgactcaatgatataatggcgaaccatttcgcgttctgaggctgtctcatttccacacccggaagcatttgaataggaaccgtcgggattctggcggtaaaaatatcccggaaccgtcaggtcaaaattagaatgctcggttgaggctgtatggttataaaccacatcgagtacaatacgaaaaccattttgatggaggctttttaccatctctttaaattcgcggatacgggtggtgggggtgacaggatcggtggagtaacttccgtccggtacattataattcttcgggtcatatccccaattgtatttgtttttctccaatttcctttcatcgattgtggcgaaatcgaatgaaggaaggatgtgtatatgcgttactcccaattcttttaaatgatccagtccggaagattctccttcgggagttttagttccggtctctgtcagagcaagaaacttccccttatgttcaattcctgagtttggatcaatactaaaatcgcggtgatgaagttcataaagaatgatatcggaatacattttcagttcgggtgactggtctgattcccaaccttcgggatttgtctcgttccagtcgattacagcagcgcgattgccattgatgccgactgcttttgcccagataccgggtgtttcgtccagccattttccatctttttctatttggaaggtgtagaaagaacctttcagatcacggtctatatggatacaccaggtcccattgtcggctatgtccatttccagttgttcttccggatctcccgcttcgccggatgaatacaggtttaaacggacattatcggcacttggtgcccatagcgtaaatatggattgctggggtgtatagactaattccaaatcgttctcataatagcacggatacttgtcatacgaatccaactggtccggggacggatgatttttcaactctctcatattttctaattttatattaatactatataaaaaaaataattatgttgtggaataaatgaaccgaattattccgttatggtatgactgaaaacaaatgtgaaatcaaaaattcctgttcacgctctgataaatatgaataataaaagaataattaaggtaattttacggtgttgtaaatcagctttttatcctttgcacttttttgtatttgttagcttataatttatagaaacgtaggaactttgttaacatcatctttgttttgtataaagttaattataaaaaaaatgaagcgtatggaaaatggtgttatgatgcaatattttgaatggcatctcccgaatgacgggaagttatggaaacagataaaggaagatgcgtcgcatcttcgtgatataggtgtgactgctgtttggattccccctgcttataaggccgatgagcagcaagacgaaggatatgcgacttatgatctgtatgacttgggcgaatttgaccaaaagggaaccataagaactaaatatggtacgaaagatgaactgaagaaaatgattgacgaattgcacaaatatcatattgctgtttatctggacgttgtattgaatcataaagcgggtggtgattttactgaaaagtttatggtagtggaggtcgatcccaaggagagaaccaaggctttgggtgagccgtttgagatacaagggtggaccgggtatagttttcacggacgtaaggacaaacattcggattttaaatggcattggtatcatttttccgggacgggttttgatgatgcgcaaaagcgcagcggtgtttttcagatacagggagaaggaaaagcttggagtgagggcgtggatagtgaaaacggtaattatgattttctgttatgtaacgatattgacttggaccatccggaagttgtatctgaattgaaccgttggggaaagtgggtttccaatgaattgaatctcgacggaatgcgtctggatgccattaaacatatgaaagatcaattcgtcgcacaattcctcgatgcggtgaggagtgaaagaggcaatgatttttatgccgtaggtgaatattggaatggtgacctggaagcattggatgcttatatagaagctgttgggcacaaagtaaacctatttgatgtcccgttacattataatatgttccaggcatcacaggaaggtaaagactatgatttgagggatattttaaaagatactctggttgaacatcatcccgatctggcagtaaccattgttgacaatcatgatacgcaacgcggaagttctcttgaatccaatgtagaagattggtttaaaccgttggcttatggcttgattttgctgatgaaggaaggctatccatgtctgttttatggagattattatggtataaagggggagaagtctcctcatacccggattattgatatattgttggatgcgagacgaaagtacgcttacggtgatcagatagaatacttcgaccatccttcaacaattggctttatccgtacaggagatgaggaacataatggctccgggctggtcttccttatgtctaatgatgaggcgggaagtaaaataatgagcttgggtgggaaacataaaggcgaagtctggcacgaaataaccggaagtatatccgaagaaataactttagatgaagaaggaaacggagagttctctgtcgaattccgtaacctggctgtttgggtgaagaaggattaggtatatggtacttatataattaattatgaagatgcctgttacagttgtaatcaggtatcttcatgatttgtatgaaagtcatttgcagacagaaagattctctgtatctttgccgccatggcagaaagaagcgaactacatacgagaaataaacacaatggacaatatgatttttcattgttgacagagaattatccaccgctcagaaaatttgtacttctcaatcctttgggaatacaaacaatcgatttttttaatccacatgctgtgaaagcgctgaataaagcattgctgataagttattatggtatccgctactgggatattccaaggaattatttgtgtccgcctatccccgggagggcagactatgttcattatattgccgatttaattgatctggagagagtcagtaatacggcaaatgaagagaatggagataagccaaaacgacagtgcagatgcttggatatcggtgtaggtgcaaattgtatttatccgattattgggcacgttgagtatggatggatgtttgtgggttccgatattgatccggtatctatagaaaatgcgcgtaagatagtgacttgcaatcctgtattggcacataagattgatttgcggcttcagaaagacaatcggaggatttttgacggaatcatcgctcccgatgaatattttgatgtaacaatttgcaatcctccgtttcacagttcgaaagaagaagcagaagaggggacattacgtaaattgagtagtctgaaaggggagaaagtaaagaaaaacaaattgaatttcggtggaaatgcgaatgaactttggtgtgagggtggagaattacattttttgctgaatatgatttctgagagccggaaataccggaagaattgcggttggtttacaagtctggtttctaaggagaagaatctggataaactatatgctaaattaaaagccgtccatgtatcggaatataagataattcgaatgtgtcagggtacaaaaaatagcagaattttggcttggcgatttttggaatagctgattttgttttttcgataaacggatatttttaaagaagattatctgtataatgaaaaaatattgatgattaagaccgttgtttgttataatgtgcctggatttgttgttgttttcgataatagagtcgtttctctctctgtatattctatatgagtattaattcccctttctccttttctttgatatgccgatatttgtagtatgagattatagtgctaggaaatatcaaatcaagggaatatatgtttgttgttagattgagaaactatttacatttgtcgtttttggttatatttttattgttttcctcctgtattgatgagttttataaagatacacctaaagagggatatataacaattaccggtatcaatacacgtgcctatacaggagcctatccgggtgacgggctcgatgataaggttgaaactctgcgtattctggctttcaataagacaagtcgcatctgcgaaagtaatactttttattatggagatgtgctgggcggaaatacgctacggcatccgattaataagggtgaatatgattttgtctttttggccaatgaacctcataatacaattgtgaaggcggttcttgacaatataactgattatgatgcactaaagtcaatatcctatccggcggagttcttcgattcggaacgggttatacctatgattgcggaaaataatagtataaaagtgctggctgatggaaacttggaggtaaatggtgttgcatctaccaagttgacagtaggactcagacgcttggcggcacgtgtggatgtggttttgaaatcgaaagtcgattttggtgatgccagttcgagtgaatttgaaggaattactttttctaatataccggatagagtgcctttggtatatggcttgcctagtgattgtttacccagttcctgggcgtatgccgatccggttcttccttatggtggaacggccataaccagaaatgtggaacgtaaactcacattagctgataatgccgactgttttaaaatagatcccactttattgaccactgaggataaaaataacgatttagtctgggctgttaaagttaaaaaagtaattctgccatctagcttcttttcatcgaagtccgacgagacgaatgcgataaattttactgttaacctgattgacaagtatagtccttcctgcaaattgaagattctgtccgacccggattatacattaccggcaaatgcgaaacttgatttgacaggtatcataagagaacctttagaagtaaatatacagccttctccgtggattgacgatggagatgattgggaaatatcaggcgtccgtgttctgaatgtatcgcatatacaggctaagatgacggatatgaacggagtccggatttctttctggtccaatatgccggtagtgaaggtgttgggcacagtaaagaaagaaggtgaagcgaatgaaagagcaactaatacagtctttaactgtttggcagtagatgataataatcctgatccttatcgtttcttttatgattcggctttgggcagcggatatatggatttactggttgacggaacaaataccaccggttttggtacgcatgacaggaccgagaatatgagtggtacatatacattgacattatctgcagcagaggatactaatggtaagaatgcattgcagaggaagataaaggttaccgtcacacaagaaggtttgcgatttgttcacaatcctacggcaaatcaacatggtttgttcaatgcagcattttttaaacataaccagaaaggagaacgtattataacaggacagcatcgattggatcaaacatggtctgttagtgtacctgttgcctatcaaaactggcttgttgtgagcgcgactcccagctttgatccgaatattggaacagaatcaccaggtgatgcggaacattatccggtaactctcaatccgtataggggagaagatggtactagtatctcaggtctcaccggtcgtatatatttccgtattggcgttaaggaaaatgccgattttgtaccaactaaagaatccgatcctaaatttggatatatcaatttgtcatattatccgggatggcggacaacaatgaaaatttatattcgtcagggcgaagccggtgcttatatatatgcgccgggggatgctattccgggaactgtatggggagcgtggaatggaggtacggatattactacacatgtgagagaagatatgcgtcttttatcgacgaatgcccgtaggggagcagctaagttctctgctttaaacctgacaagcgagaggttagcagggaatacgaatccggattatgagaatgtgaacgtaaaaggtgctcgttttgtagacttcccttcgcaggcgggtgcattctttcagtgggcggtcgatttgaaaggcactacttccggtatgactgattattaccgcagagcttttaatccctcgaagtcatatcttgtttcaggattcccttggggatatggggaatttccgatcatgtgggatggagatgtcagtgctaatattcctgcatataaagaacagtttgaagtttgccctccgggatatcgtcgtccgacggatggctatacggataaaatatcttataatggatattatgattatttgccggatgagggtactacgggtactgccacgaattataaagatcaaatagagtattcagaattaagggtttctttatttaatgtaccttttgcaggaaatgcggcttcaagtgcagactacgctacagcttttactactccttttggtggaactggtaatacaggtcctgggacatatccttacggagcaaacaaagatatgcttgcccggaaacaactaaaaggaacaacttatacattttattcggacggatttttcgacagacgtccgataaaagaggcttcgaatggaaactatggcgtatcattaggaaatagtaatgttgcttatcagggagtattgtattttaatcccgattccggaacgaatgcatctgtcttttttccgtcagccggtcgtctgaataacacaagtggtgctttggaaagtaggggtagtaccggatactattggtcggcaagtgtaggtcctccttatatgagatcagaattgcagaatccaccttatgacaggagaatacgttatggagcctggtcgcttgagtctgcatataattctcataatttcagattgtcatatcaaggttttgctcaaagtatacgttgtgtgaaagaataagaacttttcggcttacgataaaaataccggaatatcatccgttgaggggttggctttttagtcaaccccttatttgtgcgtactctctaacaacaaagctgctgttttaagaagaaatctttatttactctaataagattctaataggattctaactattctctaacaggctctccgaagggagccgtctatctttgtgcccggaaatccggttactaacttaacttatgtttaattatgatgatgaagagagagttacacacatttattattggcagtgtgttgttttttaccgcatgcggggataaacaggaatcagagcaaaaaagtggctatcgtatacaaggtgacacggtctatattgcagatcctcttttacttgaaaagatcaaagtatcagtgtctgaactgaaaccctattccaagaaggtgataacgtccggtgtggtgcgtcccattcctccccgttatgcttatgttgctcctccatttgcagggagagtcacaaaatcttatgtgcgtatcggacagtcggtacgtcagggaacacctttatttgaaatcagttcccccgactttacttctgcacaaaaggaatactttcaggcactttcgtccagggaacttgctaaaaaagatttgaaacgcaaagaagatctgataaggaatggtgtcagttcgcaaagagaactggaagaagcccagaatgctttattgatagcagataaggagtttgaaaacgcctctgccgcattgcgggtatatcaggtggacaatccggcggaaatgatattggggcaaccgatgattgttcgttctcctattcccggggaagtgataaaggataacatcgtaacagggcaatatctgaaagacgataccgaaccgatagctattgttgccgacctgtctaaggtatggattgcggctcaggtaaaggagaaagatatccggtttataaatgaaggcagtagtctggatattgaaatttcggcattgcccggtacggttattaaaggcaatgtgtatcatgtagaggaggaggtagacgaggaaacccggtccattcaggtactttcggtctgtgataatttgaacggacatctgaagctggggatgtacactactgtccactttctgagtgttccggtcggacaaattcaaatcccggagaaagcgttactgcagggcgaaaaggatagctatgtatttgtgcagattgctccgttggttttcgtacggacgtcggtgacagtggagacaacagaaaacggaatagcggtgatcagcgaaggattgcgtcccggagataagataatcagtgaaggaggatattatttaaagtaagaaattatgaagaaggaattaatgctttcaattatacaaaaaagatgggtaatgctttgcctgtttgtgatgatgtgtatctttggatattactcatggaaacagctttcgatagaagcatatccggatattgcagatgtcacttcccaggtggtcactcaagttcccggactggctgcggaggaagtggaacagcagataaccattcctttggaacgcgctattaatgggctgcccggtatgcacgtcatgcggagtaagagtacattcgggctgtcaatgattaccattgtctttaaggacgggacagaggactactggagccgccagcgcgtacaggaaagattgaatgaagtagaactgccttatggagctgttccgggacttgatccgctgacatctcccgtaggagaagtgtaccgttatatcatagaaagtgaccagcactcattacgcgaattaaccgaccttcagaactgggtaattattccccgtatcaaggaagtgtcgggagtggctgatgtaaccaatttcggtgggatcactactcagttccaggttgaagtagatccgtccaaactggaacaatataatttatctctcagccaggttgttgaagccattgagaataacaatgccaatgtggggggaagcgtgttgaatcgtggtgacttgggttatgtggtacggggaattggattaatcggaaatttggacgatttgggacatattgtagtgagtactacttccggagttcctgtctttctgaatgatataggttctttgaagtatggaaatcttgaaagaaagggagtgctgggatatacggaccgtacccgcaactactctgagagtctggaaggaattgtactccttctgaaacatgagaatccgtctaaagtactggaagatattcatgtggcagttgatgagttaaataatgagacattgccggaaggagtgaggatacatacttttctggatcgtaccaacttggtggatactactttgagtaccgtatcccataccttgctgatgggtatggctttggtggttcttgtgcttattctgtttctaggcaactggcgtggtgcattattggtatctataacgattcctgtgtcattgcttatcgcttttattcttatgcatctgacggatattccggctaaccttctgtcgcttggtgctattgatttcggtattattgtggacggcgctatcgttatgctggaaacgatccttaagaaacgtgaggataatcccaaacaatatctcgaagaaaaaagcatggcgcaacgcgccaaagaagtgggtcggcctattcttttctcaaccattgtcattattacggcataccttccgctgtttgcctttgaacgtgttgaacgcaaactttttactccaatggcatttacgatgagctatgcaatgattggagcactgttggttgcgctcttattgattccgggacttgcctatgcaatctatcgtaaaccacataaaatatataagaataaatggctggacagactaaaggataaatacattcgtaccattacaggatttctggaagctcccttaaaagccatcattccatcaggactgattctgacagcggggatcgtgttgagtgttgtcgtaggaaaagacttccttccggagctggatgaaggttcgatatggttacaggttaatctgccacccggaatttccgtagaaaagtcacgggagttatctgatactttgcgtgcccgtacgatgaagtattccgaagtaacttatattatggtacaggcgggaaggaatgacgacggaactgatccgttcaccccttcacattttgaagtgtccatcggtattaagccttatgatgaatggccgaaaggaaaaactaaaaaggatttgattcatgaactggaagaagaatataagttacttcccggttttaaagtaggatttagccaacctatgatagacggggtgatggataagatagccggggcccatagtgaactggtggtgaaagtatatggcgaagattttcgtgaaacacgtcgtattgccgaagaaataaccagggcattaggaactgtgcgaggggctgttgatctggatattgatcaggaaccacccttgccacagttacagatcagtatgaatcgtgatgccatagctcgttacggattaaatgtatccgatgtagcggatctgattgaagtggctgtcggaggtaaagctatcgcacaactttatcagggtgaccgccagtatggcatcacctgtaagtataaagaggaagcgcggaatactccggagaaaatagccggacttatgttgacttcttccaccggtgcaaagatacctctttctcaggttgccgatgtcagattgagtgtcggcgaaagtacgattaccagggaaatgaacagacgccatttgacggtaaagctgaatttgcgcggtcgtgacctgacatcttttctgaatgaagcccagaatacgatcaatgagaaagtacattatgacaagaataaatataccatcaaatggggaggggccttcgaaaatcaaaaacgggcttatacacgtcttgctgtcattataccgctgacactgacagggatgtttatactgctttatgtcacgttcgggaagttccggcaggcaggactggtattggctattgttcctctggcacttttcggaggtatgcttgctcttaatgtgcgtggtatgacgctgaatgtatcttctgccgtaggatttatagcgatgttcgggctttccatacaaaatggaattatcatggtatcgcaggtcaatgggctgcgcaggggaggaatggaactccggaaatcggtcatagaaggggcacgccagcgtttccgacctattctgatgacttcggtcactacgatactcggacttttcccggcttcgttggcaaccggaattggtagtgacgtacagcgtccgctggcaacagtgattgtgtatggattgatgttttcaacccttatctctatgtttctgcttccggctttctattatctggttgagaacaatgttttaaataaaaagaagaacgatgaaaaagaatatacgatataatatagtgctcttgcttttaatggtggaagccgtactcattccgacttttgcgcaaatgcctgaaataaagcaggggcagtctatttctttcgaagaatatctgaatcgggtagggaaaaagaacctgagttatttagccgaaaaactcaatgtgagtattgctgatgcggaagtaattgcccggaaaatctttccggatccggagttggaatttgaagcaggtaatgagactttctcgttgggagtttcctattcattagaaatgggaaataaaaggggagcacgtattaagttggcgcggactcaggcagaattggagaaactgttcctgcaacagggctttcaggatttgagggcggaggctgccgacctttttctagaagcaattcttcagcgcgaattacttgaagtacagaaaagttcttatgagtatatgtatcagctgagtcagtcagatagtttacgttatgtttcgggagagattacggagaatgatgtccggcagtcaaaactggaaactgtcaccttgcttaatactgtttacagtcaggaggcggcttatcattccgctttggttttgttgaataaacacatggggatgagtgctgatacgcttcatatccctttgggaaattgggaagagctaagcagggactttgctctgtctgatttggtcaaagcgggactggataatcgcatcgacctgcttgttgctcaaaaaagtactgaagttactacccgggaatataaactgacgagagcggaacgcagacccgatatcggagtatctgtttcttatgaaagaaactggaacggctttcttcctccgtcccgttctgctactgccggtgtatctgttcctctgacattctcgaatataaataaaggagctgtaaaagctgcaaagtttcggattgcccaatcggagataatggaaagagatatggaattgcagatacagacagagataacccaggcctggttcaactatgaggctgaaaagaaaaagatagctcaatataaagccggtgtacttgaagactcgcagaaggtgctcgacggaatggtatataaatacaaacggggagaaacgagtattcttgatgtactggttgcccagcgtacttataatgaagtgcaacaggagtatctggaaacaatgaaaggatatgccgcttcactagtagcattggaaagagcttgtggtatatgggatatatgcttttgacagttaaatatccggctttactattgtgaattgcagcaaagccggatatttgtatggttaccagtcagcggtttcacgctttatgttaaatcattgtgcgatattcctcctgttttttcttagggagtttttttgatcacttcttccacagagtggtcaataagttctttgataagtttgtcactcaggtttatttacttatctgttttccgaactttaatccgtactactgtgtcattttgacgagactggacaatgttttattactttcgattgtgtatctttgctgtagttgaaatggacaaccggaatttatatactaataaacagaatattatggaagcgaagtatatcactctgactaaagagaatatcgaaaaagaacatatttgctgtgctttctccgataagaaatgtaaggatagctatgagttgaaaaagacatggctgaaaaatgagtttgagaatggctatgttttcagacggcttgacgaacgtgcaaaagtatttatagaatatggacctgccgaaaaagcttgggttccggttaatgcacctaactatttaatgataaactgtttttgggtttcaggaaaatataaaggatgcgggcatggcaaagcactattgcagtctgctgtcgaggatgccaaagcacagggtagggatggcttggtgactgtggtcggtacctctaaatttcattttatgggtgatgcgaaatggttattacgtcaggggtttgagacgatagaaaaactaccctatggtttcagtcttttggctttgaagataaatccggcagctcctgatccgtcattcaatggaacagtatcaagtggagaatgtgaggaaaaagaaggtgtagtcgtttattatacacatcgttgtccgtttgcagagtttcatgtccgtaattctttagtgagtgtgactgagaacaaaggtattccattgaagatagtcagattggaaacgatggcacaagcacaaaatgcacctacacctgctactatcttttctcttttctataaaggaaagtttgtaacgacggatttgagtgcatgtatggagcaacggtttgataaagcgttgggattataatctttcttattacagtatgtgtttctcttttttgattttctgtttttgtgctgttttgctctgatgagtgtggcgggttaataattgtctggtgtttatttagactggtcggttcgatttttcatgtgctgctctgatcttatgcagattcattaatagaatcggcagtttatttatatgttgagatgttttgttttatgtatgtgacatatgcttgatttttagtattttattgtatgtggttggtgggaaaacttgatagctcctgacttttataatcactaacttttcttattttagttcattcaaatatgttcaattcttgcattttatgaaactatgttttacttttggggagtaaaatcattgggattataatgaaaagtattcgctcggttatttgtttttgtttgtttttgtttgtgtttaaccagctccttttcgccgacaaaactatagagaatgattcgctatataccagtgagtatataagtcgaatttatatggcagaacctgaacgggctttaagtttgttggatggagctgaaagtaagaagactatccctctgcgtattatacatgaattacgcagcagggtttatcgtaatatgtatatgactaaactggcttttttgtatgccaaaaagtcttatttgctggattccgtttctcagaaagatactaagcacttgttgaccatgactgtcgacctggcagaattagcagtgcttatgagtgaccataaagagagtatgaggtatgctcttgatggtatcaagctagcacaaaaagaaaaggataaaggggctgaaagtaagctgttgttttgcattggtgaaaataaatggcaattgtctttcaaagaggaggcatatgactattttgacaaagctatcaaattgcttcaaggtacaagttccaaattggaaatggctatgctttcatacttttatgggatgaaaatggattatctgctcaatgattcccgtagtaaagaagcattggaggttgggttgaagcgcgaaaagctacttaaagatatagctaaattaccggaaaaaacaaaaggctttcttgatctgcaatatacttacttgtatgcaaaaatgtcgtatatctgctatctggaaggaaagtatgatcaggcggaaaaatattatcaacaatatttgtcaacagagaattcacagacaccggatggaaaaacctatgcgataccttatctgctagtgtctaaacaatatcagaaagtcgttgatcaatgtcaggattttaagaaattgatgcaagagcaggatactgtcaacttgcagtatattagtatccttcagaaagaggtgaaagcttataaaggcttgaaggattttgaaaaagtagcagcattacgtgagtctattatttctattattgatggtattaacagcaaggataaacagaatgcggctttggaattaaatgctattcataaagctgacgagcaggaagaatatattgccgaacagactttacagttaagaatcagaaacatatcacttgcttttttgggatgtgtcacttgtctcattttatttgtgctatggcggatttggcgtcatacgattattgttaaatataaaaacaaaatgctggcaaagtttatcaatgagaaactggctggaaaagtagagaacaaacaattattcatagatggagatgcggaagatccgatagctgttccattggacttggaaccggaaactggcttttccgaaaaagacgatttatctccggatgaagtagtggagagtagggaggaagaggatgagaataagaaaattttcaaagaactgaatcgtattgttgttcaggatcagttatatctgtctccggaattgtcgagagaggatctggctcagattgtacatttgaataatgcgcgtttcgcccggatgatcaaggaaaacaccggaactaatttcaacgggtatattaatgaacttcgtattaactatgcgattcagttattgaagcaacatcccaattataccattcgtgcgatagctgatgaagccggatttaatagtacgcctattctgtacagtatgttcaagaaaaagactggtatgactccttacgaatttaaaaaagcgcaggaatccttaggttgattttggctttttcgataaacaattttccgttttatcggtttattcttatgataactaaatataaacggaaatggtgcaagttaggataaagcgagtgtacgaagacttttcagagaccgacggatatcgggtgctggtagataaactctggccacgtggaatcaaaaaagaatggttgaaatatgattactgggcaaaagatataacgccttccgcagcactgcgcagatggtttcatgaagatattccggggcactggaatgattttgtcgtaatgtatcagaaggaactggaagcttctcaagctgttgccgattttctgactcttatcaaacctcatctggtgatcactttgctttatgcatccaaagaaccggtttataatcatgcccgaatccttcgtgattatttggaaatgcatctgaaagagtgaaattaaagtaatttttatctctttccgctttcagtcgttcactcaatttcctacctttgtaatctaaatcaaaatcgtgtgtccatgaagtataaattattagttcttgatgtagacggaacgcttctcaatgatgcaaaagaaattagtaaacgtacattggctgctttgctgaaagttcagcagatgggagtacgtatcgtgttggcatccggccgaccgacttacggtctgatgcctttagccaaatccctagaactcggaaattatggaggttatatcctttcttataatggttgccagataattaatgctcaaaacggagaaatactgtttgagcggaggattaatccggaaatgttgccttatctggaaaagaaggcaagaaaaaataatttcgcactgttcacttaccatgatgatacgatcattactgacactccggagaatgaacatatccagaatgaagctcgcttgaataatttgaaagtgatcaaggaagaggaattttctgtagcaattgactttgctccgtgtaagtgtatgcttgtcagcgatgacgaggaagcgttggttagtctggaaggacactggaagagacggttgaacggagctttggatgttttccgttccgaaccttattttctggaagtagtgccgtgtgcgattgataaagccaacacattgggagctttattggaagaactggatgtgaagcgtgaagaagtcatcgctataggagacggtgtgtgcgatgtaacgatgattcagctggcaggactgggagtggcgatggggcattcgcaggattcggtaaaggtctgtgcggattatgtgacagcttccaatgaggaagacggagtggctctggctgtcgaaaaggcgataatagcggaagttcgcgctgcagagattcctttggaccagttgaatgcacaggcgcgtcacgcattgatgggtaatctgggtatccaatatacatatgccgacgaagaccgtgtagaggcgacgatgccggtagatcaccgtacccgtcagccgttcggtattttgcacggtggagctacgcttgcattgggagaaacagttgccggactcggctcgatgattctctgtcagccggatgaaattgtggtaggaatgcaggtcagcggaaatcatatatcttctgcgcacgaaggtgatacagtacgtgcagtagcgacgattgtacacaaaggacgttcctcccatgtatggaatgtggacgtttttacttcaaccaataaactggtgtcctctatacgggtggtcaacagtgtgatgaaaaaaagatgattgacgaaaaaagtaacttgacaactattgatgcacttattcagcggaaacagccctttgctgtttatcgtgttcccggggagaagtatcctcgtctgttgacagaagatgtcggagctgtccgcctgattttcgatttgaaagaactgaatggacaaagaggatttgtgattgctccgttccgtgtagataagtcatgtccgattgtgttgatacagtccgacaggactggacaaccgttgcctatggaaatcgtggcagaggaagagcagggcttgcaaagttatccggaggaatcttttcataccctttgtactgggaagtatgcgacctgttttcatacatttattgaagccttgcgtgatgctacctttgataaactggtgctttcccgtagtctcactattggaaagaatccggagttttccccttcagctgtttttcgtgcagcttgtcaacgttatattcattcctatatctatctgtgttatactcctcagacgggcgtgtggctgggaagtactcccgaaattatattgtcgggcgaaaaaaatgaatggaacacagttgccctggcaggaactcaacctttgcagaatggtaaacttccgcaagtatgggatgacaaaaaccgtcaggagcaggattatgtggcgtcctatatccgtcggcagcttctttcgctgggcattcgctccacagagagcggaccttatccggcttatgccggtgccttgtcacatctgaaaactgatttccatttctctttgaaagataataaaaatctgggagaccttctgaaagtcctgcatccgactcctgccgtgtgcggactgcctaaagaagaagcctaccggttcattttggaaaatgaagggtacgatcgtaagtattattccggttttatcggttggctcgatccggagggacgcacagatttgtatgtgaatctgcgttgcatgcacattgaagacgagcaattgacactgtatgccggtggcggattgttagcctcttcagagttgaatgatgaatggcaggaaacggaaaagaaattgcagaccatgaggcgtattcttgtatctgctccaataatgatgaatcactaacaagctaatcactatcaatatgtattcggacaagaaaaatatactccagttggtcgcgctgcttgaggcgcatggaattacgaaagtagtgttatgtcccggtagccgtaatgcacctattgtgcatacgctgtctactcatccgggttttacttgttatgctatgacggatgaacggagtgccggttattttgcgattggtcttgcgctgaatggcgggcatcctgctgccgtttgctgtacttccggtacagcgttgctcaatcttcatcctgctgtggcagaagcgtattatcagaatatacctttagttgttatctctgccgatcggcctgctgcctggattggacagatggcgggacagacattgccgcagcccggtgtttttcagacattggtcaagaagtcggtaaaccttccggagattcagacagaagaggatgaatggtactgtaaccgcttggtgaatgaagccttgctggaaaccaaccatcatggaaaaggtccggtacatattaatattcctatatccgaacctttgttccagtttacggtggagtcgcttcccgaagtacgtgtcatcacgcgctatcaggggctgaatgtatacgaccgggattacaatgacctgatcgaacgcttgaacagatatcagaagcggatgattattgtcggacagatgaacttgatttacttgtttgagaaacggcataccaaattgttatataaacatttcgtgtggctgaccgagcatatcggtaatcagacagtacccggtattccagtgaagaattttgatgcggcgctttatgcgatgcccgaagagaaaaccggccagatgactcccgagttattgattacttatggcggacatgtggtttccaagcggttgaaaaaatatcttcggcagcatccgcctaaagaacactggcatgtgtctgctgatggagaagtggttgacctttacggttctctgactaccgtcatcgaaatggacccgtttgagtttctggagaaaatagctccattgctggataaccgcgtgccggagtatccccgtgtatgggagaattattgcaagaccattcccgaaccggagttcggatattcggaaatgtcggctatcggtgctttgataaaagcattgccggaatcatgtgcattgcatctggcaaatagttctgttatccgctatgctcagttataccaggttccttctacgattgaggtatgctgtaatcggggtacaagcggcatcgaaggctcgttgtccacggcagtgggatatgctgccggttcggataaactaaattttatagctataggtgaccttagtttcttttatgatatgaatgctttgtggaatatcaatgtccgtcctaatctacgcattcttttgctgaataacggaggaggggagattttccatacattacccggactggatatgtcgggtacatcgcacaagtatattacagccgttcacaagacatctgccaaaggatgggcggaagaacgcggattcctttatcaacgggtagagaatgaagaacagcttgccgaagcgatgaaaaccttcacacaaccggaagccatggaacaaccggttctgatggaagtattcagcaataaaaataaagatgcacgtatactgaaagattattatcatcaactaaaacaaaaatagattatgtcaacacaaagagaatggacaaccatcagagaatacgaagatatcctctttgattactataatgggattgcccgcatcaccattaaccgtgaacgctatcgaaatgcatttactccgactacaacggctgaaatgagtgacgcattgcgcatttgccgggaagaagcggatattgatgtgatcgtgattacgggagctggtgacaaggctttctgttcgggcggtgaccagaatgtgaaagggcgtggcggctatatcggcaaggacggtgttccccgtctgagtgttctggatgtacagaaacaaatccgcagcattccgaaaccggtaattgctgccgtaaatggatttgccattggtggcggacacgtgcttcatgtagtttgcgatttatcgattgcttcggagaatgcgatcttcggacagaccggtcctcgcgtaggtagctttgatgcaggtttcggagcctcttatctggctcgtgtcgtcggtcagaagaaggcacgtgagatatggttcctttgccggaaatacaatgcgcaggaagcgttggatatgggattggtgaataaagtagttccattggagcaactggaggatgagtatgtgcaatgggcggaagaaatgatgctgctcagtccgttggccttgcggatgattaaagccggattgaatgccgaactggacggccaggcaggtattcaggagctggcaggggatgcgaccttgctttactatctgacggatgaggctcaggaaggaaagaatgcatttctggagaaacgtaaacctaactttaagaaatatccgaagttcccttaaacaatggattgcaaaatagacattattccgcgggtgcttcatttcaagcagccggccggaacttcacgaggcacatacacaacgcgaaaagtctggtatcttcattttactgctcccgaatttcccaattgggtagggatcggggagtgcgctcctctgccaaatcttagctgtgatgatcttcccgattacgaggaagtgctggctaaaatctgccggcaggtagagaatcagggaggtaagctggacatggaagctctatgcaagtacccttccatcctttttggcttggagacagccattcgtcacttttttgaaggaagctgggctttgtgggatacacccttctcacgtggggaagcaggtattccgataaacgggcttatctggatgggtgacttcaatagaatgcttgctcagatagagaagaagatggaggcgggattccgctgtataaagttgaagatcggtgccatcaactttgaagaagaactggctttactccaacatatccgctctcactattcttttaaagaaatagaattgcgtgtagatgccaacggagcattctcgccaacagatgcgatggagaaattgaaacgcttgtccgaactggacttacattcgatagaacagcccattcgtgccggacaatgggaagaaatggcacgtcttacttccgaatctcctttgccgatagctttggatgaggaactgataggctataatacctgggaagaaaagcaaagattactttcggctatccgtccgcaatatattattatcaaaccttctcttcatggcggattagccggtggcgaggagtggattgcagaagcggagaaactgaatatcggttggtggataacttctgctctggagtctaatatcggtctgaatgctatcgctcaatggtgtgctacttttcagaatccattgccgcaagggttaggcaccgggttactctttacagataatgtagagatgcctcttgaaatcagaaaagattgtttgtggttttgtaaatgatgatattcgaccgacaaaaacagcgtttgttgctggagggaaaggaatatactccgggcgatatacatagccttgtagcagaaggtgagggaaaccacccttctgctatatgggacttgtatctttttctaaacgaatggtttaatgatgatcctgtgatcactgtacatacttccggttctacgggggcacctaaagaattgcttgttcgcaaagatcagatgatacagagtgcacgcctgacttgtgagtttctggatttaaagcagggtgaaacggcattattgtgtatgaaccttcgctatatcggggcgatgatggtagtcgtccgttctttgattgccgggttgaatcttatagtacgtcgggcttccggtcatccattggcagatgtggacactcctttaaggtttgcggctatggtgcctttgcaggtgtataatacatttcagatacccgaagagaaagagaaattaaagcaaacggagattttaattataggaggcggagcagttgacaaggctttagaggaaaaaatcagaaatctgtccaatgctgtttattcaacttacgggatgacggaaaccctttctcacatcgctcttcgccgtctgaatggcgcagcagcatccgatcgttattatcctttttcatccgtagagttgtttttgtcttcagaaaatactttgatgattaatgctccgcttgtttgcgatgatactctgcagacaaatgatattgcccgcatttatccggacggtagttttacgattctgggaagaaaggataatgtaatcaatagcggaggaattaaagtgcaggcagaagagatcgaaaggttacttcagtcgtctatccctgtaccgtttgtgatcacttccgttccggatcggcgtttggggcaggctgttactttattgatagaagggcagatggagataagtgcgctagggactaaattggaatcagtcttagcatcttattatcgtcctaaatatatttatacggtaaatcatattcctcaaacgggaaatgggaagattaatcgtaaagagtgccgtgttttagcagagagcttacagttgctcgggagacaggaataataaaaacagcgggaggtaatctttcaactcgttccgcaggagttccattgttttttgtttataccgattaatggattttacgctgagattcatttcttcggcaatttccgcatgtgttttgccttcaaagaaacttttcataaatacggtgcgatagttttccggaagcttatttaatgtttcgtatagcattcggtataactcatcaagtgtatatacactatctgtttctgtttcatatagaggagctttcttttggatattttcggcataactccattcatactcctgatgtttcagaaagttcaaacagctgttttttacacacatttttatatatcccaatgctgtctctgattgcaaatcgaaagagtcggtatccaacttgtcccatagggaggtgaatacatccgaaacaatgtcctcgcggacttctttatcatctacaaatctttttgcatacaggcagaaaggggcataataatcctcgtaaagttgtttgaaagctctttctttagtctgtctggaaaaagatattttcattattttgagattctgtagtttttcattttactgcaaatatataataagaaaatcagcatttcctaaaattttctttctttttttgtttttggtatgaagctgtggaaaataagatagcttaaaaaataaaataaaaaaaagtatgttatacctgtcccttttcgattacctcagttgtactattagtgtaattgcaattaaaagataagattttgaaagagaatatggaaaatatgaatccggaatcattgctccgaaaagcgcaggcattaggagaggatattaaggaaatggagtctattgatgtaatgggtgcctatcaacaagcacagacccaaataaagacaaacagaagaaggagtatgtataatcagttgatgcgttatgctgcattcttgactatacctttattactttcttctttgattttgggatatttatattggggagcaacggatactgaagagaagtatgcagaagtcatggcggctacaggttcagtcattcgttacgaacttcctgaccattcggttgtctggttaaactccggtagtactttacgttatcctaccgtttttaagaaagataatcgtaatgttgaattaaaaggtgaagcctattttgaagtagaagcggacaggaaacggcctttttacgtcaatactcctgccgggttaagtgtctatgtgtacggaaccaaatttaatgtgaatgcttacgaagatgataatagtatagaaacggtattagaaaagggtaaagtaaacgttatttcaccggacggaaaaacaacagttcagttagctccaggagaacgattgctttataataaggtaaatcagaaattgttgaagggaaaagtggatgtttatgaaaaggtggcatggaaagacggtaagttgatattccgcaatgccgagttgggtgaaatattcaaacggctggcacggcattttaatgtagatattcagtttaataatatatcgggaaaagaatataaatatcgtgcgaccttccgtaatgaaacactgccacagatattggattatctggctaagtctgctgccttgaagtggagaactgaggaggcggtacaacaggcagatgatacattcacaaagaaaaagataatagtagatttatattagtaaccataaaaatgagaatagcctatgagataacacaaagatcgtaaaaaaaggaagaaagctgctaccaacagctgtcttcccccaatttttcagattcgcggtaaggagtcttgcaaacgctaaccggaatcaaaccacagttcattatagtaataaactttagttaaccgcaaatgtatgaaaaaaaatcattcatttattgcattatatcctaaatatgctttaaatctaaaactacctttagttatgaggattagtctggcactactttttgcagtcgttttacaactatctgcagagaatggctatgctcaacggacgcatgttgccatttctatgaacaatgtatctgtagaacaggtactgaataaaatagaagaagcttccgattatgttttcctttacaatgacaaaacgattcagaagaatcgtattgtttctgtgagaaataaatcaggtaagattctggatattctagatgatatttttaaggggaccgatattacgtataccgtagttgacaagcagattattttatcgactaataaaatgcaacttgttcagcaggaaggacaaatccaaataaaaggagttgtgaaagatgctggcggagatcccttgatcggtgtgaatgtgaaagtgaaagattctacggtcggtactatcaccgatataaacggaaactttacgctacagaccaggaaaggagatattctggaaatttcttatgtgggatatgccacgaaaacagtaaaggtacagaatgcccaagttctgaatattgtgctgacagaagatacagaagtactgaatgaagtcgttgttactgcattgggtatcaagaaggaagctaaatctttgtcatacaatgtacagcaagtaagcaatgccgagattacacgcattgcagatgccaacttcgtcaataatctgaacggtaaagttgcgggtgttacaattaactcatcttcagctggtgtcggtggctcttcacgtgtagtgatgcgtggaaccaaatcattgaatggtaataacaatgctctttatgtggttgatggtatcccgatgagtgatatgagtgccgcttctacacagcctacggactcatacgaaggtgccggtcagtccggtgatcctatttccggtctgaatcccgaggatatagagagtatctctgttttgagtggaccgtcagctgcagctctttacggtagtgccgctgccaatggtgttgtgatgattactactaaaaaaggtagggaaggacgtacttcagtcagcatatccaataatacgactttctccgctcctcttgtcttgcccgaatttcaaaatacttatgggcagacagaagtgggtagttactacagctggggcagtaaattgaatacgccgagcagctatgatcctaaagacttctttcagacaggtgtgaatgtaacaaatgctgccagtctttctacaggtactgacaagaatcagacttacttatctttaggtactaccaatgccaaaggtattatccataataatgactacgaacgttacaatgtcactgtccgtaatgttgccaagatgctgaaagataagctgactcttgacctgagttttatgcttagctctgtaaaagaacaaaatatgacctctcagggactttattataacccgttagtacctctttatctatttcctgcgggagatgatttctccaaagtacaggcatatcagcggtatgattcggaacgaaatttactgactcagtactggccttacagcacaagtctggctttacagaatccatactggattaccgagcatattaaaatacctaatcataagaaccgttatatggcaactgcatcggcaaaatatgaatttgctgactggattaatgtaacagcccgtgccaaaatggaccgcaacaacgaacgccgtgagcgcatgtatgatgccggaacaaatactttgtttgcttctaaatacggttattactccaagagtaatatcgagaatcaacagatatacggtgaattattgctgaatattaataagtactttgtcgataataccctaaatgtaacagctaatgtgggtgggaactttgaaaacaatgattatcagtctgattatttcggaggcaaactgaagtcggtagccaacctctttacttttggcaacgtggatacttcagagaagaatctggccaaccaatatggctatcatttgaaaaaacgcgccatattcggtagtgctcagatcggttacaagtctatggcttatctggatgtgacggctcgtaacgactggtcatctaccttcaaagggacgaataccggttctttcttctatccgtctatcggtctttcggggattatcacagatatattccgttgcagtacggatattatgccatacatgaaagtacgtatttcttattcggaagtaggtaattcaccggatgtatttctggctattccgacttatgcgttggttgatggcgttcctgttactcagtcccgacgtcctaaccccaatctgaagccggaacgtaccaaatcatgggaagccggatttaactttgtcttcttcaagaaccgtttgagattggatggatctatctatcagtcacgtacctacaatcagttctttgaacgtaccctttcttctactaccggctataaatcgggagtagtcaatggcggtcgtgtagataataaaggtatcgaattgtctttgcgttttgaggacaaatggggaaattttggctggagttcgtatctgacctattcattgaaccgaaataaagtggtggaattgctgcgcaactatgaagatccttatacgcacgaacttacttctttggatagaattgatatgggcgggacaagtatgtataaaatgatactgacagaaggcggatctatcggcgatatttatgtgaatacgcttcgcacggacgaacatggagctatctatgtccatccttcggaccaggttgtagttactcagcctgatgaatttgtaaaggctggtaatagtgctcctaagtataacctcggttggggaaacacattcagttacaaagggctttcattgggattcctgttcacggcacgtgtcggtggtgtagttgtatcacagacacaggcgacgatggacgcatacggctcttcaaaggctacagctattgcccgtgataatggcggagccattgttaacggtcgtccaatcggtgcggaagattactatacgaaaattggaggtgcaggtgctcagggtggtattggttctatgtacacctacagtgcgactaatgtccgtttggctgagttatcgttaggctatgatattcctatcaacaagtatgtggactggattaaggggttgaacgtatctttcatcggtaagaatctctttttcctttatagaaaagctccgttcgatccggaactgacagcaagtacaggcacttactttcaaggtatcgacatgtttatgtcgccaagtctgcgtaatttgggattctctgtgaaagttaatttctaatcaaacttataaattgtagaagatatgatattaaataaaatactatcatggaacaaactttccattctcgggatatctttgatgctattaaataacatttcgtgtatcgactatgaggataacgtaaatccgaatgaagtcaccgaggaaatgatggaagtagacaacttgaagacgggtgctttcttttcgcaaatgctgcgtcgggttgtaatcataaatgatggcgacaagctcgactctgactatcagattgctcagaacttatcgcatgacctttattcgggctatattgccgctaccttaggatctactaatcataacgggcagtataactttcaggaacaatgggtgaatgccacttttgattatgcctataccggaattatggcaccatggcaaagtattcacaaaatagccactgaacaggaactgccggaagttgacgcattggctaccatcgtaaaggtagaaggcatgcaccgtattgctgatacatttggtcctattccatatgtaaactatggctcttccagcttatatgacgcattggatttggtttataataagttttttgaagaactggataatgctatcgaagtattgagcaattatgtgaacggaaatgtggatgctaagctgatgagtgactatgactgtgtatatgggggggacgtagagaagtgggtgaagttcgccaacacactgcgtttgcgtcttgctatatgtgtttcatatgcgaatcccacactggcagaagcacaggcaaagaagtcgatggaaaacatgttcggctttatcgaaagtaaagcggaacgtgccgaactttcgcataattcattggaatatcatcatccgttgcacgagattgcctataacttcaattcgggtgactgtcgtccgggtgctaccatcgtagcctatttgaacggactgaatgattcgcgaatcagctcttattttacagcagccgatgacggtgaatatcatggcgtacgtattggtatcacaacaagcaatatgagcaattatcaaggcaataaaatctctaatctgaatattaaccgtgcttctactccggtagtatggatgacggctgccgaatcgttcttcctgcgtgccgaaggtgcattacgtggctgggatatgggtggaacggccaaatcattctatgagcaaggtgtacgcatgtcgtttgaggagaataatgccgccggtgtagacgattatttggctgatcatacttcgactccgggtgcttttgcagacaatgtgggtagtgataattatactttcagcagcagggttactcctgcatgggatgataatgccggatttgaagctcagttggaacgcatcattacacagaagtggattgccaattatcccgacggtcccgaaggctggagtgaatatcgtcgtacaggctatccggaagttattcctgtagtaagaaacagtagtaatggtacgattgatacccagttacaagtccgccgtctgccttatacacgcgacgagaagatcaacaatgctagcggcgttgccagtggtatatcggctttgggtggtaaggatacgggtggagctaaactctggtgggacaaaaaatcccgataacaggagaatggacattgtttaattctaaaaacactaattacgatgaaaacaaaaataacaggtttactgactttccttatcggaacattctttttctatagttgtgataccgatgtggaagcgttagaaattcagaagctgaaaacatatgacgagcagtattttgagaatctgcgtgctttcaagaaaagcgatcatgagataagttatgcttattacgaagcgtggtcaccgattgaaggtgtgacaggctataaagatcccgcgtcgtggggtgaacgtatggtaggactacctgacagtatagatattgtaaatctttggatgggaataccgacagcagagacacatccgatagcatatgcggatatgcaatactgccagcggaaattgggtacacgttttgtcatgcatgccgatgcttctcattacagacaccagtttaccgttgatggggttgattatgatcttagccagaataaggacgatgaagcgatggctgcatatgcaaaatggattgtgaatcaagtgttggaaccgggacttgatggagtagacgttgactgggaaggttggagtggttccgatttggtcagattgataaaggaacttggcaagtattttggtcctgaaggcgaacagccggataagttgcttatcgttgactactttagtggaacaccaccaacagacatcataccttattgtgattatatcgttcaacaggcttatagtgatcaagtggggttcttgactcaacccagtaactttccacccgagaagatgatttactgcgaatcgttcggagtattctatgccgatgggggacaacttatgaactatgcacgttgggaaccgtcgaaaggccgtaaaggcggttgtggagtattctacttaggaagaaattattattcttcatcgggtataccttataatgaattccgggaggctattcagataatgaatcctgctgtaaatgagtaaacaatgaataaataagaatcatgatgaaaacatatatatttaaacattctttgttgggagttatattaggtttatccattctgggttgtacagaaggtgataagtttgattataacaagaatatggcttttattacagggacagagactactcctgtaaccaagtttgtggtagaagataccccttcttcgtatgccgtcactgcttctactactgataaagtagataaagacgtaaatgtgaagtttgccattgacaggtcactggtagagacatataataatgagcataatactaaatattatgcgattccggagggcgctgtgactcttgaagatgctgatgctgtgattcaggcaggtaaagcgttttctactcctgttacagttaaagttatttctaccgaagactttgcagaagggcgagtatatgtagttccagttactatggtagaagtggatggacttgaaatattaaaaccttcgaaaactattttcttgcagatatctcgtgttattcatttcacctcattgaatatcagcaatacgaatctttatagtaactttattttctcagatgataagaaacaggaattgtctaacttcacctatgagatcaaatgctattctcaagagtggcatcgtatagctcgtctgtgtagtttcacttctgctgacgaacagcgctcaagtatgctgcgatttggagaaaatggattagatatcaatgccttgcagtgggtaagtccaagtggaagtattgtatcgagtacacgttttagcactgatcgttggtatatgatctcgttgacatatgatggcagtaaactgactatgtatgtagacggagtgaaagatgcacaaggcgatggtgatggtaaaccggtcgatttccagcgttttgaactaggaatgtcgtggacgggatatcgcggatctcagtattttcgtggccgtattgctgaagttcgtgtctggaaccgtgctttgagtacaggcgaactacagatgaatctttgtggcgttgattcacaatcagaaggtttggttgcatactggaaaatgaatgaaggcgaaggacacatctttaaagatgcaacaggacatggctatgatatggattggacgaacactgcccgtgaaataaatgaaggagctggattaacatataatctgaattatagcagtgctattgcatgggacagtgatgataataacagatgtaacgagtaacgaaataaatgattgctatgaaaataaatacgcatatcttaggattgttggttgtagtcggattatttagtcttcagtcttgtgatgacgaaagttacgatatcgaaggaagcaaccaaaattatgtatatattaatgtgaaccgttggacttcaacagaatatcctcaaaatacatttgtctatgaagtgttgagaacaccgattggctctagtttagagagtggaccggaaatagttaaggtaggggtacgctctactaaagttgcctctaaagatataacggttactttggatattgataattgtgcatccataggtgaattttcttctttccctgacggggtaaaagtaaccttggataaaaaagaactcgtgattcctgcgggaagtatgctttcttctgattcagttactattgaaatagaggatggaaagtggagcgagtttgtcaatacaagttatcttttaccgctaaaagtaacatcggtatcgaatgcggcattgagtgaaactcattcctctgcttatctcgctgttagcacctcttttacgaattgtgttccgggagcaacgagtgtggaaggcacattaattagtgatagaagcgcgtggactgccactaacaatggtgtagatgttggaacaactctgttcgacggaaatacaaggacttatccgtctcaggatgccagttctaccgttattgttaatttgaatggcgtataccaaaacataacaggaattcgattacagtattattcccgtaattatagtttgtccagtgccgctgtctatacaagtgaaacaggaggtgaagattatgagtatcagggaaacgttactttctctcgtgcaacgccgcaatatattcgtttctatggagctgtgagtgctcgatatgtcaaacttgaattattgccgtatagtagtggatatgggattgttttgtctgagtttgatatgtatcagaatgaataaacgggattgatgaaagtctcttataatagctaatgagttattatgagaggcttttgttttaaatgaaaaaaagtatggtgctgcgctttattatattgatttgttgcattaatttgtatttggttgcctcgtacgcacagactctttctgacgaactggtgttcgaagaacgtgtctttgattttggagaaataaaggaagaaaatggactggtttcacatgaatttgagtttaagaatgtcagtcaaaaagttatttctatcaatggagtaacaagtggctgtggttgtgtacagtttgaatttcctaaagaaccgctccggccgaatgctacaggtaaagtgaaagtgacttacaacccggcctaccgaccgggcttctttagtaaagaagtagttgttttgagcaataacaatgctaattacaaccgcatttgggtaaagggcaccgtcattccctgcaaacatccggtatcagagaactatccgtatgagtacggtagcggactttggatgaatttcgaagtaatggcattcggtaccataggcaaaggcggcacgaaaacaatgaaactgaaatacgtaaacgataccgataatgatatacagcttatgtttgtcgttataggtggtaatacagatcttaagtttaccagtccctgtcaggtgaaagcccgtgaagaaggtgtgatgcccgttgaatatcaatattccggcagctttccgaccgaaacacgtgtctatcctgtgatcaacgggcgggcattaatgaaaccgctgaagataacatgtaccaatccggttgattagtaatataatatttcctatcttagcaccggcaaataaaataacctgaaaagataaaactataaatgaatcgaacaccatgaagagaaaaccaatcgcaaccagtatttttacagtagtattcagtctacttttaacaggatgtcagagtgtttcggcaccggaagctattttacccgttcctcaggaaaagcaagtaaattggcagaagatggaaacatatgcctttgtacacttcggtctcaataccttcaatgaccgtgaatggggttatggcgactctgatccgaaaacgttcaatcctgctcgtctggactgcgagcaatgggtgcagacatttgtcaattccggtatgaaaggagtaatcctgactgccaaacatcatgacggcttttgtctgtggcctacacagcttaccgaatactgtattagaaataccccttacaaagacggtaaaggtgatattgtacgcgaactttccgatgcctgtaagaagtatggaatcaaatttgccgtttatctctctccgtgggacaggcatcaagccaattatggaacgccggagtatgtagattatttctataagcagttgcatgaattgctcactaattatggtgatgtttttgaaatctggtttgacggagccaacggaggagacggttggtacggaggagcgaaagacgcacgtacgatcgaccgcaaaacatactatgattacccgcgggcttataagatgatcgatgaactgcaaccgcaggctgtgattttctcagacggagggccgggctgccgttgggtaggaaatgagaatggatttgccggagctactaattggtctttccttcgggcaggcgaggtatatccgggatatcccaagtatcgggaattacagtacggtcatgccgatggaaatcaatgggtcgctgccgagtgtgacgtttctatccgtccgggatggttctatcacccagaggaagacgacaaggtaaaaacagtcgatcaactgacggacttgtattatcgtagtgtaggtcataatgcgactttattattaaacttccctgtagaccgcaacggtttgattcatccgaccgattcattgaatgctgtttcattccatcagagagttcagaaagagttggcagataatttattgagcagtgcaaaagtatcagcttccgacgagcgtggaggacaattcaaggttcgtgccgtaacggacggaaagtacgatacttattgggcaaccaatgacggagtgactatcgccgatctgactttcacttttagtcagccgacgaagatgaatcgggtaatgattcaggagtatatacctttgggacaaagggttaaatcctttgttgtagaatataagaagggcgatcaatggctgtcggttaaatgcaacgaagaaactacaaccgtaggatacaaacgtttgttacgctttgaaatgatcgaaatagaagaattgcgtatacggtttacggatgctcgtgcatgtttgtgtatcaatgaggtcggggcttattacgctcccgatgcaacggaaaattatacaccggcaacctcagaactgaaaagtttcccctttacaattttgggagtggatatggaagaagcaaagaaatgtagtgacaaggacgatcagactaccgctctaatctcaggcaaggaaatcgtgattgatcttggcgaaaatcgtacaatccattcattctactatttacctgatcaaagtgaatatagtaaagggttgatctcatcatacgaattgtctgccggtattaccgaagaggcgatgcaagtcgtagcacagggagaattctcgaacatccgtaataatccgattcttcagaatatgtactttagtccggttgaggctcgctattttaagttaaaagcgactcgtatggtagacgaaagtgattctttgggaatagcggaaattgggtgtcgatagcctctctctagaatattttttgattttatctgctatatctgccacctgcttgtttattaggtgatttatagtggcttatagtgttgcagatacctgttgcagataatttatctgcaacatagggattattatatctttgtgtgatctcttgatggattctttgaattgatagtatctttggtttgtttcaattggcagaacatttagtttctgaggcttgaaactaaagtttctcctgtttgaaactaaagtttcatcagcttgaaacaaaagtttcgtcagcttggaactaaagtttcaccgcatgaaacttctgcgaaaccaacggaaagtaatttttatattatatcatattgtatgatgacaaagcgattatatattttgattgtagggttggcgatgaatgtcgtggcttttgcccaatcttctctgttaccttataaaaatccggtcttgtctgttgacgaacgggtgaaagacttgctttcacgtatgacgttggaagaaaaggtcgggcaactattatgtcctcttggttgggaaatgtacgaaataaaggacgatgaagtacatccttctgaaaagtttaaaagactaatgaaagaaaagaacgcaggtatgctgtgggcaacttatcgtgcggacccttggactaagaagacattggaaaatggacttaatcccgaactggctgccaaagccggcaacgcattgcagaaatatgtgattgaaaatacccgtttgggtattcccttatttttggctgaagaagcgcctcacggacatatggcgattggaacgaccgtttttccaaccggcatagggatggcggcaacttggtcaccggtactgattgaagaagtaggaaatgtgattgctaaagagattcgttcacagggtgcacatatcagttatggtcctgtactggatttatctcgtgatcctcgctggtcacgtgtcgaagaaacctttggtgaagatcctgtattgagtggacgactgggagcggcgatggtcatagggctaggtagcggagacctatcccgtgaatatgctactatcgctaccctgaagcattttttagcttatgcggtaccggaaggtggacaaaacggtaattatgcatcggtagggactagagatctgcacgaaaactttcttcctccttttcaggaagcgattgatgcgggagcactctctgtaatgacctcctacaattcaatagatggtatcccctgtacggctaattattatctgctgacacaattactgcgtaacgagtggagattccgtggctttgttgtttcagacttatatagtattgaaggagtccatgaaagtcactttgttgctcctactatagaagaggcagctatgcaggtcgtttctgccggagtggatattgatttggggggcaatgcatttatgaatcttactcatgccgttcaatccggaaaaatcagtgaagcagtgattgatactgccgtatgccgggtattacggatgaagtttgaaatgggtttgtttgagcatccttatgtgaatccgaagtctgcaacgaaggtggtacgtagtgaggaacatatcagactggcacataaagtggcgcaatcatctatcgtattgctgaagaacaagaattcgattcttcctttgaataaaaagattaaaaaagtggcagttgtcggacctaatgcggataatcgttataatatgctgggggactatacagctccgcaagaagatgaaaacataaaaaccgtgttagacggagtgatctccaaactgtctccttctaaggtggagtacgtgcatggatgcgctattcgtgatacgacagtgaacgaaatagcggaagtggtggaggcagctagccgttcggaagttataatagcggtggtaggaggttccagcgcacgcgatttcaagacgagctatcaggagacgggtgcagcaattgctgacgaaaagagtatcagcgacatggaatgtggcgaggggtttgacagggctactttgactttactgggaaaacaacaagatttattgaatgcattgaaggctaccgggaagccactgatcgttgtctatattgaaggtcgtccgctggataaagtctgggcatctgagtatgccgacgcattgctgaccgcttcttatccgggccaggaaggagggtatgcaatagctgatgttttgtttggagattataatcctgccggacgattgccggtttccgtcccccgttctgttggacagatacctgtctattataataaaaaggctccctgcaatcatgattatgtcgaacaggctgcttctccattatacacttttggctatgggttgagttataccactttcgaatattcggatttacaggtaatgcgtaaatctccctgctattttgaagtttcattcaaagtgaaaaatacaggaagctatgacggtgaagaagtggcacaactttatctgagggatgaatatgcttcagtagttcagcctctcagacaattaaagtgttttgaacgcttcttcctgaaaagaggagaggagaaggaaatctttttcactttgaccgaaaaagatctgtccattatcgaccggaatatgaaacgtgttgtggaaacaggagatttccggataatgattggtgcctcttcggatgacataagactaacaaaagatatttctgtagagagtctgtgagtgacgaagagacttatttctaatctgagtttataaacatggaacaggctgattctgaataatcacgagtcagcctgtttttcacttaaaacctaaaccttgtatttacttgctgttataagccgtcaacatccaaaccagcttttcctgttctttcagataatcgctcatcatcgaaacggttacttcatctccggcttgtgaagcgatagacagaatcttgcgttcttcaccgatcagataactgatagactgtagtatgttatccagtgcctgttctccgttgcttaccttatccacttcgttaatattggctactttcagataatcactgaatttgttggcaggagtaccgcccagcatcaggatacgttctgcgatttcgtccactttttcggcagtgtcatcatacatcttttcgaattggctgtgaagtacgaagaagtcatgccctttgatattccagtggaaaccgcggaggttggtgtaatatacttggaagtctgccagtaattgttgcaaagatgctactacgttgtttgctcccgattcgttcaatttgataaattctaaagttttcatattctatttgtttttaatgatttatattcgttttcttttttctgtactgcaaagataaggcggaaaatgcttgttgtcaaactgataatttctatctttgcatagaagaaatctataacttaatcatatttgatagatgacgatacaacaattagaatatatattggcggttgaccagttccgtcattttgccagagcggcggaatattgccgcgtgacgcagcccacgctgagtgctatgatccagaaactggaagaggagctgggagtgaagttgtttgaccgtacggtgcagccggtctgtcccacagcgattggagaaaagatcattgatcaggcacgtgtcattctggcgcagacggcgcaggtgaaagaaataatcagtgaagagaaacagtcactggcaggcgtgttccgtttgggggtattgcctaccatagcaccttatttacttccccgcttcttcccccaactgatggaaaagtatccggaactggatatacgtgtcacagaaatgaaaacacagaatatccagcaggcattgcatgccggagatattgatgccgcaattatagccagcaaattggaagacactttcctgaaagaagaaacacttttctatgaaacattcttcggatatgtatcctgcaaagaacctctgttcaagcacgacgtgatacgcacttccgatataacgggcgaacgtctctggttattggacgaagggcattgcttccgtgaccagcttgtacgtttctgccagatggaaacggtcaaagtcaatcagatggcctaccatctgggaagtatggaaacctttatgcgtatggtagaaagcggaaaaggaatcaccttcattcccgaactggctgtttcgcaactgaacgaagaacaaaagaaactggtacgtccgtttgccattccccgtcctacacggcagatagtgcttgcgaccagcagggattttatccgtcatagcctgctcaatgtactcaaagaagagatactggcagcagtacccaaagaaatgcaatccctgcaatccattcagtacttgctgtaatattgtttattcctgcgtactgcttccggctgtatggcgtttcaaccatcgccctatttcagctcccttaaaatagataatgagggagctgactatgataatcattcctgcaacggtactgaatgtcggatactctcccgggagcatgatccagctaagtatggcgcccaatatcgggttgatcagtctgcacatattgatatcactcactttggctcctttactctgtaaggcgataaaccagaaactgaaagcaaagaccgagataaataccagaatagaaagactgatatagaatccggcaggctttccgataaatgaatgatacccttccgtacctaatcctatcatatagatgagcagtccgccgaagaacatctgcacggcattcaggaaaatagggtttatcttgcctttatcttccgataccgaaatcgcggaatatccctgaaagatgatactgagcagcagaagtacaattcccgtgatccctttccagtccagcggagcgccattgctgcccatgcctacgataagcagcaaaccgatgaggctgacaataaggctgataatcttgtgcacattcagccggtcattgctggccagcagatgggctagcagtacattgatcagaggggtcattcccataatgatggaagagatagccccgctgacgaaatcaacaccgaaatagaaagctgtgtaccccataaacatattgatcaggatcagattcagaaacagtttgctgtgctggcgtatttctttccacattcccttatgccaggtataagcaaaaagaatgatacctacagtggtaaagcggattcctgcaaagttcatcggcgaaaagtcgtaactcagtccctgcttgataaacggattgacgatagcccataatacagaggccaatatagcataaaaaagtccttttttcattttatggtttggtggttttattcaaaaatgctgcaaagatagtaataattaggcacatacattttgaatctaggtattaattccttatatttggagaatcaaccattttttatttagtaatatgaaaaaatacattgcagaaatgatcgggacgatggtgcttgtcctgatgggatgtggaagtgctgtttttgccggcagtatggctggtactgtaggagccggcgtgggaacggtcggtgttgctttggcatttggactttcagtagtggcgatggcgtatgctatcggaggtatttcgggatgtcacatcaatcctgctattacgctaggagtattcctctcgggtcgtatgaatggaaaagatgcgggtatgtatatgcttttccaggttataggagcgattatcggttcggctattctttatgccctggtgaccaccggcgggtacgacgggccgacggctaccggttccaacggcttcggtgacggtgagatgctacaggcattcatcgcagaagtggtctttactttcatttttgtattggtggtgctggggtctaccgatccgaagaaaggggcgggagctttcgcaggccttgccatcggtctttctctggtattggtgcatatcgtatgtatccctattacaggtacttccgtcaatccggcacgtagcatcggtccggcattgttccagggtggagaagcgttgtcgcagttatggctgtttattgtggcgccgtttgtaggagcggctgtcagtgcgctcgtctggaattatttcggtgacaagaatgaaaagaaataataagaagaaataaacggatcactttatgataaaattaagggcgagagtttcacaactgtcgccctcttttgcgtaattatatattataataaaaagagtgtttctataattactagatttaattagatgaggggaatttcacttcatagaatttctccccgttatataaggtcttgacacgtattctgagtcctttcttgcctttcatctgatcttgaatcttatccaatttgaaagatatatacccttcgcccagacggtcggcggtgtcgccttcgtcgttatgccggaattcaagattgatatactcatcgttggcatcatcggcagcaggttcagcttccttgttgttgatgaccagattcaggaaatgtttcttgtcctcactatgcgtgccgtaatattggaattcgattgtcagatatttcttgtcttgggtaatccacatataagtagaattgattttatcgtctccgatcttctcttccgtattttctccttcccccatagtcacgatttctttggtcaggatctcttttatttctcttacctgaatattatagtcatatcccttcaccggttcttccagttctttgaatatcacaaaggcgcgttgcccgtctttattcttgtcactgatccatccgtttccattgctcgggaacattgtttttccatcatccagagtgaaatagaaatccttgctatccgggctgatcagattgatggtgccgatgaccagtgaatcggatgaggagtcatcatccagacacgactgaagtatcggcattgtggtcataacagcaataaaaaatgcaatgaatttaaatttcttcatatactataaaaatgttttttaatgagtactatttacttgctttgtactctgaaaatgcaaagggggagaaaatattgcatttggatctgttaaagaaacaaaagttgcaaaagagttgttctctctgtgcagtatttctatctttgctgcatttataaggtaaacacgtgtataagcaaatggaagaatttgagttgtcggaacaatgcaggctgggaaataatcgagcccgcaaagaattgtatgagcattatggagggcgtttgctaggcgtctgtctgcgctataccggcgaccgtgatacagctcaggatctgcttcacgatggttttataaagatattcagttctttcgacaagttcacctggcggggtgaaggctcactgcgggcctggatggaacgggtgatggtcaataccgctttacagtatcttcgcaagagtgatgtaatcagtcagtctacgcctttggaagaagtacccgaagattacgaggaacccgacgcttcggctgtagagatgattccgcaagcggtattgatgcgatttatcgaagagctgccggcgggataccgtaccgtgttcaacctttacaccttcgaggaaaaatcgcataaggaaatagcacagttgttaggtattaatgagaagtcatcggcttcgcaattatttcgggcgaagagcgtgttggctaagagagtaaaagaatggataatgaataacggataggtagagatatggaagagaaagaattatggatgaataagttgaaggagaagctcggggattacacggagccgcttcctgcttccggttgggaacaactggaaaaagaacttatgcctcctgtggagaggaagatatatccttatcgtaaatggacggtagccgctgcggctgtcattttattggctttggtgtcatcggtcagcctgtatttcctcggaactcctgctgctgatgaaattcgtcatgccaagactccggcgttagcctctgttccggatgttttgccggatgcgcagcaaccggatatgacaggaacaacgatagaaccggtagtgcgtccggtagtgaagaaccgcatcgcgaaagcggaacggaacattccccagccgacggcaaatatcgacgaaccggtgaagaaagaagagcagccttcggagctgaacgctcagaccggcgaccggaaagaaaaagaagaagtgaaaccggtggaagacacgaaagccgcccagcataagcccgcagatacggaacaaccgagaaataagccacgccgtccttccagcagagacaaactgcatattccggcagaaaaggcatcttcacagaaaggcacatggtcgatgggactttcggtaggtaactccggtggtgcttctacagagttgggatcgggcattccttcttatatgtcccgcgtgagcatggtatcggtatcaaacggtctgctgagcatacccaatgatcagcaattggtctttgaagatggagtaccttatttgcgtcaggccaatcaggtggtcgatatggaacaccaccaacctatctccttcggattatctgtccgcaagagtctggcgaaaggtttctctgtcgaaacaggattgacttacaccttgctttcttcggatgcaaagtttgcggacagcgaccagaagaccaagcagaaactgcattatctgggtatcccgttaaaagcgaactggaacttccttgataagaaactgtttactctttatgtatccggtggaggtatgattgagaaatgtgtttatggcaagctgggcacagagaaggaaactgtgaaacctttgcaattctccgtctccggtgcagtcggcgcacagtttaatgccaccaaacgggtaggtatatacgtagaacccggtgttgcttatttctttgatgacggttccgatgtacagaccatccgtaaggagaatccgttcaacttcaatattcaggcgggtatccgacttacttattagtcaatatagttgagctatatattttaaaagcgatattttaccaataacggttaaaatatcgcttttaaagttttatatgcagaaactttgctgaaaaatcggaaatctgagaaaatattaatatcattgtcatctgtaactttatacctttgtttcaaaatacgacactatggttgatttttcagatgaaaagttcttattagacgagatcagaaaaggtaataatcaggcatttgaatatctttttaaggcttattatccccgtttgcgcggctatgctattcgtttcgtggaagatgaagagacggctcgtgatattattcaggagtgttttctgcgtttttgggagaagcgggagttgttgtcggctgtatcggtcacctccttactttttgcaatggtacgcaatggatgcctgaattacttgaagcatctttccattgtcgagaaacatcagatagaatatcttgcatccattgatggtgaagaaaggctctattatgccgacttcacgctagatgcagagcacaaactactatatgacgaattgcaggaacaaatcaaccttgtcatcgggcagctgcccgagcgttcgcgggaaatctttctgatgagccgtttcaaaggactgaagaatcgtgaaattgcagataaacttcagatatcgactacggcagtcgagaagcacattgcgaaagcattgaaaagcttctccaaacacttcaaagacaagtatccggtagacatttatattatgattgttgcctgggtgattatgaataataaataaaagaagaaaatataaaccattgataattagattggaagagcagggactgaaaaattcctgcttttttctttgtatgggtggttgggtaaaagaaataatagttgttacatcttatagaaagtgaaattatggaagaaaagaaaaacattcgtgagttggccgttcagtatttcgaaggaagaatccggcgaaaagacgaaaaactattgtttgagtatgtcggacaaagtgaagcaaatcgcacggcattcagacagtgggaaaaggaatggattgcttcggacattaccgattccaataccacgaaggagtgggagacattacaacgcaaaatccgcacgcaggaagccattatcccgatgctgggtatttcgaaaacgagattttccgtctggcggaaagtggctgctgttgcagccatcgtacttctgactgtaggaggaaccctcggtgtccggcaactctcttcctcattgcaaccggaaacgtactttgtatgcgaaactccttatggtgagaagagtaaagtcgttctgtctgacggtacagtcgtttggcttaatgcaggttctacactgaagtattcgaacaagtttaataccgacaatcgcagagtcgaactgaacggtgaggggtattttgaagtcaccaagaaagagggagctactttcatcgtgcagatacatggatatgacgtcgttgtgaaaggaacgaagttcgacgtatctgcctatgatgatgatcctttcatttctactactttacttgaaggctcggtcgaactgaattataaaggcagtccgataaggatgtctcctggagagtccatgagattgaacgtagaaacaggaaaattcatccgtacccaagtaaacgcttcacaatcaaaagcgtgggcggagaaccgtatagaatttgatcacattacattgaaggaactggttgcaaaactatcccgacaatatgatgtgaatattcggctggaatcggaagctgtaggagacaagacattccgtatttctctgcgcaacagagaaacaatcggagaggtgatgacggctttgcaagagattatcccgataaccgtcgaacgtaaaggcaaggatatatatatcagagaataatttccatttcgtaacaactattattaaattaaatcgagaaaaactatgaacaaccgaaagagcttattacggctgcttcttttagtttcattctgtttggcgacagtgactttgcacgcccaggtcatcaacaagacattcaagaatgaaacattgaagacagtattgaaagaagttgagcaacaaacaggtttatctgtcatctataagacagatgaagtgaacgagaataaaagaattacggcaactttcaaaaatgcatcattggacgaagtactgaataaagtcttggataaggatttgacttataagttgcaaaacaagatgatagtcattttgaaaaagacgcagaaacctcatgacggcagtacaaagaagaacatcaaaggaactgtcgtggatgataagggcgaaccgatcattggggccagcgtggtagtgaaaggaacttcaaccggaataattacggaccttgacggaaactacactataaatgaggtatcggaagatgcctggatttcagtctcctatatcggttatcagagtgtggaacttcgagctgccgatagtaagaatctgcttcggattgtcctgaaggaagacactaaagtattggatgaagtagttgtcgtggggtatggtgtacaaaagaaaagtgatatcaccggttccgtttcttccgtaaagtcagcagagctattgtcagctcctaatgccagtactgcgcaggcattgcaaggacgtgtggcaggtgttgttgtgcagaattccagtggtgctccttcgggatcggcaacgatccgcatccgtggagccaactcgctgacttatggaaatgatcctttgatcataatcgatggtgttcaagatgggaatatcgggagcttgaatcctaatcagatagaatccatagaagtattgaaagatgccgcagccctttctgtctatggttcgaaaggtgcgaacggtgttattctggtgacaactaaaaatgggaaaaccggaaagccacaggtgtcttacaacggttttgtttcatttgatgaagtacggaaaaccttgcctgcattgaatgcaaaagaatatgccctgctgatgaatgaggctcaggaagagaatgggctcaatcctgtttttgggccggatgagattccgttggaaggaaacagtacggactggcaggataagatttttcggaatgcggtttcccaatcacataacatcagtatcagtggagcgaaagaaagcatttcttatttcatagctggaggatataccaataaagatggcattgtgcagaataccaattttaaacaatatacttttcgtgcaaactttaaagttcaggctacatcccgtttgaatttgtcgctgaatacgtttgcctcttatgacgagacgcacaatggagattatgaacaggctattaatgcagcacttcaatggtcgcctacgaaacgcatctatgaccccgatagtgaaggaggatatacacagccgggtggaggaataggaccggtttcattatacaatccggtggggtatgctttggagatagtggatgataaatccgttgcttcttttaatgcttctttaatgggagaatataaattctgggatttcctcaaattatcttctttgttttcatataagactcatagcgataccaatgggtattttgataatcagcgtgtcaataatggcgatattagagatattaacggaagtaaggcccaatcacgctatattgctttgcaaagtaccagtattctgacttttgataaggcttttggtgatcataccgttcaggctaccggggtatacgaagtgttgaaggataattatcagagcacatctgcttcttccagaggaatcccggtgggaatgggatataatggagtgcagttcggttctattttgcaggccccttgggtggaatattctactacagtgatgcagtcttttatgggtcgtgtgaattatagttataagaataaatacatgttttccggatcggttcgttatgacggagccagccagttggcagaaggaaacaaatacgacaattttacagcattttcattaggatggaatcttatggaagagaagtttatgaaaaggctgaaagatatggtaccggagtttaaaattcgcgggagttacggtacggtaggcaatgcggcagtgcccgcttattcttctcatttaaagttttatccgggcatggacgatagcggaaacccgactttggcaatatcagatttaggcaatgaaaatctgaaatgggaacgtacccgtgagttgaacatcggtatagacagtcgatggtggggagggcgtttgagtttctcagccgaatattataacaagaaaaccacagacctgttgatgtggcagaaagtgccttcggtattgggtgtcagttccatccttaccaatgtcggttccgtgtccaataaaggatttgatatcatgttgggtggcattcctgtctctaccaaacattttaaatgggacataaattatacattgaatatcaataaaaataagattctcgaactggacgggctctccaatacgcttattacaaccggtgccgattatccgggattggtgggttcttatgtccagatggtgggacaaccgatgggcacattcctcggatatacctttgccggtgtttggcagaaatcagaagtttcgacggctgcgctttacggagcaaagcccggagatgccaaatatgtagatatcaaccgtgatggaaaaatagataaggatgatataggcattatcggtaatgcccagccgaagttgagcttcggattcaacaatacatttacgatttttgatttcgacctgaatattttctggcagggagtatccggtaatgacatttataatcagaatcgtatccggcgtgagacttattcgtcagatgcattcccgaccagtacggttatgaaaaatcattggacaccggaaaatccgacaaatattcctgctttttcgggagcagagtatgttaattcttcccgttgggtggagaagggagactatttgcgcttgaaaaatatcacattgggctatcgtattccgcacaagatactgtcaaaaataggatgttcgtccgcccgtatctatgtcagtgccaataatctatggacaataaccaattattcgggatttgatccggaagcaagtatgggagcagactcggatgcggcaggcgtggaccgtggtgtgtatccttcgtcaaagagtttccttgtagggttggatatttcgttttaatgatcatttaataataacagactatgaattgtacacttataaaaaagagctgcgtcggattattggcgataatattaagtacgagttgtgccgatttgacagagaatcttaccggacagccaactgtcgataagttcttccagacactgaccgacttcaatagttatatcacaggagcctatacccccttaatccttttatatggtaccgatatgccctatgcggccagtgcaggtgccgaagatgtaaatacccccgtcatcagatggaaaggattcgaacaggttaacattaacacagtaggaaatccggacgaagtgacggatgagttatggaactcatattacacaagtattagcgcgtgcaatacattgataaagattatcggtgagaacacgaaattatctcccgacgaattgtccccgattggaggggaagcccatttcttgcgtgcttttaattacttccagttggtgcgttggtttggcgaagtgccattgttgacggaggaaaatcaggataatgcggcaaaagagcctcaggcgagtgttgcccggatttacgagcagatagtttctgatttgaagaatgcagagttgacattgcctctttcacaggatgatccgagccgtcccagccgttgggcggcaaaagcgttgcttgcaaaagtctatttgacaatggcgggatttccgttgaatgagacttcctgttatgcgctggcacgtgataaggcaaatgaagtaattagtgaaaaggtctataccttagaaaaagtatattcccaattgtggttatggagcaaccgtaaaataaactccgaatttatctttgcgctttatgccagttcggacaatgcaacaggcagttatatccatcaggccgtgcgtcctactgatcacggagaaaacggctgggcagattggaccagtgacaaacgctttctggaaacttttcccgtaggagatggcagccgtttgagcggaactttttatactcggatgagggacggtgcttcgtgggaagagaccaatgtggcacaaccttatgtgggaaagtaccgggatgcaggtccaaagagcggaggatattcagggatagctacagctaataaagcggacggatttttctgtatgttacgctatgccgatgtgttgctgatctacgcggaagccgctaatctggcagagggcagcccttcaaaagcagcatacgatgctatcaatgaagtccgcgaacgagcaggactgactaaactatcgggactgactccggcacagtttgacaaggcggtattggacgaacgtaactgggaattggcttttgaatgtaatcgttggttcgatttgtgccgtcgtcatattctgaaggagactttggaagcttattatccggaggcaaagattgacgatcacaattatcttctaccgaaaccgagcgaccagatgactatcatgaccggtattgttcagaaccccggatacaattaaacgtcaataacataatcgaaaagaaagaatgatatgaaaagaaatataactttgattttaatcactttgtgtctggcgataggagtcgtttcttgcagtgaagattcttatccggagaatcctacccttgtttcgcctatttcgggattagtcttggaagtgaacggaacggactatgtggctacccctctgttgcaggaggatggtttgttgagtaaaacattgttggtggcagtcaatcagccttccactactgccatagtgaaacagatagacgtttccgacccttcggctacggtcaatataaatgtgggagatgtgattactttcaggaataaccaatttgcattggaatggacgaaggggacacaagctgagacttttctactggagatgagttataatcctcctccggtaatgtatttggtaatgtcgggtgagaaaggagattactatggcctgaatacagaaacggcacagaccattgcttccattacctataataatctgtttgaaggatatatagacttgacaaatacgagctggaacaacatcggcttggtgcaatccgaccagtccgcctattttgatgttagcgccggattgggcggcggacaatcttatggaactttagcgatggtggagaaatcctctccgggaaccggctattatccgtgtgacggtccctggggagattggacaactactggaggcaatgtttcaattgtctctccgggcatctggaaagttaattttgacctcactacccgtcagatcgttttactggagacacaatgggctgttacggggacagccgtaggaacggtgaaagcaatggtctacaattctgacgcccgcaagtggtctttgacgacagaacttacagccggaaaattgaaatttaccactattccggtctctgccggtgatccgactgtaacgtatggggcgtccgatggtattgtcagactgtcggagacagggacggatattactattgacgaagctggtatgtaccggatagaattagacttgagtacacctttttatgattatactataacgagataaatcaacaattatgaagaaattcttattaagcagtatatttttgttttcactggcttatggagtaatagcctgtaccgaggggttgccaaccgacaactgggaagaacctgtcgttcccgtagatcctgccgttactaccctgcggggttcgttcgaaagtaagtttgtgagatactccaaaggtcaacaacacgaagctcagatggaaaaagcgaagatcgtcaccctttggaaagacaccctttggcagaacgaccgtacacacaaacagatagtgttatggtcaggagataaaaaatatgacgacctcacttatgaagtttcggatctggtgagcgacgcgaacagcatctctgcctccaatatccgacttcgtttcccttcttatataaagggagacgatcaggcactcgattgtggaaattatgagagtcgcaccactaccttgattgccgatgccctttccgaagtacccgtcacaacgctcaccactcaagatcccgttaagatatgggtgaccataaacacgccggcagatgccgtaccgggcatatataccggaaccattcaggtgaaatcagccaatgaagtgaagcagaagtttaatctggaattgcttgtcgtagatcatcagttgcctgcggtagccgattggagtttccatcttgatttatggcagttccctttccaattgacaactctgtgtcgggacaacggagaaaatgtcgttcctttctccgacgaatattttgcgatgatgaagccgttttatcaactgttggcagatgccgggcagaaggtaatcaccacgtatatcaaggacggtgctttcaatagcggacaaacgatggtgaagtggtcgaaaaacagttccgacgagtggatattcgactataccgattttgataaatatgtcgggaaaatgatggaatggggaatcaataaacggatcagctgtttttctttggccggatggaagacgtctgtcggatataaagatgcgtcgggcacggaccggacattggaactcaccatcggtacggaagaatacaacacagtgtggtctgctttcctgacttctttcaagacacatctgcaagaaaaaggctggtttgacaaaaccgtgctttatatggatgagattaaagaagacggtatgaagtcaatcatagctttaatcaaagagaacgatgcgaactggaaaataggactgtcgggaggaaatgtcgatagcgggatagagaacagcctgtatgattattcgaccattttaggctacgagcgccagtcggacaatgccgtttctaccttctacaccagttgctcgcagcaatacccgaacaactacgttacggcgcaaaccaatccggcagaaatgtcgtggatggcgtggtatgcgctggcaaaaggatttgacggatatctgcgctgggcatacgattactggacacagtctgaccctaccagtgcacaggatggaagtaatgcgtccggcgacttcaatatgatttatcgcagcgaaaataccgccgccgctgttcccatctccagcatccgtctggaactgctgcgggaaggcattcaggattttgagaaggcacgtatactgaacaacggacaactggacgcagctatccgcaatttcacctctgcttcggggcgtgaagccgccaagtgggtaggaatagccgaaggaacattgaaagaactatctgcaaatgattaaacagaaatagataatgaagaaattaaagaataaaatagctttcgtactgctgtttatacttgtctccgctatgtcgcaggcaaagggattggacccacgttttcagatactccctttaccccagaacatagagatattgaaagggcaggggatagcaggtagtgaactggcatatatcgtatcgaaaggcgaaagtaaaatccccgttttaggaacattgctggacgccttaccccgcattgaaaaacaaggaacaggtattacactttccctgtcggaacagaacacacccgaatctccggaaggatatacgctggagatcacctcccggggagtaacgatccaatcgcgcggacaagcaggattgttttacggttgtcagaccttggaacaactgatggaggatagtcgtgaccttcgtatccctattccatgtctccgaatgacggattatcccgaaatctcttaccgtgccgttcactttgatacgaagcatcatctggaccggacggaatactactatcggaccattgataaactggcccgctataaggtgaatgccatcatttgggaagtggaagacaagctgcgctatacccgccgtcccgaagtgggcgcccccaacgccatcagcaaacaagagatgcaggctatcagtcgctatgccaaagaacgtaatattgaaatcagtcccttagtacaaggattgggacacgccggctttatcctgaaacgccattgggaactgcgggaaaatccgtatagtgactgggagttctgtccttccgacccgcgtacctatgagttacagtttgatctttaccgggatgcgatggaagccatgcctgatggcaagtatcttcatatcggtggagatgaaataacggctatcggcatagacgaacgttgtaaagcgaccggaaaaacagcttttgaattgcagatgatctggctcaaaaaggtttgcgactttgctgtggaacatgacagaactcccatcttctgggatgatatgcctttgaagtatgccgacctttggtggttgttgcatcgcccgctcaccgatgatgaaattcgtaagaactggaatacctcccggctggacgaagctatcaagatgttcccgaagaattgcatctatatgcgttggcattacgaagaccctaccgtcttgtcccatcagatgctcctgaaatggtatcataagaatggactgaatgtaatgggagctaccgcagcagcgaccggtgaaaccccgtttatgcccagaaacaactctagggcacaatatattaaagatttctgcaaacttgtttctcaaaatcagttgaagggcatccttgccacggcttgggatgatgcctctgcccattgggaaacggtgatgcgcggacttatagcacagggcgaatatagttggcatccggacgggcggactgtggatgagtttatccgggcgcacgcccggagggagttcggattgtccggtcagcaaatggagtttctgacagaaatggagaaagctgctttcttctttgatcaggcattagtcgtttccggcacgcgaaatcctgcttggggagtatcggaaacattccggttgctggatttgccggattcggagaaaccgggagaatggaagcggaaatatcagggaagactggataccgtccgcattgaatcggcgcgttatgagaagatttgtaaaggcttgaaagtggctgaacaggcagctttacgcaatcgctacacgttggatatttataaacagacgaacgaactgtttcactatccggtgaaattgttggaagttttagaggtttatgacagtacaaaaaacgatgaagaacgtcttcaagcattagtaaggataggtgacgtttgtaactccttcaaaagtatgcgtgctgaatttgaaaagacttattcgcaaactcgttttatggagagtccggaggggcatattgccgaccagaaccaccatcatcacttgtctgctttaagtaacaacagtgactggatatttctgtatgaaatgccgatggtagaaaaagtggaaagatggttgaaagaacaaaaagataactaaccttagattttaaatatcgtattgttctgttgaggacaatacagcgtagtgtttttgaaggtattagtcaccatttcgggaagcaggcaatagctgtgctttccggaatggcttttttataattaataaaaatcgtttttatggaaaattcattgagtgatgaattgttttgttcattgaagaatgaacttcgtgaagtagatgcacaaatcagtgtgcatagtaaaaaactgttggagctgattgaccaaaaaaaagaattgtcgtccaactgattcgggaagaagaacaaatgacgcccactgttatcgaatatcggggagatccgaaacggtatgtttctgttattctaggtgccattgaccgggggaggttgacgtataatggagacgcgaattgcgaacagacgttccggtccttgtcaagtgtgatagatgtcataagccctaagaacgggaaagcgctcagtatcgaaacgttggtctcgtatgagaagaaagaacgtgccggggagttttcagattattcggaagggaaattcgaataaaatgagtacccgagagggaatttaagcccgttagcagtataaattcgactttaaaagttgtatgatattgaaacttttattatatttgcacaatgagaagaaaagtaatagcatacggtcaatactacaaggattttcttgccactctgacagaaaaggaaattcaaaaagtgaaatatgtgctttcattgcttggaacagaagaccgtttgcctataaaatttataaaggttatacgtgatggtctatatgaactacgtatatcatataacggaaacatttaccgtatctttttcatttttgatgaagggcaaatagttgttttatttaatggcttccataagaaaacacagaaaaccccatcatcagaaatagataaggcattaaaaataaaggaggaatattatgagtacaaaaaacaacatgctgactgatatcagcgcagaacttgataaggagttcggagcacctgggactccggaacgtgaaaagttcgatgaagaggcatacgctttttatactggtcaaatactgttggatgcacgacgggaagcaaaagtaactcagtctgaattagcaaagagaatcaatgcaactaaatcgtatatctcacgtattgaaagcggagctataaatccaagtgtaggaacattctaccgaattattaatgcattaggattgaagattgaaatcgtaaaaccaatcatgggtatatagtcgaaaaaaccgaaggatatcttaatccttcggtttttcatattttactttcctatcacttcgattaaccaacgatttaagttccggctttctgcactaaattccattccgatctttacaataagatattcttccttcgtatatcttcaaaggtttgtattccaataggaagtttacgcatcaagttgtccatatctgattcttttgatcttttgcacatcaaagatgacaaatatttcctgaagtctgcttcaattggtgggctgatttgaaaatgcggtgggaaattgaaaaaagacggttgtgtttttccgattttccgccgtctttttggagaaagaaaaggtaaaaagtgagaggagtgagagaggatttctaacattcgtattttttttttagagaaatatagaaagtagaaataaagaaataaaatagaaaaagtttcaattcctctctcactcctctcacttttgggggtgaagatgatgaaaaataatataaaacgaggaaatgtgttgtatagttgaacaacattccttatatttgcgttatgaaaagagaaataatagcatataaaggatacttcaaagaattctttgaaaatttagatgctggcacccaagataagatattgtatgtgctaatgttattgcagacacaagacagaatacctttgaaatttatgcggttgatagaagaaggactttatgaacttcgtatcgagtaccaaagcaatatatatagaatattcttttgtttcgacgaagggcgtattgtgattctgtttaacggttttcaaaagaaaaccgaaaaaacaccaaagaaagaaattgataaagcaaagatattaagaaaggagtattatggaagcaaaaacaaatgaggaattctttaatgtcagtgcattaatagatgagcgttttggtaaggaaggaacagcttctcgtgcagaggcagaagaaaaggcctacgccttttatacaggacagattatcgaggacgcaagaaaaaaggctaaaatcactcaggctgaattagcccggcgtatcggctctgaccgttcttatatttcaagagtagaaagtggtcagacagagcctaaagtatctactttctatcgtataatgaatgcgttaggctgtaaaatcgaattttcaatgattttgtaaaaacaataaatgcagagtatctgtcaagatgactctgcattttgctatattcacaaggctttcccgcttctattcatacagcctgtttgattttacctgctcgatatctataataaatacggcatatcggcgcccgttatttccttttttagattcaaaatggtgcttagtcatcaccttccccaactgtatttttgatccgatggaatactgataaccggtacgctcacgtattagttccgcaatctcactgacagtcagataataaaccttctcgaaacgttccggcttgcggatatgcgtaagaaccatttcttcttccggtgaatgaaagatgaaagcctcgttattctcttcaagccgttcattgtccgcttgcgtgaaccagtattgatatcccggcttattcagcagatatttgatctgagcatagagctgcgcataattgatggtaataaattggatggaataaggatgaaaacaaaggaaacgccggttgcctgtcgtgtcgtgaagcacttcctgataattgcaggttcctgcaaaagaggccgtatgagggaagttttgcgaacggcgtgcataaggcagacggaaactgatcactttgcgcgttaccaaatctttgaatgcattcagttcccgaccgctcatcccttcaaactcgtcgagattgatcagcatggcctgcgttattttggctaaatcatctttattgttcgaattgattagtccggtagagagataagcacgcagttcgggaggcaggagattattgataaaggtagtctttcctatgttctgtatctcgctgcatagcagaagtaccgtgtgattgacaatattctcttgagtagccgctgcgcacatcgccaccagataacgttccaggcattccgcccaaaactcctgatgactcgtctggacactatccgccaggatacggatatagtcggttccgtcccattcgggcagtaattcaaaatactcgcgaatgggatgatacgactggctgaaatcggagtaaatcagattttcgattgttttgacagtgcaggcatatcccagttcgttgatttctatccagatactgttttccatcatctcatccaagatgcggaaaggctccggtttctcggtgtcgggatgccttctgcgatattccatgatatgcagcacttcgttgtagcgtgtttcgtagtgctcgctgatatattgctctatccgtaatattcgtttctgcgtgccatttagcttacaggtattaaattcgtcggtatgagcgtaggcgctattgatcaaagaggctgtctcgtccgccggaaagtctgtaaactggcttttgataaaggcggatgcttcctcctgcggaatgccgtagcgattgaaggtacatgagagatggtgcagataattgttccggttgcccactatgtatttttcggacttgttgtgatagtaggttaaagtcagcaccagagaagcgttggcggaatgggcgttgagcgctgtgtcttcattcgtcggggggccgtccggaggagtctgttgtttactgtcggagagatttttacgatttgaaaccttgtaggatgcctgaggttgatctacaagaaaagcgtcagcgttcggattgaaataaatctccggatcgtaagagaacagacaagtgcgtgccacatcctgaccggaggtgtcgatttctatctgacagagttcggtgtaaaaagaaacgagtctggtgtaagctgcatgatggaagtcttctatttcctgaagggtttcgggcaatgtctcatccggatggcatgcgcgtactatgattttcacgcccatccctttggggctgataaaggcgatgcgggtgtaatcgcatctcttgatgatagggaggatgcgtgccaattcttctttgctgaggtggtcgatgtctatcacgatgtgtcccagatatttgacgaggttcactttggtacgccttcctcggtagctggcggagaaggcgattgccggcaattcttttttcttctcattggcagccttttctccttgctctgcaaagatgcggcgtatttcttcgactttttcccggtaggtaaaactgccgatagtggacactatttcttcttcggtcatctctgctattgcgtagtagaaaccttgaaatatggtgaaatgtttcatttttattttgattattgtttgtcgatgcaaaggaacttctttgcggaaatgtgtaaaggaactttgtataaaatggcaataagttactacggttcgcccaaaaagtgtatgatagttgccacttgtttcggcgaaaggagacggttgcgtgcgcggtagccttcctgttcgagttcgtgcaggagagggaggttgtaaataatccaacgacgaagtatttgtaaagcaactttgaggcagacatggggattgtaaaggtgagccagttccgctttggtataggtgcggataaggaaagaatcttctttgtaattcatgatgttttcttcttgttttatgctataaagttacataaaattccttgttattcaaaggtttgacttcgtttttattcgttgggaatcaagaaacttcgttggggaatatggcttgtccggctatccttatctttgtgctgttaacaagaaggggatgcatcctatgtattataaactttaaaattattttattatggcaatgacagtatcttattcagtggtgccgcgcaagaatcctgcaaaaaagagcgaaccggcaaagtattatgcacaggcgcaggcgtcgggagagttggactttgaagagttgtgcgaagcgatcaccagtcgttctacttgtacggaaacggatgtacgtgcggctatttcgggtattctttacgaagtgaagcgtgcgttgaaggcaggaagaattgcgagactgggcgatttgggcagtttgcagataggactcaacagtgaaggtgcggcatcggtcaaggaattttccggttcaatgattaagggggcgcatcttattttccgccccggtaagacgctggcggagttgatgaagattctgagttatcagcaagtgcagactcgtgcggtggcgcaggcgggtgcaggcgatggcgggggagaagaccctgacaagaatccggattccggtggtgatggctccggtgatgaagaggctccggaccctacggtataattggcagacgggtcaaggtaataacgaattagaataacttccattaatattttgataagatgaaagaaatagtaagtcggattttagatgtgatcatgtatctgattcctttcttcggaaagagaaagcgggacagggtggtgagagaagtgcgctatcatactacttgtaaggaggtgtgcaaagtgaaaacgacggaaagggaaaaggaacatgagaaagattagtctgattgtgatccattgttccgccacccgtgtcgattgcgactttacggcaaaggatgtggatacggctcaccgttatcgtggcttttcgtgctgggggtatcattattatatacgcaagtcgggcgagattgagccgatgcgggatgaagatacggtcggagctcatgcacgtggctataatgcgatcagcttaggtgtatgttatgagggcggtctggatgagaatggaaaagctgcggatacgcgtacaccccgtcagaaggaggcgctacatcgcttggtacacgaattgttgcagcgttatccggaagctaaagtagtagggcatcgggatttaagtcccgacaccaactataatgggatcgtagatccttgggaacggattaaagaatgcccttgctttgaggtcattggagaattctccattaattaactaccaccgtagtgaaatactctttgaatacctccgcagctttttcaagctgttcgggggtattttcttttacccctttcatcttgtattcctgtcccatcgcttcgtacttatgtacgcccagtgtatggtaaggcagtatttccacccgttggatcatcttgtattttccgagtgcttctcccagtgcgcgtatgtcttcttcaaaatcgctgtatccgggcactagcacgtagcgtagccagaaaggtttctcctgttcttccagccaggcggccgtgcggatggtttgctcgttgcttcttccggtgagcgtctgatggcggttggggttgaattcctttatatccaataacacaagatcggtcagtctgaataattcttctacgtcttcgttccaaagtcctccgttgctgtccagacagacatggatgcctttttctttcagttcgcggaccagcgggacgagtgttttcgcctgaaacgtcggttcgcctccggagaaagtgattcctcctcgtttcccgaagaaggggcgctggctcattgccatgcggacgatttcttccggtggggtaggcgtgcctccctttcctgctatcgtatccggattggcgcaatagaggcagcggaagttgcatccttgaagaaaaacgacgagccgtaagcccggcccgtcgaatgttcccatactttcgtatgaatgtacgtttatcatcatatagagtaatagattacatacgttcgtggaagctacggctgataacttccagttggtgttcgcggctcagcttcacgaagtttacggcatagccggaaacgcggatagtcagctgcggatagttttccggatgctccatggcatcgtacagcatatcacggttcagtacgtttacgttcaggtggtgagcacctttggtgaagtaaccgtccatcatcgttacgaggttctcgatacggtcttcgtccgtagcacccagtgatttcggaacgatagagaaggtgttgctgataccgtcctgtgagtcacggtaacgaagtttcgctacagagctcagagaagcgatcgcaccattcttgtcgcgtccgtgcatcgggttggcacccggagcgaaggcaacacctttggcacgtccgtcgggagtagcaccggtctttttgccgtacatcacattggaagtgatagtcagcaaggagagggtaggacgggcattcttgtaaactggcaatttcttcaattcttcgctgaagaagtataccaggtctacgccaaggtggtctaccttgtcgttgtcgttaccgaagcaagggaattctccttcgatgtcgaaaccttctgtcaggccgatatcgttgcggcgggcagttactttcgcatatttgatggcagacagtgaatcgagggcgatggaaagtccggctacaccgtaagccaggttgatgcgcgggttcgtatctacaagagccatctgggccttctcgtagtaatacttgtcgtgcatatagtggatgatgttcatcgcttcgttatatacgcgggcgatttcggtcagcacttttttgtagttgtccattacttcttcgaacttcagcgtgtcactggtcagtacggggatgttcttcaccatgactgtaccggtattctcgcaacgtccgccgttgatggcaagcaacagggctttggccaggttgcaacgggcaccgaagaactgaatctgcttgcctatttcctggtatgatacgcagcaggcgattccgtagtcgtcggactgacgtacttcacgcatcaggtcgtcgttttcgtactggatagaagaagtgtcgatagaaacctttgcacagaattctttgaatccttccggaagttccgggctccagagtacggtcaggttcggttccggtgaagggccgaggttgtacaatgtctgcagaaaacggaaggaggtctttgtcactttggtacgtccgtcgttgagacgtccgcccagagattcggttacccaggtcgggtcgcctgcaaagatgtcgttgtatgattgcatacgcaggtggcggaccatacgcagtttgatgacaaactggtcgatcagctcttgcgcgaacgattcggtgatggttcctttgctcagttcatattccagatagatatcgaggaaagaagaaacgttacccagtgacatagcggcaccgtcttgttctttgacggcggcaaggtaagccatatatacccactgtacggcttcttgtgccgtgtaagcgggacggctcaggtcgagaccgtagtattcgcccatcactttcatgtctttcagtgccttgatctgttctgccacttcttcgcgcaggcggatgcgggcctctgtcatcggaccggtgaggttgtgcaaatcttccttctttgcttcgatcagacggtcgatgccgtaaagagccatacggcggtagtcaccgatgatgcgtccgcgtgcataattgtcgggaagtccggtaaggaatcccagcgaacggaaggaacggatttcttccgtatatacgtcgaatactccgtcgttgtgcgtcttgcggtagtgagtgaaaatatcttttacgcggtcgtccacttccacgccgttttcgtgacaggctttgctgactacgttgatacctccgaaaggcttgatggcacgtttcagaagttcgtctgtctgcaggccgacgatcagttcgttttccttgtcgatatatccggccttgtgggaagtgatggttgatacggtaacattatctaatgagcggacaccgttgttttctctttcttctgccagtgcttcgaggcagcggttccatacggctttggtacgttctgtaggtccttcgaggaatgaagcatctccgtaatacggagtgatgttatgacttacgaaatctctgacgttgatttcgctgctccaaagaccgtctttaaagatcttgtttaattccataaaatgataaaattagaggttgtagttatcctattctttagagcgcacaaagttacaatcatttttcatataatcagcataaatatgctctattttatgcttttcaacataaaatacctattaattgctatccttaggaaaagattagattaaatttttagtgaaaactcttgcaagtttaaaatatcttcgtacctttgcaccgcttttaacgaaaagcacttctgacaaggaagttttggagaggtggcagagtggtcgattgcggcggtcttgaaaaccgttgtaccgcgaggtacccggggttcgaatccctgtctctccgctgaaaagcagcttttgggctgcttttttgtttttatggagggcgacgcctccgatgttgtgaaacgaaaacgggagcgttttcttagtgtttattgagttttttgaaaggagagatgctcgagtggttgaagaggcacgcctggaaagcgtgtatacgccaaaagtgtatcgcgggttcgaatcccgctctctccgctgaatctgaaatttagtcaaaacttctcgttctttagccaaaagttcttttcataggtcaaagtgtctggtatttctagtactcttctcttgtatatcattctcttttctgtatatttgcgcccgatattttttttgagatatcacatttttgtaattctgaaaatagacttgatggataaaataaatgcggtaattactggggtcgggggatatgtgcccgattatgtgctgactaatgatgaaatttctaaaatggtggataccaccgacgaatggatcatggggcgtatcggcataaaagaacgacatatcttgaatgaagaggggcttggaacttcgtatatggcccgtaaggccgccaagcagttgatgcaacgcacaaagagtcgtcccgatgatatcgatctggtcattgtcgccactactacttcggactatcgttttccttcaacggcatctatcttgtgcgaaaggctggggctgaagaatgctttcgctttcgatatgcaggcggtttgcagcggtttcctgtatgcgatggaaacgggagcgaattttatccgttcggggaaatataaaaagattattattgtaggtgctgataagatgtcatccgtaatcgattatacggaccgtgccacttgccctatctttggcgacggtgcggccgcttttatgctggaaccgactacggaagaggtcggcatcatggattcggtgttgagaacggatggtaaagggctgccttttctgcatataaaagcgggaggttccgtatgtcctccttcctattattcattggatcatcatctgcattatatttatcaggaaggccgcacggtgttcaagtatgccgtagcgaatatgtcggattcctgtgaagctattatcgccagaaaccacttgactaaggaggatattgattgggtgattccccaccaggctaaccagcgtatcattaccgctgtggcgcaacggttggaagtaccgtccgagaaagtgatggtcaacatcgaacgttatggcaataccagtgccggcacgcttccgctttgcatctgggattttgagaagaaactgaagaaaggcgataatctgatatttaccgcattcggtgcaggatttgcctggggagcggtttatgtgaagtggggatatgaccccaaagaagatgcgtgacatatcgggtacccgatacgtcacatcctcttttgaagggtaggagagacttattccagttcctcgataatcttctttacatccaccggttgcagtcgtccgtacaccttttcgccgatcatcactaccggagccagtccgcaggcgcctacgcagcgcaggcaatccagcgaatactttccgtcgggggtggtttctccgacttcgatgccgagtacccgcttgaactcttccagcaacttctccgaaccacgtacgtagcacgccgtgcccatgcagacggaaatcggatgctttcctttgggagtcattgtaaagaaggtgtagaatgtcacaactccgtagactttcgacacggggattctgagtttggaggctatgatccgttgcatctcttcgggcagatagccgtgcagatgttgcgcttcatgcaaaatattgattaattcgcccgcattgttcccgtgtttgtcgcaaatcgtcttgacttgttccaccacatcgcaggctagcttgatatctgacataatagtacttgtttaaagttaatcaatcgatttgttgaaataatgcgtgtgcaagagcatttccgatttctcacccagcggtttgccgagatattcttcatacagtttctgaatatatgggttatcgtgagatttgcgcaaaggtttgttggcatcttcccggtaaagggcgttggcacgggcgtagagaacgtccgagttgccgtgatgcaacggttgcccgccacctccgatgcagccgccggggcatgccatgatttcgatgacatgatattcattatgtccgtttcgtatatcttccagtaagtgccttgcgttgcctagtccgtgtgcgatgcctactttcagttcaaatccgttcaggtcgatggtggcgcgccggactccgctcagtccgcgtacctgttcaaagttgacattcttcagcggctgtccggtgtagatttcataaacggagcgcagggcggcttccatgacaccacccgtcgtaccgaagatgacaccggcaccggttgattctcccatagggttgtcgaacgggctgtccagcacgagggtaaagccgatgttggctcgctttatcaggcgtgccagttcgcgggtggagatggagtaatcgacgtcggggacaccgtttactttgaactcgtcgcggtcgcattcatatttcttggcaaggcagggcatgatggagacgactactagcttttcgcgggggattcccattttctctgcccagtaagacttggcgatggagccgaacatctgttgcggagaacgggcggtagaagggatatccagcatatccgggaagtggtgctcgaagaagtttacccaagccgggcagcaggaagtcaggatcggaagccggacggatttatctccgtccagatagcgtgtcagtcggttcaggatttcggaaccttcttccatgatggtgaggtcggcggcaaagtcggtatcgaatacatagtcgaaacccagttcgcggagggcgtaaaccatttttccggttaccagtgtgccgggaggcaagccgaattcttctcccagggcggcacgtacggcgggggcagtctggacaattacgattttatcggggtcggccaaatcgtccagaaggcggttggtgtaatcccgttcggtcagtgcgcctaccggacatacggctacgcattgaccgcagtaggtacattcgctgtccttcatcattctgtcgaaagcaggggctatcgttgtgttgaatccgcggcggatggctcccagtgcgccgactgtctgtacatcgttgcagacgctttcgcatcggcggcagaagatacacttgtccatgttgcgcacaatggaggaggtcacttcccgtttgcggggagaaagttcgccgccgttgaacggcatttcacggatgttgaaacgcagtgccagtgtctggagttcacagttgccgcatttgggacaggtgagacagtcgttgggatgatcggaaaggatcagttcggctaccactttccgggcgctcatcacgcgtagggtactggttttcactaccatcccttccgtgcaacgggtagcgcaggcgggagccagattgcggcgtcctgccacttcgactacacagatgcggcaggaagcgggattgttcttgatacaggttcctttcaggtcgatgtgacacagcgtaggtatgttgatgccgattttgcaggcggcttcgaggatcgtgcttccttcgggtacggtgataaagtgaccgtctatctggagggtaatttgtttttcttccatagcagtagattttagcagacaagaatagctttgaatttacagcgtgccatgcacatgccgcacttgatacatttctcggggttgatgacatgaggtttgcgtaccaagccgctgatggcatccgccggacaattcttggcacacaggtggcaaccgatacaaagttccggattaatggtataggtcagcagggacttgcattgtttggcgcggcaggtcttgtctctgacatgttccagatattcgtcacggaagttgtcgagggtagacagtaccggattcggagacgtttgtcccagtccgcagagtgccgtgtcctttatcacccgtccgagggtggcaagcgtgtccaggtctttttccgtgccccgtccttccgttatcttgttcagcagttccagcaggcgtttgttgccgatacggcatggggtacatttaccgcaggattcttcgacggtaaagtcgagatagaaacgggcgacggataccatacagtcatcttcgtccatcacgatcatgcctcccgatcccatcatggaaccggctgccagcaggttgtcgaagtcaatgggagtatccagatgtttctccgtcagacagccccctgacggaccgcctgtctgtacggctttgaatttctttcctcccttgatgcctccgccgatttcgtagattacttcccgcagggtagttcccatcggtacttcgatcagtccgacattgttgatctttccggcaagagcgaagactttggt

SEQ ID NO: 4534 - DNA, 56302 bp, Unknown
  gut microbiota DNA sequence
ggcgaattttcatctttatattccggatgtgccagctccagatcctggagttcacgcatcttatcatcaaactccttatctgaaatttcgggagcattcaaaacgtaataattatagttatgccgatgaagttcagcacgcaattcctctattttttcctttatatccatatttcttcgattgtttaaggcaaaaatacaggtttatctttgaatatttgtacttttgcgaaaaattataaagattatgcgtattgacattataacagttttacccgagatgattgaaggcttcttcaattgttccatcatgaaacgagctcaggataagggacttgcagaaatacatatccacaatctgcgcgattataccgaagacaaatatcgtcgtgtcgatgattatccttttggcggattcgccggcatggtcatgaagatagagcctatcgaacgctgcattaacgctctgaaggctgaacgcgactatgatgaagtgatttttacgacccccgacggagaacagttcaatcagccaatggccaacagcctttctttggcccaaaacctgattatcctttgcggacatttcaaaggtattgattatcgtatccgtgaacacctgatcaccaaagaaatcagtatcggagattatgtgctgacaggaggcgaactggcagcagcagtcatggcggacgcaattgtccgtatcatccccggagtgatttcagatgaacagtcggcactttctgattcttttcaggataatctgttggcggcacctgtatatactcgtcctgccgactataaaggctggaaagtacccgatattttgttatccgggcatgaagcaaaaataaaagaatgggagctacagcaatctttagaacgaaccaaaaaacttcgccctgacttactggaagactaaaaatatatgtaaataaaaacgacggtgaaaaatatgagaattttcaccgtcgtttttatttatgttctataagaaagacaaatctgttattttactcttcgcactgggaatctcttttcatctatcattccggtactgattttattcagtatacttaaaaagtaaaatagcatttttctttcgtattatatgcgaagggttattgtatgttttcaattatacctcaagcgcaccaataatttcttttactgacttacatccgtgtctttccaagtaattatttataccatcttcaactttgattgtaacagccggatctataaaatttgccgtaccaatctggatcgcagaagcaccggcaagcatgaactcaacagcatctttccagttcataatacctcccaagcctatgacaggaatatttaccgcctttgcaacttgccaaaccatacgcaaggcaatcggtttcacagcagcaccggacattcctcctgtcacagttgacagaataggacgtttacgttccgcatcaatagccattcccagcaatgtattgattaatgatacactatccgcaccactttcttctgctgcacgggcaatttctgtgatatcagtaacgttcggagagagtttaactataagtgtctttttgtaagctgcacgtaccgcttttactacttcagaagcaccttttgctgacacaccaaaagccatacctccttgctttacattagggcacgagatatttagttctatagcaggaattttgtcaagttcattaatgatctctgcagttttcacataatcctcaatagcagaccccgacacgtttacaatcatattcgtttgaatgtctcttatacgaggatatatctgttccacaaagtagtcaactcccttattttgcagtcctacagcgtttaacataccggaaggagtctctgccatacgaggatatgggttaccttcacgtttgtgaagagtagttccttttacaataataccgcctattcgcgctatatcaatgaaatccgagaactcttcaccatatccaaatgtaccagatgcagtcatcaccgggttcttcatctgcaattcaccaatgtttacacttaaatctgccatagtagtttatttatattaaaaacaggaccttctttacatacacacaaatgtccttctgtcgtattttccacacaacagagacatgctccaattccacaagccattgtattttccaaagaaacttcacattctatctgattacttttggcatattttgccacagccatcatcatcggtttaggaccacaagtataaatctgctcaaaatgtacctgatttaatatagaatgctgggtgacgtatcctttttctccgtgacttccgtcttctgtagtagtatatacctctccatatttaacaaattcttccagctgcaacaagtctttattgctacgagcccctaaaaggaaggtaggtttatgaccatttttcgccaattgttcacctaaatataacataggggctgttccgacacctccgcccacaagcaaaagcttatcagaaggcttttgaggcattgtatagccattccccaaaggaagtactacgttgatcacatcgcccgaatttacttctgctaaacgtcttgttccgtctccaatcaactgaataaggaaccacacttcgttttgtcgcttgtctacaaaattaatagaaataggacggcgtaaaaatgtagtagatgaaccgtccacccgaagttcggcaaactgccccggcaacatctcgggcagcaatgactgagaagtcaatttcagcaatacatagtttgcattcaatctgatattctcagtaactgtcagatctaaaataaatttcttcatgtatggatataaaagtataaattcgtattccggtgcaaagatacaggaatttgctcaaaccaccgattttacctctcatttttcaggtcgaaaggtttcataagtattatcatcaaagaatattcttatttcagtgatttttctggcaggcttttctatgtacctaatctcctgttttacaatctctttaggtgcattttcggctgttcttaatgccatttccttgcgattttccggattaatcgtctctttggacggatttacaggattctcatcaaacaaagaaggctgataatctccattggaagaaactgcagaagcatcttctgcagatgctatcatttcgcctttaccataaagcaaccattcaagatttacataattataggtctgatgtaccttcattacaacctccaagcttggtttattccgatcattcaaaatatgcgagagagtagattgctggactccaattgtctcagcaaaaactcttggaggaactttttctctctccattatcattctaattctgtcttttatctccatacagcttctttcttgttacaattgtatgtattaaacgttggtttcacaaaaatactaataaccactacggatatacaaaggtaaatattacaaatcacaaatgcaaattacaagtacaaaaataacaatattacaaatgtgtgattattatcacaattagactaatatgtttgtaaaacacaaaataaagcataaattacaatgatattttagatttaacaaaacaatatattatattgatttacaacattatacatacagataataaataagtaaatacaatattcacaaaaatatgcttcactcaaacagtaattttagagctataattcaatattagagtatatttatatggtatacaatgacataacatataaaaaacaaattgttaaccactctcctattacatttatcaactgtatattactactgtaaaacaatcagtatacttttgtgattcagtcagcttgatcacatttgtaatctattcacagatataaacttcacaaacaaacaggcatgattacacaaacgtaaatatcaatagttgcaaaaacaataaatcaaggaataaaatgcattatttacttatgtatattgagaactcttcaaatcttcttttacattttcttctgaagtacctcgcaaatcgtaaatccttgccatatttccgcacattcagtcgatcaattgttttttttcaattctagaagctctaaaattgaattaaacacctgtattataataaattacacctatttcatcaatacccaaattaagatcaactagaaaaataacagcaaaatatcccaattatcccacaaattatcaaaatgacattttatcaattcaggaaaagaaagatgatccttccaatttatgcaaaaccatttatgctaatatgatttgccattctatatttatagtctgaattaaatcagattttttcaattttgaaaatgaatataacataacctcaaaaactagaaaagagagaaattaccaaaattgaacttaaagaagagaagcaaaagatcttcaaattcctttccattcataaaagtcaggaaaaagagaacaacagatccattgtaaaatattcgtctataaaagaagatttggttatgagtctgacacaactaatttgcagtatataaagaaggcatatacttaatctgttttacagtaaaagtatatgccttttgtttatttagagtattcagttttcctaatgcaaaattttaaacactaattcacgaagaatatctccgtcagacattgaactatttttcactccttttgattttgcatcggcatatcgtatttcaccaacaatctgcattgtctttactccactatatttgcgcatcgcaattgagtaatcccgagcttgccaagtagttcttagccctagcatattagcaataccctgctccgatttatcaggcgcataatatgctaacatcaagtttgaataaaagctgaacaataaagacaatgtcatttgaattggattcgttttgggattttcctcaaagtattttattattttatttgctttcagaatgtctttttcaaccagagcactccgcaattcaaagttattataatctttgcttatgcctatgttcttctcaatttgttcgggagttacacgtttctgtcccgtaggcaaagtgataatcagcttttctaattcacctgtcaaacgacttaaatccgagccgacaaaatcagccagcatagctgttgccttaggttccatatctattccttttctcttcatgtaggaagcaataaaggccggaagctgggcatcttttatcttcttagactcgaacaaaacaccagtcttttctacttcagctgccaactttttcctacgatccaatgttccatgcttatggcatatcaccaaaatagtggaatgaagcggtttctgaagatagtacgataattcttcgatgttccggaccgcttgcgcttctttgactaccaccacttggtgttcggacatcataggatagcgtttggcagcatttatgattgtcgctacatccacatcagcaccgtacactacagtcaggttgaactctttttccgtttcgttcaagacattatcagtaatgtaatcggcaatcaaatcgatataatacgattcttctcccatcaaatagtagatgggacgatactgctttgccctcagttctttgaggatgtcatcacaggtcagctcttgttttgccatatatattttttagaaagaccggcagttaccagtcgaatttcaagtgttttacagttttctttgcatcaataatcatacgcagagaagcgataccaatctcaacatgctcttctacatagttcttggtaaccagattatcgcttttatcagttttcactccatccggagtcataggctggtcagataccaataacaatgctcctgtcggaatatgattggcaaagccacagctgaacaaagtggccgtttccatatcaaccgccatcgcacgtgtctttttcagatactccttgaatgcttcgtcatgctcccaaatacggcgattggtggtatagacagtacccgtccaataatcacggccatagtcacgaatggacgaagaaacagcacgctgcaacataaatgcaggcaaagcgggaacttcaggtggaaaataatcattggatgttccttcaccacgaatagcggcaataggaaggattaaatcgccaatttgatttttcttgtcgataccaccacatttacctaaaaataagcaggctttcggatgaatagctcctaataaatccatgataatagcggcattagggcttcccataccgaaattgatcattgtaatgccttcggctgtagcggaaatcatattggcatctctacccaaaataggaacatcaaactgatttgcgaaaatctctacgtacttgttgaagttagtcaacagaatatactctccaaaatcttccaggttacgttttgtgtaacggggcagccaattagctacgatttcttctttcgttttcataattatctattaaatttgtggttccaataatggaaaccgttatttaacttacaaaaataataaatgttatcgttaaacctaccagtattcgacactaaaataaacgtacgaaacggaaaaaatgtaattttcgacgtgattcgcaaacgatatgtcgcacttaccccggaagaatgggtacggcaacactttgttcactttcttattgcgcacaaaggatatccgaacgcactccttgctaacgaagtaatggttaagctgaacggcacaactaaaagatgtgatacagtactttaccggagagacctttcagcacgaatgatcgtagaatacaaagctccgcacatcgagatcacacaagcggtattcgatcagataacccgctataatatggtattgaaagttgactatctgatagtaagtaatggaatgcagcattattgttgccggatggattacgcccatcagagctatacctttcttcaggatattcccgattataacgcgctataaagatagtgtcactataaggtcaggatacttacactataccacacacatagtgtaagtatcccaagcacatagtgacaccatctttttcttgtctccgaaagcttttcaatcgatattctttttttacatatctgtgttttttttcacatcatcatttttcttcctgctaaacttctcttgcagtttctgcatcaattcatagaaattaggaatatagactgtcgctaataaagtattcatcgccataccgaaaacaaccgcagtacccaacgctatacggctctgcgcaccagccccggtagcaaacagcaaaggcattactcccaatacaaaagcaaaagaagtcatcaagatcggacgtaagcggacatgtcctgcttcgtatgcagcctcacgaattgagtttccttcagcacggaaatcacgggcaaactctacaatcagaataccattctttgccgaaagtgcaacaagcaggataataccaatttgtgtatatacgctgaccggagttcccattatcatacatcctatcattgctcccaacaaggccaccggcaaacctatcacggcagccaccggactggtccagctttcatattgcgcagccaaaacaaggaatgctacaatcaaggccatgaccagaacaatggtggtcgtatttcccgcctgtgtttcctgataggcaactgacgtccattcatagccaaattcatctcccagctgttctttaaacaaagtttccatttcttgaatagcctgtccggaactgcttccgggcgctacattacaagtcaaggcagctgttgaatacatattgtaacgattgatctgatcctgtcccaactgctcttccactttggtgaaagaagaaagggggaccatctctcctgccgaattagccacactgagttttaagacatcatcaatgacgcgttgtgcctgatcacgcgcttcgatcttcacctgataaatatgaccgaattcaacgaaatcattaacgtatgccgcccccatataatagcttaatgtagaaaatacatcattcagagcaatgcccataaattgcaccttatcacgatcgatattcagaaaatattgagggacatttgcctgatactgactggatacagaagctaaggccggtttggaatgagaagaagcaagcaatgcgtcaatagcctgctgcatttctgtcggtcccagatttctccggtcttccaattgaagttgcaagccaccggaagcacccaatcctggaatagccggaggaaccatagcaaatgcttgtcctgcctgtatctccatatacgcttcgccattaaaacggtcgacaacggcagcagccgtatgctccttccctttcctttcgtcccagtttttcaggacaacaaaataggtcgcggagttactttgctcacctccgcccatcacggagaaaccagtgattccaatgtaattctccacttccggataagaatccaaaatagcattgattttatccccgacagcttgtgtacgttccaagctggctgccggaggaagctgaacaacagcaataaaataaccatcatcttcatccggaataaatgtcgacggccaacgcataaagagtattatggcaatcactgtcagaatagcaaaagatacaaaagagataagcggacgttgaagtaaccatttcaccgtactatcgtagactccctgtgtcttatcatacgctttattaaatcctttgtatataaagaagttagacggtttgctcttttcgaggaatagagcacaaagagcaggcgtcagtgtcagtgagttaaaaccgcttaatacggtagaagcagcaattgtcagtgcaaactgcttatacaactgccccgaaataccgctgatcatcatcgtcggaataaacacggcaagcaaaacaagcaccactccgacaatcggccccgtaatttcccccatagcttttgtgactgcttcacgagttgaatattgtccggtctccagcaatcttgaagcattctcaaccaccacaatagcatcatccactacaatggcaactgccagaatcaatccgaacagagtcagcgtattgatcgaaaaaccaaatgccgccataactgccaatgtaccgatcagcgatacaggaattgtgatacaaggaataataaccgctctccagttctgcaaaaacaggaaaataaccagtactaccagcagcgttgtctcaaaaaatgtcaccattacttcatcaatagaagcatgaattacatccgttgtatccaaagttacgttataggctactcctgtaggaaaactggtcgccagttcctccatcttagccttcactccttttgaaacgtccagcgaattggagcccggctgttgatagatagcaatcgctgcggtaggcatccccttcaatcgtgatactacactataagaagcagaccccaaatctattcgcgcaatatctttcaggcgaagcattgccccatcctgttcccgacgaatgataatattcccgaattgctccggagaagtaagtcgcccctgtacattaagtgtatattgaaaggcatttttattgtcctgtccgatcggttgaccgatatagccggcggacacttccatattctgagactgaatggactgatatacttgtgccggagaaatgttccggatacgcatagcttcaggatccagccagatacgcatggaataatcacctgctcccatgacattaacagctcctacgccaggcacacgtgataactgatcgaccaaattcaatttggcatagttagtcagatagagactgttgtatacagagtctttcgaagtcattgtcaggaacatgacaatgttcgaagactgtttctgcacagtcaccccctgtaccactaccggttccggcaaggatgattgagcaacacttaccctgttttggacttgtacagtagccatatcgatatctgtaccgacggcaaatgtaattgtcaaagaatatgctcccgaagaggaagaatttgaagacatatagagcataccgtccaccccattcacctgctgttcgatggggagtcctaccgtttgggctacagtttcagcattcgcaccgggatagacagccgatacctgaaccgtcggaggtgtaatctccggaaattgcgccacaggcaatatattaagtgcgaccaaaccggctaccacaatgagcagggcaagtacggtagcaaaaattggtcggttaatgaaaaacttagaaaacataatatataagtttacgattaatatttatataaggacaaacagttacctgcatcgtctgaagataaccaacaagccgaccgcatcagggtatcggctttatcttcattccatctctgaccttcatcagagcttctgtaacatatcgttcctgtggtgagagtcctcccaacacctgccgtaaggtatcattaatcagttgtcctatttcaatatgccgatagtgtactatgtccgaatcattgacggcatacaggaatttaccgagctgatcggttccgatggaagcctctttcacaagaattgcatgatcggcctctccataaggtaaggtaatgctgacgtacaatccactcttcagtactccctgcggattatcaaaattggcacgtaccatcagagttcctgtattcaggtctacgttcggtgacagataatccagtgttgccggataggattcggtaccttctttccccagctgaaccatgatctttttcggaagatccttcgttggctgctgattgttcatcgacatctccagccattgattatcagcaacattaaaatacgcatacatctgatcgtccttataaatagtagccagcgtaaccggctgcaaagaaccgccgacataactgccgatatccactgtcgacttgctgattgtcccgtcaaaaggggcacgaacataacaatatcctaaatttgtacgcgctgtactcaaagcagcttccgcattgctgacagctgctactccttctgtcacagacgattccgactgcaacacctgtatctgactcacagcatcacttttcacagcctccttcatacggctataattattacgggcatattccaattgtgcctgagcagttttcagttcagcttccgcttgtgccaccttatcattatataaggtaggttctattacaaacagcaactgccctttttttacccgtccgcccggtgcgtaagagacagactgtaatgttccgttcactctggccacaagatttacagttttctccgttgtcagatagcccggataatctttcgtcaaagtgatgtccttcactataggtttcgctacgctaattgccagagtcggcattcccttcattgctccggcgtcttttttctccttgcaaccagtcaataccgacaacacaagaaaaatatacattagttttttcatatccgttaggttatattttatttatagattcttttattctctccaaccgcctcccagcgctttataaagacttatcagttgcagtaacgagctaccctgcgcctgtaccagttgattctcataagataacaaagaccgttgtgcatcaagcacattctgaaaaggagaaagcccttgtttataaagttccagtgaaagtttcagagtttcgacaccttgattacgcacttccctcaaagctacaatctgcttgatcgagttccggtaggagttcatggcgttatccgtttcctgtaccgcagtcagaactgtctgattaaattgattgatagattcatccaactgtgccttagccagtcttgttgcattcactaattgtcctccactaaaaatagtccaactcaatgacggagcaatctcataggtcatacttttacttttcaccagatcattcaaatcacgggctgcatagccaaacgaacctttcagaaagatcttcggcagccaatcggacttggaagcgccaagtaatgcagcttgggcattcacacttctctccgcacttcgtacatccggtcttctcagtaataaatcaaccggcatacctactccgatcggttccatataatcaggtaatgttccagtagtttccaatacaggacgtatttcttgcggatacatacccagcaaaacagccagtgtcgtaatatattgattgatacctgcctctaattgtggtatagaggctttagtactgtataaaacggatttggcctgtgccacatccagcttggcaacaagtccggtattataccgtacttccgtgattttcaaaacttcttcctgagaagctacattcttatttaccacttcaagttcctgctgcaattcccgcaggttaatataagctgaggctacctctgatgccagagaaaccataaccgccgcatattcctctttgctggcggcaaagttttctttctgcgcctttacccgtttacggatactgccgaagacatcgatttcccaactcatactgagtgcagcatcgtaataatgatctgtagactgaggtaaggtactggtatttccactggtttcctgtcgggtccatccagcattcagtccgatagatggaaagaaatttccacgttctgcccaaagattggcacgtgcagcagctatacgattaattgccatcgctacggaataattgcgatctactgccaaagcaatcaaagagtccagtctggtgtcctgaaaagacttccaccagtggtcgtccaccggaagagtctgttgaaacacttctccactctcttcccattctttaggaagaggagtattcaaatagcggttcactgtctgtccaaccgcagttacagttgaaagaaacaaaaggagcgatacgctccacgctcgtacattcatattcggttcaggtttttatgaaatgaaaagataacaattcaaggttaggtttgtttaaaggggtagtaaagttagaagaaataaaaaaagccccgcaataatgcgaggctttcgaatacatattcaaatatggtaccttattcagcagtttttcttctgattgctcttttggtagtagtagccggagcttcctctactttatgctcaatttgtacaccagccaattccgggtcgatcataatacgtccgcaatattcgcaaacgatcactttcttacgggaacggatgtccaactgtctctgaggcggaatcttgttaaagcaaccaccgcacgcgtcacgttgtacatatacaacgcccaatccattgcgggagttcttacggatacgtttgaatgactgcaacaaacgcggttcaatcttagtttccagatctttggctttatctcttagcttctcttcttcctgtttagtttcagagataatttcatccagttcgcccttcttctgttcgaggtctttttgtctttcgctgagtatttgttcattctttactacttcagcttctttttcttctctgtccgcactgaattctttgattcttttttcgcaaagttcgatttccaggctctggaattcaatttccttcgtcaagaaatcatattcacggttgttgcggacgttgtcttgttgtgacttatatttttctactgaagcttttgccgtttcaatttctactctcttacctgcaatagcagatttcagttcatccacttcagctttgatcttgtcgatacgggtactcaaaccagcgatttcatcttcaaggtcctgcacttccaatggaagttcacctctcaatgtcttgatttcatcaatcttagacaacatagtttgcagctggaacagtgttttcaacttctgttccaccgtcaactcattcggatctttttttgcttctctagccattttacttacaaatattttatgggattcgtatttattttactcaattggagcgcaaaattaggaaataaatcccggattatggaataaaaaatttcttttgtatattgttcgctttcgtaatgaccgatttctgccatcaggatatctccttcgtgaccaaaataatcatgatacttaatctcacctgtaataaaaacatcggctcccgaccggattgcctgtggaagcaaaaatgctccggcacctccgcacaatgccactgtctgtatttctctccctgtcagtttgttatgacgcagacactctacttcaaacgttttctttatacgtttcaagaattccatctccgtttccggctcttccagttcgccaacgattcccgatcctgcctgtgcccactcattttgtagcggatacaagtcgaatgcaggttcctcataaggatgaacagacaatagtgccctgactacttccgactttttgaatgcaggaagaattgtttcaattctcacctctccttcccggtggagttctccaatcactccacagaaaggatgtgttccttctttggcacggaatgtcccttccccttccagattgtaactacatgaatcatagttaccaatattaccgcaaccggcagcaaaaagtgcgttccttacaatatccgcctgagcaatggggacaaaagtcaccagcttcatcaggctattttcttttggttcaagcactttcagatgtttcaatccgattttttcggctatcttataatttacccctccctgtgcattatcaagattagtgtgtgctgaatagatcacaatatcattttttattgctttcagcatacagcgttccacataatctttgccagtaatggatttataacctttaaatatcaaaggatgatgcgatatgacgaggttataccccaacgcgatagcttcatctaagatagcttcagtaacgtcaagacacaacaaagcccctgttgcttccgcatctgtcaatccgatttgcaggccggcattatcaaaaccgtcttgcaatggcagaggcgcgaatcgttcaagggcgcttactatttccttaattttcattatttagagaaaatttggttgcaaatatagcaaataaaataggaataagctcccatcttatcgtttttttagtaaatttgtcgcatatccttaaaattagaacacgatgaaaacaattctatcctgctgtttagtaattattctggctgtttcctgccaaatgaaacagaatcagaattccgatgagtcaatcaatgaaaacatgagcgttgataatacagaaacttgtatggtagataccgtaaaagctacagctatcttttggatagataaagcagaagccaaacattgcaaagattcggggctccgtacgattaaagcgaaagtatttattcacgaaaatggaaaggttgacttcctgtctttcaccaaaaagcaatcatcaggtgtggaaaagtacatactccatcatcttgataaattccaaatttcaaaacgaatgttggaaggcgggtatatacaaacaggagaacaattcgttcagcttcgctgtatgagggagaaactgcaagctatgcaataactcaccggatctctttcctgaatggaagaaatatttatttgtgaaacttcatctgcaccttattctttagtgcataccgttcatctaccactttgtctgtaggaaagaaagtgaaaaaaagacgccaccctccttctgtatagacaaatttgcgtccgtttgcgccatgaagaatagcttgatatttttccaaaacgaaagattcgatatgttccggcatttcatttcccattaccgagaactctacagtaatgaaaaaattcggaacagacagttccgccacattttggaatatccggtcagtaacagtcatttcttcgtttctttcgttacttccaataacttcccgtatgcatcaaatgatcttcgggaagccagtgaaatagtaatcatcagtgacagcatggaagccgtgaaggtaataaccataatcatcatctgatatttgattgccacattcggactgcttcctcccaaaatttgtccgatcatcgtacccggcagagccaccaatcccatcactgcaatattcgcaatcaaaggactgaatgacttgatgatggcctgttttataaatggtgcctgagcttcctggcgtgtagctccatttcctaataaataacggtataattgttgttcccgcttcagtccgctataataagtattcaatgcaatcacattacttgaaagcatattccccattaaaatgccgaatattggaataaaatactgagcactgaaaatgttatctaactggaggacaacaccgataaagtacaatccaaccactactacactgcacaaaaaacctatagaaatcggtatcagcaagatgctccgtttcagttgagtacgtaccaacgctgtttgtccggcaacaaatatcatgataatcacccaaaggaaattaatccagggattattccacaagaaaagatacttcagatatataccgataaaaaatagctggataatcattcgaagcgtacctatcacggcaggtttcagcaaacccgtcttgaacttccaaagataaaagaacggaatggcaagcaatagcaagccaataaataaattataatatgaaatatcgatggttcccaaaataaattccctttatgctagtattaaatatcgtttatagttctattaaataatgacagcccgaagcaaagtctttatcatgtgatacagctaacacagccgcccctttctctgcctgccgcctgaagaaagccagcactttgtctgttgacccggcatccaacgctgatgtcggttcatcaataatgatcaaaggtttgttgagcatcgcagccactgccagcatgatacgctgacgttgtccgcctgagacttcattcacccttttagtatacaaatcatgttccagccccagatcatcaaaatattcatagagcctttcttccgaaaaaggaacggaacgatttactttcagatcaaacggaagagccaccatttcctttacccattcaaaaggcaaggccagttcttgtggaatccatgcaatttgccgccggattatatctatagttgatttatccaacaaggtatctcctacttttatggtcccctcctttaacggcacaaagcccatcaccgcatttagcaatgaggtctttccacagccggactgccctacaatacaggcggttttccccctctccagattcagatttaatccggaaaaaagtacttctgtcccaaaagcgatacaagcattgttgatatgtagcatggcgttttcaattctttctttccggcaaaggtagtattttcttgaaaaacgttatctttgcctcactaattaattcgagaaaagttatgatactgaacgaaagagatgcccgtcatgagcatatattacaggtagcacgccaaatgatgaccgccgcacgcactgctccgaaaggaaaagggattgatatcattgaagtggccttgattaccgatgaagatattaaactgttgtcggacaaaatgatagctatggtagaagaacacggaatgaagtttttccttcgggatgccgacaacatcttgagtgccgaatgtgttgtattgataggaacacgcgaacaggcacaaggtttgaattgcggacattgcggatttgcgacatgtgccggacgcacggaagacgtcccctgtgcattgaacagtattgacgttggcatcgccatcggctccgcttgtgccacagcagccgatatgcgtgtagatacccgtgtcatgttctctgccggattggcagcacaacgcctcaattggctgaaaaactgcaaaatggttatggctattccggtgagcgcctcttcaaagaatccattctttgaccggaagccgaaacaggaaaccaaagcataaggtatgtgtcaaaagactggtacctgctcattttataaactgattttataactaaatataatataatctgatgggaatcatggttggacttcccagccccagtggctcggaaaaagatttgcaattgaactttggaaagaatatgactgtacaggtagaaatgagagctcctcacctgcctgccgaatgggatctgcaaagcggcatacagttgacatggccgcatgccggtacagattgggcatatatgctgaaagaagtacaagaatgttttgtcaacatagccaaagaaatagccaaacgtgagttattattaatcgtgactcccgagcccgaagaagtaaagaaacagatagtggctaccgtaaacatggacaatgtccgctttctgaaatgtgagacaaacgacacatgggcacgcgaccacggagctatcaccatgatagataccggcaacccttccctgctcgacttcacattcaacggctggggattgaagttcgcctccgaactggataatctgattaccggacaggctgtaaaagccggagcgctgaaaggccagtatatagactgtcttgacttcgttctcgaaggaggttccatcgaaagcgacggtatgggaacactgcttactaccaccgaatgcctgctctccccccaccggaacgggaaactgaatcaagtagagatagaagaatatctcaaatcaactttccacctgcagaaagtcctctggctggatcacggttatctggccggcgatgataccgacagtcatatcgacaccttggcacgcttctgttccaccgacaccattgcctacgtgaaatgcgacaataccgaagacgaacattatgaagcactgcatgccatggaggaacaattaaaaacattccgcacattggcaggagagccctatcgcctgctggctttgccaatggcagacaagatagaagaagacggtgaacgactgcctgctacctatgccaactttctgattatgaatgatgcaattctttaccccacctatcaacagccggataatgaccagaaagcgggagaagtattacaacaagcattccctaaacatcaggtcatcggtattgattgccgggcattgatcaagcaacacggttctctgcattgcgtcaccatgcagtatccgtcaggtgttatccaataacggacatttcagtagtatattaaataattattcatcatgagaaagataaaagtaggattaatccaacaatccaataccgcagatattcgggtcaacctgatgaacctcgctaaaagcattgaagcctgtgctgctcacggagcacaactgatcgtgctgcaggagttgcacaattcactttatttctgccagacagaaaatacgaatctgtttgaccttgctgagcctatcccaggaccatctacaggtttctactccgaactggcagcggctaataaggtagtgcttgttgcttcactctttgaaaaacgcgcaccgggcctatatcataacacagctgtcgttttcgactgcgacggaagtattgccggaaaatatcggaaaatgcacattcccgatgatcctgcctattacgaaaagttttatttcacccccggagatatcggtttcgaaccgattcagacatccttaggcaaactgggagtactggtatgctgggatcaatggtacccggaagctgcccgtctgatggcactaaaaggggctgaacttctaatttatcctaccgccatcggctgggaaagtagcgatacggacgatgaaaaagcccgtcagctcaatgcgtggataatctcccaacgtgctcatgcagtggcaaacggtcttccggttatctctgtcaaccgtgtagggcacgagcccgacccttccggtcaaacgaacggcatacagttttggggaaatagtttcgtagccggaccgcaaggagagtttttggcacaggcaagcaacgatcatcctgaaaacatggtagttgaaatagacatggaacgttcggagaacgtccgccgctggtggccctttctccgtgaccgtcgaattgatgaatatgacggactcaccaaacgttttttggattagcgagcagaatcacaattaatcaccgatagaaataatacaagaggtccacaagagaaaagcctgaatagcaactcttgtggacccccgtattatatccttttttattggaaagtaatcttcttattagcaataaagttggcagctccgtaaataaacaatccaaggaactgggccagatattcattaacatccagaccttctaccaacaaaataaggaataaaaactgcgcagtgtaagcaaccccgaaagcagaacagaagaatagtatctgtttccagacattgttctttcttttttctacggggaatatccaatacttacaccagataaagttatgaatctgggctataatatacgcagttacattagccaccatatagtcaccttcgaataacatttctctcatcatcagccacacaacaagggccatgatcaaagcattcatcgttccgattactataaagcgaaatatgcgcactgattctttcatttcacaacaagttcgtcgttattcattcgtatcatgtactgctgaatgattgctttcagttcatcttccatcgactgttgcacatcaatctgacccagaagattatgttccagcaacttatccgttttaaacgcatacatggctacggcgttccggccatcaaactgcaataaatagtcacctttaaagaattgatatattccattgatataatttacggcatacgtatcctcagcaggcgtattcaataagtcacacccaaaggaaacaaatggtttgtcataccctaaataccccaatacagtaggcataatatcaatttgttgtgctatcacatctttacggaaacctttcaaattacttcctggctgataaaacactacaggaacagagaacaacccgctttccgtctcatactccggacgttccggcgagttggtatgatctgctgtaaatacgaacagcgtatttttataccacggttctttcgaaaccttttcaaagaacaacttcaaagcatgatccgtgtatccgatgcactgacgaatagctttattccctttcggaaaaacgccttcgtattctgctggaactgcaaacggatggtgggaagaaaggctgaacaacgcagctgcaaaaggctgctgaaaaccggataaagtattgccaaagaactggaagaatttctcatcccaaattccccaatgcccatcaaaatccttgttacccggattagcctcattatattccgtacgaccaaagtaattggtgtaccctgccgtacgtgcaaaagcttcaaatcccatagagccattgtccgccccgtggaagaaagcggtgtaatatccttttttgcccaactccccgcctatactggataccgtgttcaaagaagatggtgtcagaaagaacggttctataaacatcgggatacccgacaatacggaaggcattccgtcgatactcttcataccattagagaatgaatatttaaaagtcagaccttcagtcatcaacgaatcaaggaaaggcatatatcccttataggttccattgtccagttcttcattcagaaagccgctattctctttgctaaagctctccagaataaaaacaaccacattcaacggcctgaattgcacactatccgcaggcatatgcaccggcgtgtacaaagcttccatctcctctttatcgaaatactgaggtatggcaaatgaggtctttccaaacgtgcggaagatagaaaaaggggtattcagtacgatccccgtctccatcggccggtctacatacttattggcgttgctgattgtgattggacgcaccatgccggtaaatccgccacgcattccgccgatacacaagtacactccaagccccaaagtaagcaaatgaaccgtataataaactggcatacgctctacctttaccggcttcggcttacgatacaacttaaataaagcataaccaaaagcaatggcaaacaacgtcagataccagtgattcaataattctgtccctataatacctcccagattcccttcattcttaaattcgctgaatacggacgcagtcgttcttcgatgggtatattggaaataaaccgtatccatcaggttcataataatgacaatcaggttggttgtcacaaaaatcccctttgtaatcttctgatatattacattttccttataatgaagcggaatcagcattaggaaaatatacagaagattcgtataaagaatggcagaagtatcaaaaaggaatcctccctcgaacattctccagattcgtccggctgaaagatcggaaaaagccttcaaattttctatcagaaagatgacacgacagagaataaagcaccccatcactaataataaattaattatgagtgacagggtggtattataaagagaacgatatttgttcatcgtttacttattttctttgatatcaacgatcaggttgagttcgtcaagttgagtctgatcaatttcagacggtgcatccaacattacatcgcgccctgagttatttttggggaatgcgatacagtcacggatagaatccagaccggcgaaaagagacacccaacggtcaagaccgtatgccaaaccaccgtgaggaggtgcaccatacttgaaggcattcatcaggaagccaaactgagcctgtgccttctccggtgtgaaaccaaggatttcgaacattctggcttgcaactgggcatcgtgaatacggatagatcctccaccgacttccacgccgttgacaaccatatcataagcatcagcacgcacagcagccgggtcagtatccagcaatggaatatcttcttctttcggatgcgtgaacggatggtgcatagccatcagacggccttcttcctcactccattcgaacattgggaagtcaatcacccaaaggcaaacaaacttattcttatcacgcaatcccaattgggaacccatttccaaacggagttcacaaagttgcttacgtgttttcatcacgtcgtcgccggaaagaatcagaatcaaatcacccggtttagcgccaaatgcttccttcatctgttgcagcacttcctgtgtatagaatttgtctacacttgatttcaccgtaccgtctgcttctacacgagcatacaccatacctttcgcaccaatctgcggtttcttgacgaattcagtcaaggcatcgagttgtttacgggtataagttgcagccccttccgcacagataccgccaacgtatgcggcattatcgaatacagagaaaccatgacctttcatgatgtccatcagttcaacgaacttcatgccgaaacgcaaatccggtttgtcgctgccataatatttcatggcatcagcccaaggcatacgctggaacggttcggtcagttcaacaccccgaagagtcttgaacagatgtttggccattccttcgaaagtagaaatgatgtcttcctgttctacgaaactcatttcacagtcaatctgtgtaaattccggttgacggtcggcacgcaagtcttcgtcacggaaacattttgcaatctggaaataacggtcgaacccggaaaccatcagtaactgtttcagtgtctgcggagattgcggaagtgcatagaattgtcccggattcatgcgtgaaggtaccacgaagtcacgtgcaccttccggagtagaaccgatcagtacaggagtttctacctctataaagcccaggctatcaagatacttgcgtacttcgattgtcatcttatgacgtaattccaaattagagcgtacggcattacgacgcaaatccagataacggtatttcatacggatatcatcaccaccgtccgtattatcctcaattgtaaacggaggagtcatggcggtgttcagaacgttcagttcggaaacgataatttcaatatctccggtagggatgtttgcattcttgctgaaacgctcattcactgttcctgtgatctgaatcacgaattcacgacccagtttattggcacggtcgcaaagttcagcattaatttcttcattaaaaaccaactgggtaataccgtaacggtcgcgaaggtcaatgaaagtcatacctcccattttacggctgcgctgtacccatccagacagcgtgatttgtttattaacatcggagattctcagttctccacatgtgtgcgttctgaacatattttctaatatttatgatatttttcgttaagtagcttgcaaaagtacacaataaatcagaaatcggcatttatttcagactttctttgtcagctttttcaatattttcttgtttttgtctgttatattgtccacaatcgcctcattaatcagttttattccgttcacatattcctgtgctctttgaagaacgttggctgcatctttttcttctgtcttcggcacaactacgcgtaatccgcttttaataagttcgatatttacatccgcctccgtctccatcgggtcaccatcaaaatgcacgactcccggcacagcccgtcgaatacacaacttcttacaacggaatgtcttgatccggctgttctgatcaatagttttattaaataactggaaagcaagagagggtacatccaaaacggtaaaaggctcgaggatggtcacatccagcaaaccatccgtcaatgtggcttgtggagctatatatgcattgtttccatattgtgacgcatttccgcaggcaataaggaaagctttatacttgctgactccgttttccgtttccagttcatatgtttcgggctgatatttaagactttcctgcaacgtcttttcgagataagtcaatagtccgcgctttccggcatgagcaaatttcaaactgacaaatgcatcaaaccctactccacaggtacagaaaaagtccgtaccattaatcttaccataatctatggtatccaagcatccctcattgagcacttccagtgccttcttaggttccataggtatgtgcagatgccgcgccagtccattccccgatccgcagggaataattcccaatgcggtatcagtatgtaccagcgaacgagctatttcattaattgttccgtcccccccgatagccacaacgacgtcagctttctcttccgcagctttggcagctatctctactgcatgaccggctctttccgtatacactacttcccaagtgtatctcgccttatcaattttttcatccagcaagttaagaatcaattctttactttgtgttcccgaaataggattgacgacgaatattattcttttcattctttcgttcatgctaatctttgtcaattgtagacgacaaaagtaatacaaatatattaaattttgatctattagaggtttctaatctcatgggagcaacttttttcttttaaaaagaacagataaaagcaaattttgttatctttgccccctgttttaaacacttgttaagataaaaggaaattggatcatcagcgaatgatctgagtatgagtataataaattataattcatgggattattacaagagaagttagctaagtacgacctgccacagaaatttatggcacagggcgtttacccatatttccgtgagattgagggaaagcagggtacagaagtagaaatgggcggacaacatgtgttaatgttcgggtccaatgcatacactggccttacgggagatgaaagagtgattgaagcaggtatcaaagccatgcgcaaatacggttccggttgtgccggttcacgttttctgaatggtacgctcgatcttcatgttcaacttgaaaaagaactggcagcctttgttggcaaggatgaagcactttgcttctctaccggttttacggttaattccggagttatctcatgcctgaccgaccgaaatgattatataatatgtgatgaccgtgaccatgcctctatcgtagatggccgtcgtctctccttctcacagcaattaaaatataagcacaacgatatggcggatctggaaaagcaacttcagaagtgcaatccggattcagtgaaactgatcatagtagacggtgtattctctatggaaggtgacttggcaaacctacccgaaatcgttcgcctgaaacataaatacaatgctactatcatggtagacgaagctcacggtttgggtgtattcggaaaacagggacgtggtgtatgcgaccatttcggtctgacacacgaagtagacctgatcatgggtactttcagtaagtcactggcctctatcggcggttttatcgctgctgattcttccatcatcaactggctgcgacacaatgcacgtacttatattttcagtgcatccaacactccggctgcaacagcagctgctctggaagcgcttcatatcatccagaatgaaccggaaagactgaacgctctgtgggaagcaaccaactatgctctgagacgtttccgtgaagcaggcttcgagatcggtgccactgagtctcctatcattcctctttatgtacgcgatacggagaagactttcatggttactaagttagctttcgacgaaggtgtattcatcaatccggttattccgccggcatgtgctccgcaagacacattggtacgcgtggcattgatggctactcacaccaaagaacaaatagacagtgctgtagaaaagttagtgaaagctttcaaaactttagaccttttgtaagcagcatctctgaaaagctataaaaaaagctactttccgaaagacaaatcatcaggaaagtagcttttttaattctacagcaaacaaattacttctgctttgcgtaacgaatttccattccttggttatccagaaccaaagaatcagccgtcagtctcttgatatccatcgtatccacaaattcaatcgtctggccattaccgatactttttcctgtcagaatcagtttagttccttcctgtttccagctttcataaaccaaagtagccatattgacagaagaagcaacgcctccttcttccatcttaataccttgtacttgtccttccagtcccggcacaggttctacccacgagccaacaattgaggcagagttacctccacatgcagccaataaacccatcaacagagttgctgccaacattttctttttcattctgtagttctgattagattattaattagtcattagtccggtccgccttcttccctactacaatcactttctttgcagttggtatcgtattcgatcccggctcttcctcttcttctatgtaattcacctgtacggtgtctcccagttcgaagccaccgacttcactcggttcctgatccatcgtactgacgaacactgtatctcctttcgaagtaaccaacataaaattattcatcgaagcatcttctactaccccgaagattgttttctcatcttctgtaggagcaacagccagactatcatccatagtatcctgctcttgtcccgcagtctgtccgctctttgattgacaagcacttatcacaccaaccaaaacagcaaacaataaaaaaactctcattttgttcatatgctttttatttgagataaaacttagaatattgcaaaggtaatttttaaaattgtttttcccatgaacctgcttaaaattaattgaaataaggcattaaaagtttttctataccggcacacgctcattacaaaataatgatacatatataattatacaaaacgtaaaataaggataagacagacaaaacaggaatatgttaaatactattttagctcattccgatcaaacatacaatatattaataatcagataaataatagataaattaaggatatattcagataagttcatggagaacttggtagcagattttagaaaaataagctttcatcttttgaaaatttaaggtttacaaatattgaatgattttctttgctttgttggcgacaaaaatagttatatttttcagaagtacgctataaattgatgttttttttaaaaagttatttcttcgtttaccctatcttttccttttataattctgataaagtaatatttcagaaggtatttgaaattaatatgtactcataatactcattccaccaagttctccatgaacttataccgccttagagtttactaaattctatatttcacaacctaatttttaatcaaaaatcaacacacaatcaatgcctatggaaatattacagtattatgatttaccatctctatcgtttacaaacaaaaccagtaaactagttattattttaaaatcaaaattatgaaaaacattttatttacttcaaacaaagtgcacacaaccgcgcgaatcggtgttctgttcttttctttatgtttttctccactcataaatgccggcaatgcagaaaagccgatgaatggcatagagagttcagaaacaacgcaacaaaataagattaaaataacaggtgtagtaacagacagcaaaggagaatctatcatcggagctaatgttgtagtaaaaggacaatcaaacgtcggagcaataaccgatgtggaaggacgttatcagattatggttccttccgacaatgcaattttgcaagtatcatatcttggatacgtaaccgaagaaataaaagtaaaagggcgccgcaacatcaatgtgatgctgaacgaagactccaaagcgctggacgaagttgtagtagtcggctacggacagcagaaaaaggaaagcgtagtcgtttctatgagttccatcaaaccaaaggatatagttgtcccttcgcgaagcctgaataacagtcttgccggacaagtcgccggtttgattgcagtacaacgttcgggtgaacccggatatgataacgcagagttttggattcgaggtgtaagtacctttgcgggtggtacatctccgctggtacttgtggacggtgtacccagaagcatgagtgatattgaacccgacgaaatcgaaacgttttcggttttgaaggatgccgctgcaacagccatttatggtgccgagggagccaatggtgtagtacttgtcactaccaaacgcggacgtgtagagaaggcaaagatttcattcaagacagaacacaccatttcttcccccacccgtcttcccgagttcgttggttcggccgactatctggacctgttcaacgaagcactccataatgatggggaattaccgcagttttcggatgacttaattgcacattaccggaacaatgacgatccggacctatatccaaataccaactggatcgacaaaatgttacgtaaaaacacattcacacacagatataccttgaatgtacgtggaggtacagaaaaagcaaaatactttgtttcggcagcatattacaacgaaagtggtattttcaaaggaagtcctaccaaacaatataatacaaacatcggcatcgaccgtatcaatcttcgttcaaatattgatatgaacgtatcaagcactacaactgtaggagttgacctcgcacttcagtatctggttaataattatccgggaacaggaactgccaatatattccgttccatgctgattactcctccttatacatttccggctgtgtacagtgatggtactgtttcaacctactcacaggaacgtgacgctaacatgcgcaacccgtacaacttattgatgaactccggatacgccaaagaataccgtactgccattcaatccaaagtttatgtagaccagaaactggattttatcaccaaaggtttgtctgtacgcctgaacgcaagttatgactatgatagtgaaatgatcgttcgccgtgaatataatccgacaagatatcatgctacgggacgcgatgaaaacggcaatctattatttgccacagtcgtatccggaaaccctgaattgcaggaccctaagaatagtgcgacaagcgcaaccaagaagatttacatagatgctgccatcaactataaacgtacgttcgaccagcacgaagtgggtgccatgctattgtacatgcaaaaggaaacccaatatcacaatgtagcacttccctatcgtaagcaaggtctggtaggacgtttaacttacggttacggcggacgctatttcattgaaggcaacttcggatacaccggttcagaagcatttgcttcgggcaaccgtttcggtttcttcccggcagtaggtctcgcctactacatttccaatgagtctttctacccggaagtgatcaaaaagtatgtccccaaactcaaattaagagcctctgtcggacgtgccggtaacgacaatacaggaggaacccgtttcttgtaccgtccgacctacaaaatggatgctggaggttttacgcaaggttacaatgataccggaggcggtctgaacggtatcggcaacggtatcatagaaggacgttttgcagctccttacttgggatgggaagtagaagacaaacaaaactacggtttcgatatcggcttgtttgacaaccgtcttgaagttatctttgattacttcgattctaccagaagccagattctgctgcaacgtcagactgttccccagcttggcggtctgagagacgatccgtggcaaaacttcggtaaggttcgcaacagaggtgttgacatgtctgtgaacgctcatcaaaatataggcaaggtaaaacttagcgcaagaggtacattcacattcacccgcaataaaattctggaatatgatgaacttcctccaaagtatgattaccaggctattacgggcaaacgtgtcagtgataaagataacctctattacatcgcagaacgactttataccgaagacgactttaccgtaagcactaacgctaacggtctgaagacttataaactccgttcggaaattccacaaccaaccttaggcggactccttggtcccggtgacatcaaatataccgacgtcaatggagacggaatcatcgactcttatgaccgtgtaagaggaatcggtcatccggaaactccggaaattatctacggattcggtttaaatgccgaatataaaggaatctacgccagcatcttctttcagggagcaggaaacacttctgtattattgggtggaaagacttccgaaggatggtatccgttctcatggggtgtcgaccagtccaactatcgtacctttgcattaaaccgctggacagagaacaatccgagccaggatgtaattattccccgtctgcacaagagcaatgcgaacaatgctaataaccgcgttgccagtacatggtggctgcgcgatggctctttcctccgattgaagaatatagaaatcggctatcagatacctaagaaatttttaagcaagatcggcttcgaagctgcccgtatctatctgatgggatataacctggcagtatgggatcatatcaaatatttcgatccggaagccggaaatgcgaatgccggacttaactatccgctgccgcgaacctatacaatcggtcttgatttcacattctaaaaaccataaaagataaaaatatgaaaagtaaaagtcacatatatatgttgctgatgggattattcttctccgtcagttcatgtgattatctggctgtttcggaccagatgtcaggaggcttgcaaaatacagatcaaatatttgaaaacgtagcctataccaaacgatggtatgccaatgtctttgcaggaatccccgattattcgggaataaacagcctgaatgtaggagcctttaaaaatccgtgggctgcaatctgcgatgaactagtagtaggttatggaaatgctgccaaggccaacaactcggacaagaatgcggcgaccgctggttttcaccgctatggcgactgctataaatacatccggcaggctaacattttcctagagaaagctcatgtgattacaaccagcggtacgcaaggcgacagactggaagaagacgaactgaatgagatgcgtgccaacgtacgcttcatgcgtgcattttacaattatctgctattggaacaatacggtcctattatcctcgtaaaagataaggtatacgaggcgacagagactcaggatgttcccagaaatacggtagatgaagttatcacgtatattgatcaggaactacgtgaagtagctaatgaactgccacaggaaccgatgcacgaaaatgaatcttaccgcgcatggccaaccaaaggtgtcgctttggccgtacgtgccaaattgtggctatatgcagccagcccccttctcaacgggggatacagagaagcgctgtctctgaccaacccagacggtacaagactcttcccggatcgtgatgacaacaaatggaatactgcattaaacgcctgcaaagatttcatcgattacgcagaaaccggaaaccgctacgagttatacaaagaatatacaacaagcagcaccggtgaacagattctagacgtagatgcctccgtttacaacctctttcagaaatacaataaagaaatcatctggggcaccgccaacaacgactggggaggacttgacggtgacgcattcgaccgaagaatcgttcctcgctgcgaaaagaacggtttgggttcgaccggagtaacgcaagaactcgtagacgccttctatatgaacgacggacttcctatcaaggaaaccgactatctgccgaaatcaacactttataaagaagatagttacggaacttacaaggacaagaatgacggaaaatactctaagaactacaccaacgtaacagtcagtaaccgctatctgaatcgtgaagcacgtttctacaacactgtcttcttcaacggacgccaatggcctgtcacctgcaaacaagtccagttctacaatggaggtaatgcaggcgttcaggaaggacaagccactacaaccggatatatgcttttcaagcgcttcaaccgatcaatcagcaaaaccagtccgggtgtagctagtcagaaccgtccttccataatcttccgtctggcggatttctatctgatatatgcagaagttgccaacgaagtaaatccgagcgactcacgcgtactgacttatctgaacctcgtacgcgaacgggcaggcttgccgaaagtagaaatactgaatcccggtatcgtaggtaataaagaattgcaaagagcagccattcagcgcgaacgtcagattgaactggcaacggaaggtcaacgttatttcgatgtacgccgctggatgattgccgacaaagacggtgaaggacgccagaacggatatgcacacggtatgaatgttcggggaactatcaatgataccgaagagttcaaccgcgtagtggaaactgaaaaaattgtattcaacagaaagatgtacttacagccaataccggatcacgaaatgagaaagacacaaaacctcgtccagaatccgggatggtaattgtataagcacaataaatcaatgagcattatgagaaaaataagttatatactaatatcaggttgcatcactctctctattatcggttgtgatgaaacctttgatacgagcaatacatccgaagggattttgtcattgtctgaaaacggactgactattctgcaatcgtataatgtaggagaaaaatacaatgctgacttatggatacaacacggaggactggaactgaataacagtaccgtcaccttcaccgtagacaaaagcctgctcgactcactcaatactgccaacggaaccagttaccagatacttccggaagattgttatcaaatgactaacacaacggttaacgtatctgccggtgacagactggcaaaaggcactatcgtatacgacccgacaaagattcatgcgttgtgcggctatgacaatgttcaatacattctcccactcaaagcaagcactacaggagagaagttgaaccccggccgttccaccctcctactgggatttaaagtttccgaacccattgtaactatcataaacgatggtatacaggaaatcaatgtcgacaatgtaaaagagttgccgattaccattggagtaccttttagcaataaatggaacatcaactgtactttagtcaacaaccagtcggtagtagatacatacaacagtgccaatcagacttatttcagtcttctgccggcagagtgctataccaaacccgaatccccgtcattgtctcagggagttgatcagaccacagtcagttacaagctgaaagataacattcttccgggaaattatatgcttcctgtgcaaataggcgaagttacttccgatgccactatccgtgcggataaagacacctacacaggattctgcatcataaaagaaggaacgaaaatatcaaagagcggctgggaagttctgtcctttacgacacaggaagcttcgggagaaggagccggcaatggattagccaaatgtctgatagacggagacactgaaacattctggcatgccaaatggcaaggtggaagcgacccgctaccgtatgatattgtgatagatatgaagcaaaacatacaaatagcacaggtggaattgcttccgcgcggcagaggttcaaacaatcctatcaaagtggtcgagtttgcagctagtgaagataacgtgaactggactcctatcggcagattcggattcacgaatcaggatgccgccctggaatattatgtaaaatcgatcaaagcacgttacatcagactcacgatccccgatgacggaggaaacagtactgtcgctgctatcagagaactagatgtcaagggcactattattaactgacacatgagcattcgataggtattttatagcaagtgcactctatagtgcatcttgaagttaagctactctcttccccccaaagagagtagctttttattttgtccgatgccacctttcctgtttttccaacggttgattagcttcaaagtcgacggcaaaggaagaacgttttatcttcttagaaactggatactgaagaactacatattcatagtgatcattccgttttaatagtctcagccggattacttaatgccgtatgatatccgttaaggacaactgtgacaaaagttacaagcattaataaaacgacaggtactataaatacttctattccccaattcgcaggatacataaactgttccctccaccgtttcatcaagacatatacgatagggacagcgatcacgtcggctatcagaatataatagaagaacggacggttcaacaacaatagaatttggcgggaagaagcaccgtgtactttacgaatcgcaatttctctttttcgttgttctaccgcataccatgtaattccaaagataccaaaaagggtcaggaacaaactgattatagcataagccagtaataatcgggagaaattcaccatatctgtattgttggatatatattgctgataggcgtctatgtaaacaaaagaatgtcccggctcgtgtttctcccacagcaaccggagattttttactatctcattgcgtctgctctcatctatacgacaagacaggtaggttgcctgatcaaccggaatctcttgaagaatgatctgcatcggagtaatggcagagttgaaagaagtcagtctgaaatctttgcatacaccaataatagttccttcaccggcgttgtcctgcgcatatttgcttaaggcctgccccaccgggtcttctcctgccggcacaaaaaactgcacaaaggcttcattaacaactaccggatgggctaccttggaaaataaatccttcgttcgttccggttcgagaagttctatgttgaataagtccagcagttcatagttctcggtcaataaaactttatttaccattacttcctgcccgttcctgtttagtggaatgatgatattaaaaggactcgttatccgccctttggataacagggcagtttggataccgggcaggtttttaatgtcattatacaaagggacggtcagggcagtcccctcattacctaagattaaaattcctttaaagcgttcaccctgctcttctatggttgaaagttgcgtacgtatcatcataaaggcagtcatcaatccgatggagataaccatttgcacgcctacaagggtcgctaccagtcttcttctttttctcccttgaaaaaattgccgatatccgctgatagaaatgcggttcagtttcttcgtcatataggtggccggtataatggccaaaagagaaacaaacagaagaatatatggaaagactttccatgaaagaatgaaaccgaaagtcagacgggcatcaaagaaataattgaaaagagaaagtatgtcccccattacaagaatggaaaggatgaaagcaataaatacggtaaggaatgtatcaataaaaagttgccggcaaatatatgaatgggaagctcccatcaatgtctctacatgaatcatgtttacttgtttcagcaggcgcgaaaagcttaggtttacgtaattgaagcaagcgatgaataagacaagaaaagctgataataaaccgatactcaacaaagcgatctgccgatgactgaatgttttcacggaatcagccagttttgtgtcaaagtaggattcttgtaatgtctggagtttataataaccgggacctgtcactgtaggcagttctgttgactcaaaacgctcgcaaaaggctgacacgtcagtcttttctttgagaagaatcatacaggaagttccttcttcctgcaggttctgagaattaccaagcaaatcaatacggagtgctgactgcgcataaaacttatatatggcagatacctttttcatttcaactttatctccatataccacagaaagttctcgcccgatacaatcgaacttcccgaagtattgcatggccttttcttcactcaaagcaatacagtccggcttggtcaaggcttctttcatattgccggacaatatctggtacgggaaaaaacggcagaaagaactgtcggcctcaacaatgacctgttgaggaaagcgctggttctcaatttcaatatgagttgcctctttctcggtcagccggagataagattcaatctccggaaacgaagctatcattccggcaaccgatcctccgtagacaaatgatacttgtccggtgctctgcatggatggcagtcgctgagtcaggcgcaggatacggtccttctttggattttccccttctatcgtatattcatggatgacaaacgagatcaaaagattggtacaggaaataccgaccacaagactgaccaaagagatgaccgcaaaaagtttattgcgccaccagtttctgaatataagttttaatagtacgaggttttccatagcagttcgttccattcgttgtaatcttagtcatttttaatcttattcgttcttcatgatcaatgccggattgatgcggacagctttgcgtacctgccagagtaatgtacccagtgagataagcaaggtaaggatgaagcctgtcacaaaaatccctgctcctatcggagctttcaccgcaaagtctttggtatagtcattaataatataatagaccaaagaaatagcgacagcaaaggcggctcccaaaatataaagatacttcctgaccaataacaaagcgatctgtttgccggtagctccgttcactttacgcaatgcaatctccctgtagcgctggcgaatgtcatacaatgacagcccgaacaatccgaggcaggaaacgcagatagccagtccggcaaaggtgacgtagatgcgggttgttctcttgtcatcatcgtacagtttttcaacttcatcttcgacgaaggagtaattgaactccccctcacccattacttcgttgtgtagttccttcaagaattgaatggcttccttgcgtttaccttcggctattttagccattaaaggttcggtagggttttctccttcatcatacagaatagccagtggtgcatcccccatagataagtgtccggtccggaagtcttctatcacacctactacctgataagcaggatttttactttcatctgtccccacactccaccatagacgggactcagtttgcagtgaagcttcattaatatcttttatccggaagagcttcctggctgtttcatttatcatcattttatattgggcaaactggtctttatcattccacgttcttccttctttcagcttcagaccaaacatatccatataattattattaacatacatgatagccattttatgtttctctccgttactctccacattgacgtatggttccagattgataggtgcctccccatatccccatgaaatgaataaagggcatgcgtccatcttctgtttaataacctgtaccttatgccgctccaagtcacgttctttctgccattcttcatcatttgcatatcttctgttttgtgtctcgaatgacaggaactggcatgaaatgatattctttgcctgatatcctaaatccgcattcagcattgtgtacaactggcgaacaaaaaacaatgcgactactatcagactgaacgtaatgacatattgaataaataagaatactacacgagaaacaattgaatttcctccggcatttacagaacgtaaagaggtgatcggagaagaatagttgtaacgtaagaaaggaaagacagacgtcaccaacggcaacacgaataataaaatgagagacagcgacagatcaaaaacgatatccgattttacaggaattgcatataccgaggcgaatatcccggctgaagtttcgatcagcatccagataataagcaaggcggctgccaccatatatatattctctacataaatctgggtaaatatctgaaagccgctcgcaccatatactttttttacaccaaactcacgtgcccgctttagaacgataaccgtgtagatattgataaaattaaagactcccaccaacaacaacatacaagccactacagtcaaaatcatcacatggttgatattccctcgcaaaaaagaagttcccgaaggttcgacaatcttattgaaatacaatcctttcaagggagtaagcccatactgtataggggaatgactgtaacatattaatgactgtgacttggaaatcttttcattatactttttcagatctgttccgtttgccagccggaccatgcagaatcccacccgactccagtctgcatatttcccctgattcaccggagctatcaggtcgaattgcaaagatgccttggtactcggttcatccacaatgccacgaatggtaagtacagaacctgacgatgaagttaattgtttccctatcgggtcttcgtcaccaaaaatatgccgggcatatttccgggtaataattgcatcatccggtttctgaatagttttaattcccgaagctatcggatagtccatcaactgcaaaagcaagctatcagttaccaaaacattggcccggtaacggtgattatcgactacaatataatcatcgtcaaaagaaacactataagaatatgcttctacttccggattctttaaagggtctataaaattaggatcattattcctgtctgtattatctgcgatcgaaatactgccattactcctttgaatagtcagcaagtacaatcggtccaggtccttacagaaatggtcaactgttatctcctgatggatatagcgtacaattatcaacgttgcagccacactgactgcaagcccgataatattgatcatcgtgtatgttctgaaacgggataaagtcctgatagcagataattggttcttcatattgcttttataataaggatgttattcacttttgattacttccgccggattttgtcgggcagctttccatactctgcctataatactgaagaatataataagccctacaatgataaaaatagctccatacatccaggcacttatctctgtccgttctacatagctttccaaccaatgtttcatagctatataacctattgggaaagctatgagggacgctgcgatcaataatatcaggtattctttcaggaacagaatcagaatatcccgaattatagctccattcactttacgaatagcaatttctttggatcgctgttcgcaagtcagtgtcaccaaagagtaaatacccaaaatagagataatcacgcagactatacttacaaagcctaataatttaagaagaatgtattctgattttaaatattcattataatgttcctctatattgggcaatacatattcaactcccggatattctttggcaaatagatcctcggttttctgctttagctcttgccattgcccttcatgatatttgactataatctgctttctgtcagagagttcgttattctgacctataaaagctaccggttttacaggaattgtaggtgggctggtatgaaagtctttaatgactccgacaatggtatacgcatgcctgtcttttccctggtatattttttttcctattggatcatgcatatccaaagatttaacggcagtctcattgattacaatcttatcaacatcatcttttttcagcatttctcctttcagtagctttaaatgatagaatcgcattatttcttcattttctgccagacattccaaatttgtctgatctgtgctactttgctttccatcccagtctgttatccgccatgaaattcttactccctgaagcaataagccataatttcctttcagtacctccctggtacatggcatctgttctactttatccgctatggcactaaaagaatcattcggatacagatattgaaaaactgctatattctttctctcccaacctaaatcaacattattcaggaaaaaaagctgtctcataatgacgcttactgagaatataaaaagaatactaattatcagttgaagcacgacactgattttacggtacaaagcttttccgactgtcttttgggaatgataattcttctttagaataaacggtagaaataaaattaaggaagtaatggcaactcctcccagatagaagaaagattctacgtaaatatttccactgatatttgacacttccttgaatactgatagaaaaagttcaataaaagtcattcccagtaatcctgacaataacaatatcaacaagtattcaacggaaagtaatataaatagtcccatatgagaagagccacacacttttctcagttccaactctctgacacgcatacgcatacgggcaaagaataaagaaaaatagttgaaaagagagcacaatataactaatccgcctactactgcaaaaagaatcaggtaataaaactcgactgtcctttctgtatttagagctgaataataataacctgtgattggcatcaatcgatatttcccaataaatatattttccttctctttttcctgagcatattcgttaagcttcttctgaaaaagttgaagatccactttcttatggaatctgagaattgtcatgaagcctgaattctgccagtcttcggtccaactactaaaataagcaccttctgtccaaaagccgaatgacagattgctatgatcttccaaaccatcaagaattgcacatacagtctgagagctacctcttaagttcactttctgtcctaaaatatccgttgaaccgaacagacgcatcgccatatcctttgttaaggctattttctcatccgagtgcataaaatccgtattccccgatacaacagaaatatcaaacatattcataaaacaagaatctgctcctatctcaataccttccaaaggtgtctgtccttccactgagatttctacattttgccatctagtcaaagcacacgctgcttctatttccggaaagtctcgtttcaaataagtagataaagggtatggagacgaagtatcgaaaccggaattctctaatactgattctttatataatatgtaagttctctccgatccttttagaaaggcatcataagtcatctcataatgtatccaaaacgtagaaagagcaaaacaggtaaatccgacaaataatcctataatacttattatagtttgcgttttgtattttatcaaattgcgaaaggctatttttaagtagtgtcgtatcatcgtatattatttattattttattcactcttaattacctctgccggattctgtcgggcagctctccaaactctccagataatacttataaaaataataagaagcattgctacaaatattcctgcatatatccagatgtctatcgaagtctgttttacatatccttcaagccagtgcttcataatggcatatcctaatggaaaagcgatgaatgacgcaacgataagcagaagcaaatactctttaaagaataagttcaaaataactttaacacttgcaccgtttactttccgaatggcaatctcctttcgacgctgttcgcatgataaagtcactaaggagaatataccaaatacggcaatcactatacagataagagaaacaacactcaataacttgcttaatgtgttttctgacttcatgtattcattgtaggtatcttccatatttatcaagtccaataccgcatccatattgtccttatgcgcctcttcctgcagtttttggtatactttattccatgtaccttctttaaatttaaaaagaaaaggtcctctgtttccgttgcccggattatccttcggcaaaaagaatacagccggaatcactggataaatcggggcattataatatatatctctgataacacctttcactgtgcaaacttcattcagatatatctttttacctatcggttgagaccatccgaaagcttttacggcagcttcattgattaccactactccttgtccgtctttttcatccaacatatcaccttctataacgtctatctgaaagaaatcaacataatcctgattgattgtttcattctctaatttgattcgttgttctttatcagtctgtccttcccattccctcaattcataagaagaaaatgacgatttaggaataggactggaaaaaccacataaacattctgttacatcaggcatctgctttagtatctctttgaaaggggtattttcaaatccataaatagaaagaatggctcccacattatgtttctccaatcccaattctttggaattttgcagaaaattgagttgcttcatcatgaccaaagtgcagaacacaaaaccgatacttataaaaagctggaataaaatgctacctttataaaaccagccggaaagatgaagatttgatttgtgattgatactatcgagcaatgtccgcttgttgacatagcgcacaagtatagctgcaaaacccattgttatcagtaacaataataatatatatacaaacacttcactataaaagtatgaagtactctcatcgatttgcgacaactccttaaaaacaggcagaattaactctatcatcatgattcccaaacctaatgacagcacaagcaacaagatcaattctgaaaggagtaatgaaagaagattgccattggaggctccattcacctttcgtagtgccaattcgcgcttgcgcattcggatacgggttacgagcattgttaaatagttacataatccgcaaataataaccaaagctccaatgcaagcaaaaagacgaacatgattcaatttgacattgatatcctccctcggatgagtactcctcaatgttgataacagagctataggagtagatataaccgggctatatgagtccagttgtattttatatttcgccagtctcttctctacagcttctacatcactattcggatagatacggaaaagagtatggcattgctgtcttccccaatccggatctcgatctttatatggtaacaaaatatcaaaaggatacatggaatgtccttcccatgattttactactgcgacaatcgtcatttcagcatttcctctgtcaggaaatagcaattgtttgcctatcggggattcttctccgaatattttttgggcggttttatccgtaatggcaatttgtttatcccccagtctcaaacgattatcgccatctatcgtaatgatattaaacattgaaataaagttagaatcaacttccaactggtatgtatgatatacattcttctcatgttcaatggaagttatacctccattatatatatggcaagcactctccacctccggacagtttttctttatataatcagccaacaaactggatgaataataagaaaatccgtctccctgcaaatcaaatttattacctgccaagtagatgcgctccgccccttcatgaaacgtatcgtatgtcatttcataacgtatccatagggcagacaatgcaaaacaggtgaaaccaattgccaagccgactatacttacaatactctgcgtcttgtacttgatcagattgcgaaaagctatttttaaataatgatatatcatgacattgtgtttatgttattcactcttgataatttctgccggattctgccgggcagctttccatactctccaaatgatgctaagcaaaagaataatagctatcacaacaaagatacttatatatacccagccatctatcgatgtttgtctcacgtagctgtcgatccatctcctcattacaacatatcctgtggggaatgcaataacggcagctatgatcaataacaataaatattcctggaagaacatctgcaggatatgatggatttgcgctccgttcaccttacgtatagcaatctctttctgacgctgttcacaagacagcgttaccaatgagaaaactccgaatacagaaataatgacgcaaaccaatgatacaaaactcaataatttcatcagtgcatcttcggagcggaggtacttgttatattcctcttcttcattaaacaatcgcatatacgcattcggaaattcctctctgtacagtttctctatggtcgcacgacattcattccacgtgccctctctaaatttaaacagaatgctggcacgattcaacagataatcttgcgctttaggatgctgaaaagcaatcagtcccggttcactcgtaggagaacgatagctaaagttcctgactactccgacaaccttatataggctacgctgaccattatattcatgatagaaacttttgcccaaagcccgtttccatccaaatttacggcatgtattttcatctatcactacttcattttcttgattcttgtccgatataaactcgccttccaataaattcaatttatagaattcaaagaattcttctttagcaggcatcataccaactgttaaaggttcttcaaccgctttcgacgaatcatcccagttgtttatttcgacatacatcatcggtcctgtaggaataatcgggaaatacgaagggggtaaagcctctgtcaccatgggcaaagtagctatcttcgccgaccattgcttaatatcaccattccataaggctacattaccgacattatgacgttccattcctaagtccgtatttttcagaaaatagagttgcttcatcataacagccgcacagaagataaaagcaagactgacaactaactgcatgataattcctatcttacgaaacaaataaggtctggtagctaccgcttttccttttatcgcttcctgcaatgtccgacggcgaaaataagataaaggcatctgtgcaaacaggaaagacagaatgattacaatcaaaagatatgcaatgatctctccataatatacactggcctctatctgtgtgaagttcaggaagccggacagactcacctctatcatcaacagtccgcataacagggcgatacatagaatcaacaacagttcaatggcaaactgcaccgataaagatgtattacttgcaccatttactttacgaagcgccatttcactactacgcatgcaaagccgactgatataaagcgtcaggtaattgaataaggaacaaataatgaccaatccgcctgctaaagagaaatagaaaatataactgaaggagataactacctctactttagaaacataatccgaataacgcaaagccgaaatgggcgtgatcagaagcttcacaagttcgctctctttgggaatatccaagatatcaatgtcttccatcttcttttgaaaagtatccctatccactcctgcgcgaacacggataaacagttgttctcccttactactccagcgtggatagcgccttgccgaactcaatacactatacggtatattggaatgacgagaccatccgctcacaatggcgcctatcttacggggacgtccgctcagttctacttctttccccaaagcatcctcttcactgccaaaaagctttcgggcaaactcttccgtaatggcgatttccggatcattttctttcaggaagttgactgttcctttcagcagccgtatattgaaaaagttcatgaaaacagaatctgctgtagccattactacctcctgttcattatctcccatacggaatttcatatcccgatatatggaagtggaagcagtagcttctatctccggcattttctcctgtaaatagtttgccaaagggtaaggagtaacattggatgtactaccaggggaatcagtataatgcgcacgtaccatatagatacggtcggctccgttatggaaagtatcgtaagtcatttcataacgaatccataagacagacagcgcaaaacaagtgaaaccaacagctaatccaatgatactgacaaggctctgtgtcttgtactttaccaaattgcgaaaggctactttcaaatagtgtttaatcatggtactttatgaatatattacatactgacttccgttactacctgtccgtcaaacaaattaatgatacggtcggcataaccggcatcgtgctgtgaatgtgttaccatcacaatagtggttccttccttatttagttcactcaatagccccatcacttctttaccgttctttgagtccagattaccggtaggctcatcggccaggatcaacttaggattggcaactactgcacgggcaatagcaacacgctgctgctgacctccggaaagttgttgcgggaagtgtttgctgcgatgtgtgatagccattcgttccatagcagtctccactctctttttacgttcggaagctgagatacccatgtaaagcaaaggcaattcaatattttcataaacattcaattcatctatcagattgaagctttgaaagacgaaaccgatcactcctttacgaaggctggtacgctgtgactctgtgtacttggaaacttctgttccattgaggtaatattcccctcctgtcggattgtccaataacccaagaatattgagcaatgttgactttccacaaccggaaggtcccataatggcaacgaactctccttgcttcacctcgatacttacattattcaacgcccaagtttccacttcttcggtcttgaaaatcttctgtaaattaattgtcttgatcataattgtaatatttaaaagttattgtgtttattcgtttttatgagaaataaatcggttccttaataaattaccaaccgtattatcttcataatattatatattccttatttcaatatcaactcctctgcatcgccaaaggtatcatatcctgtcgtaattacccaatctcccgtctgcaaaccttccgtaatttcgtactgctgcggattctgccgcccaatacttaatggtacacggattgcttttgtcttcgaagcattcactttgtaaatccattgtcctcctgtagactgatagaaattaccccgtggaataataagcgcccgttccggctgacctaattcaatctgtacacggaagcttttgccaactctgacattatcgggcatatcgccggtaaagacaagatcgacatcaaacatacggtcttttacttcagggacgactttcgttattttcagcggatatttctttccctgataattgacggtagcaggcagtccggtagtgatcctgtcaatgtaatattcgcttagcgaagtatgtatcttatactgatcgagtacctttatttcggcaatgctttcgccggaagaaacctgctgccccggagtaaccctgacaaagcttagttgcccttttataggagccgtcaccaccaggttattcaatcgctcatgagtacgttcatatttcttgtgctcccgttcacggtcattgcgaatcagttctttacgaatcatcgtaacagccgaatcatgtcgcaggctttcttgttgcaatgccgcgttttttagtttgtagttatattcatcttcggctacttgtagttgagccttactctttactcccatctgaaactcttcccgatcaagggcaatgctctttttcagtcgttccagttcataattattcgtcagagcctgctgcttcagattaagacttttctgttccatctcaatctcctgttcctgataggtaatcatttgcttttcccattcgtcacgctggtcttcaatgctgcgaagcaggtctggattggaaaggacgataatggtatccccctgatggagcagactcccttcctcaccaacgatgctttcaacgcttcccgcttcgcgggtattgattttgatagtcagtataggctgaatcagtccctccacatctacatattccataaaattatcctctttcacttccgctatctgaatattttcggcatcaatacgtaattttcgggggcctaatgacagaacaattacataaatcagaaaggcagcaaacaaaagtccgcctatcagatagtatctgtatcgaatgtaccaaggtttcttttctaattttatatccatgactttatcaggtattttatatttttatttattaaagctaagtaagttgctattctataagaagattgtaatcttctgtcaatagcatattccgttcaaaatcgtaaagtgtcatacttcgaagtgtgtaatataagctccaataattgtacaaagccgatacgtaattacggcgggcactatctttctcggcaatggaagcattcagatcaaggatagtggattttcccagtatataaagtttgcgggcaacttcatttcttcgttgagccgtttcatctgtacgggcagcgatatgtacccgttgtgtttgcagattaaattgtttcaccagtttgcggacattcaattcaaaatccgtccgattttgctccacttgcgtatataccagatcacgattggaacgggctacccgcacttgtcctttccctcttccccaatctaaaataggaagagcgatactcagacttacatattgctggtctaacagatttcgataagcatccggcagcttttcggcagtctgcgtcagtccgaaacggagataaatatccgctttcagtcccgcattagcacgggctcttgccacagcactctcactttccagttttcttcgtttcatcgcctgtatgtccggactgttttcgtatgccaatgccaatgcttcatccagattgacactgaaatccggtacttgcgagttgatacgcacacgaagttcccgatcttcctgaatgcccagataagaacgaagttcctgcatgcaattatccatttctatacgggcattcatacgatttgtttcttcggtcagacgattcaattctaactgcagcatttcattctctgtgatcgtgcctatattgtaacgcccctgagcgtaacgatagagcgtatcggcatttgcataattgaaagaagcaatatcgtaattactttgagcggtggccaaagcgaagaatttattaattgcattggcggaaacaagttccagtgtttccacataacttttcttggcttcctgatagcgtaccggttctatacgtttatcccacttcagactattataaccaaaaagcgactggcgatatcctatcatgacaggagaagtttgccatgagtatttatgttcgctgaacaagtccatgcgttgcgcagatgtttcgagaaaaagagaacctccggtccagggaatattctgcgacaggttcaaagtcagatcggtattcaacagattttgctcgacaaacttaacggaaccgtcccccattgtaatcttattgatggcacgattcagattaggatcggatgacaaactcaaagatggcaaatagttagcccgataatatttgtagttccagtaagcggaacgaaagctatgtcgtgcagttcgtgcatcgggtgattccagacgggctattttcaccacctgctccaacgacatctccattgtttgattttgagcagccagcagttcagtcgacaggattccgagtgttatatagagtattttcagattcattcttaggtttatttgttatttactattcaaaacctgtgccattcttatatttcattctaattcagttatttacatttactacgctgttacaagcagcgtgcaaatacgcacaaatttagtgcgcaatcgcacatacaacacatgattattatccatatctttgcccttgcattaaaactttaggataagtaacgaatcatataccccataccctatggatgaagtcaacaaactaggaaagatactcattgtagatgataacgaagatgtgctctttgccctcaatctactactcgaaccttatacagaaaagataaaggtagctaccactcccgaccggattgagcattttatgactacctttcagcccgatcttatcttattagatatgaacttcagccgtgatgcaattagcggtcaggaaggttttgaaagtctgaagcagattttgcagattgatccgcaagctattgtcatcttcatgactgcatatgcggatacagataaagctgtacgggccattaaagccggtgcaacagattttatccccaaaccttgggagaaggaaaaattgctggctactctcacctccggtatgcgtctgcgccaatctcaacgggaggtaaacatcttaaaagagcaagtagaagcactcagcggacaaagttctccagaaggggatattatcggagaatctccgatcatgcaggaagtatttgcaaccataaacaaacttagcagtacagatgccaacattctgattttgggagaaaacggaacgggaaaagacgtgattgcccgactgctataccgctactccccccgatacggcaaaccttttgttaccatcgacctgggaagtatccccgaacaacttttcgaaagtgaactgttcggctttgaaaagggagcattcaccgatgcaaaaaagtcaaaagccggacggatggaagttgccaccaatggtactttgttccttgatgaaatcggtaatctttcgcttcccatgcaatcgaagctgctcactgcgatcgaaaaacggcagatcagccgtttaggaagcacacagaccatgcctattgatgttcgtctgatttgcgcaacgaatgcggatatccgccacatggtggatgaaggaagtttccgtcaggacttactatatcgtattaatacaattgaaatacatatccccccgctccgcgaacgtgggaatgatatcattctgcttgctgaatattttctggaccgttatgcacgcaaatataaaaaagaaatgcgtggcttgacacgggaagccaaaaataagttgctgaaatatacgtggccaggtaatgtacgggagttgcaacatacaatggaacgtgtcgtaatactgggagacggttctttattaaaacccgaaaacttccagttccacgtcacccccaagcaaaaaaaggaagaagaaattgttttgaaccttgaacaactggaacggcaaaccattgaaaaagcaatgaaacttagtgaagggaatatctcacgtgctgctgactatttaggtattacccgctttgccttatatcgcaaacttgaaaaactaggcttatgaaacgatttgcattcagagtaattttacatattttactgatagtattgttttctatcggcagctacctgctatttcaaaagcagttatggttcagtactaccatctgccttatattactgataaccattggaatacatctttaccgtatgcagttcaaacaaattgctctgttgcgacgattgacagacggcctccgctataatgacatgatgcaaactttccatccacctttcaataacaaaataatgaatgaatgggcggaagaactttcggatactttaaaagattttcggggaagattgctggcagaagagatcaagcaccaatactacgagaacttattgaacaaagttgatacggcagtgcttgttgccgataaagccggacatatagaatggatgaatcaggcggccgttacccacttaggacaaatatcacaattgccggaaacattgctgaaagcttctgttgcccatgacacccccgtcatccgtatcgaacaaaatagcactgtgctggaaatggccatatcacgcactacatttgccactcaaggtagagaacagcagttaatcagtttaaaaaacattcattctgtattggaacgcaatgaaatggaagcctggcaaaagctgatacgcgtgctgactcatgaaatcatgaactctatcacaccaatcatttctctttcggaaacattaagcgagagaggaatccccagtcaactgggagaaaaagaatattctgttatgctgcaagccatgcagaccattcacagaagaagcaaaggattactggaatttgtagagaactatcgtcggctcacacgaatccctgctcctattcgtacacaaatttctattgcggaattattcacggatttaaagaaattatttccggaagaagagtttcagtttgaggttccctcacccgaactgaaattaaatgtggaccgaacacaaatagaacagattcttattaatctgctgaaaaatgcccgtgaagcatgcagtcgaaaatcagataagaagattcaggtaaaagcaagaaaactttctgccggaaatacgacattaacgatatctgataatggagaaggtattctgcccgatgtgctggataaaatatttgttcctttctttaccaccaaaacatccggttcgggtatcggattaagtttatgcaagcaaatcatgactttgcatgaaggaagtattaatgttaagtcggaagtgggtaaaggaagcagttttatccttacttttcctaaataagagcctttgatatttgcatcttgatgtgctattcttaagattacgtcgaaaaattattgtaccaaaagcaacaaaccagaaaataaactgcataaataaatgcaataatatacgaaaacgcagcctaatattgcataaaacggcataatatatacatcttttcgtatgtacaaaacacttattggcttaaaaggaacacctcgttggttttaaaccaacgctaccttgctcaccgaggaacctatttttcattaatgggaaagagataaaaaggcgattcggtgcttattttcatctgatttattagaattataagcaaggtaagaagtagcataatgattatccttaagccattcatccagcttaatgatcaacaacaagggaaagagcagttcaagtcgatcagtatatcagacaattaatgaaattatgtacttccctatttaaaaatgcaggcgtttattgattcttagcttatgacagatgtaattatagcccttcctgcctgtttaaatattctttttttcagaatgatcgttttttcactaaacgaatagactaatctgagtccggtatagcccgaatattcattaagcctgctgatcgtctacttaaaatagcagaggactcaatcatcctctgctacccaaactatttgtatcaggattcaactcctttacagcatcttttaccgctttctgggtcggtttacggtaagtttccgcttgttgtaccggaacaatctcattgaccattctttcatatcctttttgttctaacaaatgaacttccttttcattcgtttctttttgtttttccgttttcatatggcttttttatttttagttttctactttgaaaacagaaaacagcaaaagatggttcatcctatctgattttattttcagttaattcgtcccaataatcgcataaatgcatatatttgcccatctaatatgaacctcattgaagttatgaaagaaaataaatatgacgacgaccgcttcttcagccaatatgctcaaatgtcacgctctgtagagggattacaaggtgccggagaatggcatatattacagaaaatgctaccggactttacagacaagagagtactggacttaggctgcggatttggctggcactgtatctatgccatcgaacatggagcaaagtgtgttacaggaattgatatttccgggaagatgctggaagaagctcaaaaaagaaattcttcaccactcatcgaatataaatgtatggcaatcgaggatttcgactttcaaccggatacttatgatatcgtaatcagttccttgacctttcattatctggaatcttttattaatatatgccgtaaagtcaacagctgcctcacagcaggaggttcttttgttttttcagtagagcatccgatattcacagcctatggtaatcaggattggtattacgaccaagatggaaaacgtgctcactggcctgtagaccgctacttcagtgaaggcaaacgtactgctatttttttaggagaagaagtcgtgaagtatcataagactttaactacatatattaatagtcttcttcagaccggatttgaaatttgtgaattgatagagccccaaccgagtgaaatgatgctggatactattccggaaatgcaagacgaacttcggcgtccaatgatgcttcttatttctgccaagaaaaaaagttgacttgcaaacagatgaatttcagtcgattgtaatttaatcaataaaaaacattcatttagttattgataattaaaaaatactccctatctttgcaccgcttttgaaaagaacaaccctttaaaagtagcggggtgtagcgcagtccggttagcgcacctgctttgggagcagggggtcgtgggttcgaatcccgctaccccgacgaaaatttcaagttaagaaaaattgaatggtgttgagctgatacagttggtatcagcttttttcgtttatgtaaattagacacaattataccccgttttggggtaaataaagagggtatttctttgaactatctttgaacatgtttctctatttgcatccgtttaggggaaattaaagcaatctcctatcaaattaccccgatccaagctgtttaatgcaattttaaacatttaaaaaacattaaaacagtatggcaacatttaaagcgatcgttttccaaacaggaagacatataaaacaagatggaacatccaatataaaaattagaatctatcataatagagaatctcagtatatagccaccagctactatatccaacccggaaacatggatgactccggacgaatcctgccaaacgtaacaaacggcgaaatgatagagtatgtgggtcatacggttagttgcattagttgtttgataatgttgtccggtactttattatgcaggtccatcattgcgctggctgtttccagttctgaacgcttcacataatatttccctcgttccttattatttgccggataaaatttgatccaggctttttcgcgccattctgtaatcaggcgttttccgtatatatcttccgcttgtgatattgttactacttcggggagtagtcctaacatcgtcaacgtttgaactgttccgatcttaatacatcgtgctaccatcatttcgaagcaattttccataatctctaataggctgtttctttgtttaacttttgaatggtgttgagctgatttactgaaacacatctgcatctctatgctatgctgcctgattaatattgattttagagtttacttgttattgaaatagattgtttttcctagcatactaaaagaactctgccaaggaatggacatttatacgcctaaaggcattccgtttatgtgtacgtacagtttccaatgaaatgcaatacttatctgctattgcattttcttccatcccttcataaaatgatcgcataacgcttaactcacgttccgagagtgtactattaaattttggtttacagattattccttcatatttgcattcaccctttaacggacatttgacctcctcaaagtgaaagtttcccatctgatcaatatccattgttgaatcgaactcaccaaaattacatttaagaaaacgacgtactacaatcgccaaatcaaaaaattcccaa

SEQ ID NO: 4535 - DNA, 43591 bp, Unknown
  gut microbiota DNA sequence
ggattttcgaaatcgcagaccgtatctccgatctcaaaaccctcgatacctaccaatgcacagatatctcctgatgaaacttcgtttgtttttacacgtcccaaaccttcaaatacatgaagctctttaattttagatttgaacatatcgccattacgttttaccagcgtgatgttcattccttctttcaaggtaccgcgatgtacgcgacctacggcaatacgaccggtataagaagaataatccagagaagtaatcagcatctgcggagtaccttccagttgttcgggagcaggaatattttcaataatacaatccagtagcggggtaatggtatctgtcggcttttgccagtctgtgctcatccagttatttttggcggaaccgtaaataacggggaagtccagttggtcttctgttgcgttgaggctgaacatcaggtcgaaaaccatttcgtaaacttcttcagggcggcagttaggcttatctaccttatttactaccacgattggtttcaaaccgatttccagtgccttctgaagtacgaaacgtgtttggggcatcggaccttcgaaagcgtcgactaacagaatgcagccatctgccatattcaatacgcgttctacttcaccaccgaagtcgctgtgtcccggagtatcaatgatgttaattttagtaccgttgtaattgatggatacatttttagaaaggatcgttataccacgttcacgttccaggtcgttgttatccaggataagttcaccactattttgattgctgcggaatagatttccggccagcaacatcttgtcaaccagcgttgttttcccatggtcaacatgggcaatgattgcaatgtttcgaatattttgcatataatacctattatttggctgcaaaggtacgaaaataggattagaaataaatgcaatagccccatttttttcttgtaaaacgttgtgagatataaagataatgtctatctttgcacgctcaaaagaataatttactatatcaaaattctaaaaattatgtatttagacgcagctgaaaagcaagaaatctttggaaagtacgggaagtctaactctgatactggctcaactgaagcgcagatagctttgttttcctaccgtatttctcacctgactgagcacatgaagctcaacagaaaagattatagtacagagagagctttaacaatgttggtagctaaacgtcgccgtttgctgaattacctgaaggacaaagatatcacaagatatcgttctattgttaaagaacttggtttgcgtaagtaatctacttgccgcgaaaagattaaaaaccgtttctcacattgagaacggtttttttattggctttcaatgaaggattagtattttatgctgtgcatattgattgcagccggctgtccgttgtatagtgcttcacaactaattgtcaggaatgtagacgagttcgcattattacagcgaatgatggctactccattttcgtcggtggtaactttagggttccaatagattgtacggcggtggtcattgccttgtcctttactgatatccgggtaatagggtgaataaaattcaatgggttgggagtaaccttggatctgtgtgtttcggataccacgtgattggtacttcttttccgggtcccaattgtcgatggtagtgatatagcaaattgcaaattgatttcccggttgattatagggagttgtgttgttcagataacttttgagagctttttcttcaaagggagagagtctggaagtttccatgtgattttttagactttcgtcgctcaggtgataagcgctgtcgtcatcaattccggcacttgctgtcgtgccgtcgcaaatcataacagattttatcgcatcgatatttttatctataaaaagctcccgatcaaatgttgagtaaagaactccatttatgacgcatagtatataatgattcttgtatttcatggttataaatggtggatctcccttccacttagacttcacttgaatattgggatttaatgtggtcattagccaagggaaatagtccatgaattttccttcatcgcgcattcgatccagttccttagggatatcataataagctcttacagattgctcgaaagctagaatttttttgtatttcgtacgtttggctttaatcgttacctgattcaacaaatgagtgtcgtgtcccataattgaatctagataaagagagtcggagagactgctccaccaactgagtccgctaatatcttcccatttaggatgtagctcttcgtaagcgtatttgcgtagttcgggtgtaaagttacggaaaagtgatatgtttgttttccggttcagcttttttcctttatggcgagtttgaatagccgcactcatggaaccattgaaggcatccattggaatgtggaagaatcccaaagagtctgtgaccgtagtacctgctgctgatatcgtatctctccgggcaatgacgcttacagagatatctttttgctctttgtttctcagaaaagatgttacctgcccatgcagagtcagtctcgtttccggcagatagattggtatttctggagtggcactgatggcttggcttatatcatattttctccatccgtgaatcatcaacagattatctaatgccactcttcgtctgggagaattgtttgcgaaataatatccaggttgatgaatgtatcctttcagatctgatgtaagtaaaaggtctgtgtaaattgtctgatcgaaccgttggaagtctgattttaaagcatcccggaccgctacggagaaatgtccttgtattggttgacctgtatggtctttcattgagatatgatactcaattggttcaaaaggatagtataatgcattggtggatgtggctgttaattgtaaagatggagaaggcattacatagcaaaagcgctcgcataacgttgccccattgctattcattaaagagagttgtatgactcctctcggcaatccctgagtggataacgggagatgatatactgtttgatctttaaaatcaatggtctgatacatgagtggacgtccttgatgtgatatgaataaagccagtgtatctttgagacttgtcgaatttctgagaactttgatgactaatgctttttctttagacgccacatttagcacatatccatggggtaaagccttcggtagctgaaatgagtattttttatcttgataggtcactacagctttggcttgtttgtctgtaggggtgtatgtaaagcatcccataccgtcgtggagagttgtaaattgtgtaagttctacatcatccggcccataaacagttcctgaaatgcctactgtaccttcttctttacttgtcgcttcgaatgcaacgactgaaggcactccctctactaattgtccaccttccgggaagaatcgaatcatgaaatctttttcttttgaacgcggacgttgcttcatagattcatccattcggtaagtgatgatgctccggttttcgtctacttcgcttctccgttttctatatacagggatcgtacgcgagaaatattgcttttcactgaatgccaacatccacttcgtataggccctaatctcataaaaaccggagaataaggctttggtcagtatgaattgcccttctccttctccatcccgcaactgtatgatttgtcggtcgctagtatttcccagttggtctaatagttctacataaaggggggtactgattgggctaggctggttttgctcggccgttactacgtatgccttataccatatcgtgtctccgatgtagtaactggtgttgtccaagtgcagataggctttctcgcgtggatatgcatcggcgtaggcttgagaacgggcaaagtaagttgcgaatatagaatccgcaacttgctggctatggatttgcacggctatacttgataggaggcagaaagtgatgattatggagcgtattctcattacattttgaatgatcagtaacttgaaggttggggaacgtcaagtgttagcataactatacttgtttgatcactaactgttgcgaaatgaacagttgagccatcgtaatgactggagttggaataatttgtgcgataagcaaatgatacttcatctccttttgtatcataagaaaagtatccccattgaataggggagtctttattccaaggatcatagactgcagagaccgtaatgggttcccaataaccactgcctgtaatgagtacatcgcatgccatagggaaaggtatatcgggtggaaaacgaaaacaaatagaaccatacattgaattaactttagagaaagtgtactcttgcttatcaaaatcatatccgacgaagtttgcatagggattccatggccctttatcaggatatggtcgatcatacactaactctgagcaggtagcacgaaccgcaatatatcctcctccttcgggaagttgtagatcggttacaggtatttggattgtttcataggttccttcttgaaccaaaacttcacggacaggaaagaaggaatattcaactggattaggatcaaaatcacgacttgctcctaattgaatctgatcatatttcccttgaccttgtcgtatctgaatatttagcaaaggtggaaatgaaatatattgactccattctattttaataatctgaggtaattttgcatgctcaaaatactcgtcctggctcgttcttgttgttaccactttactggtcgcttctatactaacagggctgtcttccttcgtacaactgcaaaaaatgattgagaggaataatactaatagtaaatggattctttccttactacttgtgaattgattgtgtgtgttcataagctatatattttagaggcttaacaataactacttatgatctatgattatgcaagaaaggaaaaaataatgataatatgaaaattccgagtttaattagtgttaatctccagtctatatattacttaatccattttcaaggcaggtaggtgaaaagagatatattatgggagatattttaggattataattgtgttcatctaaagattttgctatttttgcaacctaattattctaatttattacctttgctaactaaaaaactttcaatatggatacgagtaagattgttggagagaaaattaaagcgctccgggaagataaatcaataagtatagaggaattggcacagcgttcgggtttggctatcgagcagatcgaacgaattgaaaataacatcgatataccgtctcttgcaccgctgattaaaatagcgcgtgtgctgggggtacgtctgggcactttcctggatgatcaggatgaaatcgggcctgtggtatgccgtaaaaaagaggctaaagatgccatcagcttttccaataatgcgattcattcacgcaagcacatggaatatcattcattgtctaaatcgaaagcggatcgtcacatggagccgtttatcattgacgtgatgccgacagaggacagcgactttgtgctttcttcgcatgaaggagaagagtttatcatggttatggaaggggttatggaaatcagctatggtaagaatacctatttgctggaagaaggtgatagtatttactatgactccatcgttcctcatcatgtacatgcttacgaagggcaggctgctaaaatattggctgtagtctacactccgatttaataaaatctgataccaaatattaagaataatcgcatgcaattatttgaacgtactcttgggcaatggctggaacattgggttgaagagactcccgataaggaatatatcgtttattccgaccgtaatcttcgttttacatggagccagcttaaccagcgtgtggatgatatggcgaaaggactgatcgctgttggtgtggaacgtggtactcatgtcggtatttgggcggcgaacgtgcccgattggctgacattgctgtatgcttgtgccaagattggtgcggtatacgtcacggtgaatacgaattataagcaggccgagctggagtatctttgccagaattccgatatgcatacactttgtatcgtcaatggtgaaaaggacagtgattttgtgcaaatgacgtatacgatgcttcctgaactgaaaacctgcgaacgcggtcatttgaagagtgaacgctttccgtatatgaagaatgtgatatacgtcggtcaggagaaacatcggggaatgtataatactgcggaaatcttgctgctagggaataatgtggaagatgatcgcctgactgaacttaaaagtaaagtagactgtcatgatgtagtgaatatgcaatatacatcaggaactaccggtttcccgaaaggagtgatgctgactcattataatattgccaacaacggttttctgaccggcgaacacatgaagtttacggcggatgacaaactctgttgttgtgtgccgctattccattgttttggagtggtgttggctacgatgaactgtctgactcatgggtgtacacaggtgatggtagagcggtttgacccgttggtcgtgttggcttccattcataaagaacgctgtacggctctttacggagtgcctacgatgtttattgccgagttgcatcatccgatgttcgacttgtttgatatgtcttgtctgcgtaccggtataatggcaggttcgttgtgtccggttgaactgatgaaacaggtagaagaaaagatgtacatgaaggttaccagtgtatacggactgactgaagccgctcccggtatgaccgctacccgcatcgatgattcgtttgatgtacgttgtaatacggtaggacgcgactttgaatttacagaagtcagagtgattgatcctgaaaccggcgaagaatgtccggtaggcgtacaaggcgaaatgtgcaatcgtggatataatacgatgaaagggtattataagaatccggaagctacggctgaagtgattgataaagataacttcctgcattcgggcgacttaggcattaaagatgaggacggaaattaccggatcacagggcgtatcaaggatatgattattcgtggtggtgaaaatatctatccgcgtgaaatcgaagaattcctttataagcttgatggggtaaaggatgttcaggtagcagggattccctctaagaaatatggtgaagcagttggtgcttttatcatcttgcaggaaggagttgaaatgcatgagtcggacgttcgtgacttctgtaagaataagatttcccgttataagataccgaaatatgtcttctttgtgaaggagtttccgatgacaggcagtggtaaaattcagaaattcagactgaaagatcttggattgcagctttgtaaggagcagggaatagaaattatttaaataaagaattaaaaaagaagaatgaagaattagctgcgctgtatgctgcatagcaattcttcattcttctttttttagtttttcattcttaaatgaaatcgtctcccagttgcatctgggcatcattcacgtatttgcggatagaatgttcttcgtctttacggcagattagcaggacattgtccgattcggctatcagatagccttccaagccatcgatcacggcgagctttcctttggggagtacgatcatattatcttttccattatagatcaaagaatgactttttaaggtcacattgccttcccggtctctttctgataagtcgtagagtgatccccatgtgcccaggtcggaccagccaaaatcgcctaaagatacatatacattgtccgctttttccatgatgccgaagtcaatggatacattgggacatgcgggaaagttttcttcaatgaatgctttctctttatctgtagcatagatgttttttcccggtgccagtttggatactaattcgggaagcaggatttctgcagctttaataatggtattgacgttccacataaataatccggagttccagtaaaattcaccgctttctacgaatactttggctaattccagttccggtttttcggtgaatgtctttactttgtagaagccatcaccggttggttcgtcaatttgtatatagccatatccggtctcaggacggttgggcttgatgcctagtgtcagtaactttttagagtgagaaacgaattccagtcctttaatgattgcggcacggaattcttcttctttcaaaatcagatgatctgagggagcaacgacgatattcgcattcgggtttaaagcgcggatgtgataggcagcccatgcgatgcatggagcggtatttcttcttgcgggttccaataaaatctgtttctcatccaattcgggaagttgttccttcaccagatcagcgtacattgcattggtgacaataagaatattttcggttgggattaccttttgaaagcggtcgaaggtttgttgtaggagtgaacgaccggttccgaagaagtcaagaaattgtttgggcaatgttttgcggctaaacggccagaagcggctaccgataccaccacccataatcacgcaataattatccatgtttgtcatgatagtgactctatttttaaatgtttttgctaatgtacggtttattctctaaatacagaagcctttgggacatgttttattattttttgctccttttttttctcaaactattgtggaatcaaaatattgtcgtatctttgcaccgcaattgagaaatcaagcatgcccagatggcggaatcggtagacgcgctggtctcaaacaccagtggattcacttccatcccggttcgaccccgggtctgggtaccacgaaaagctaagaattgagcaatcaattacttagcttttttgttatagggtatttctttctaatgtgcactaccagaaggttttcgatattttctatagactgtgttatttgcagcaaaaatactaaaaaggtgcaattcacttttacgatgaattgcaccttttcttatctctcagtatcatttatcccttgcctacctttatccaggttgctttcttccatagccattctaatggaccctggcgatgtgaacgaagccaccagttacaaaaaaagtattgtaaaaagaatacgcttacaccaataaggatacacgctgtaatgcctgtatgcagataaagtcctaatccccagttgtaaaacaagaaccctccgattaaagattgtgacaggtagttggtcaagctcatgcgtccataaggtgcaaatttatgaagaacattcttaagggttgtcaggtaataaaccagtatgatacctgcaaacatgattcctgtaaatgcaatatttgacagtgacttgcatagaaggacagaaggtacaagtagtgcttcgcgacttataaagtcggggagtatatttatcaaaccataaatggggaaaaaggcggtaacggctatgatgaatactttaatccagatttttatattcttttctgaatagagaaacgcgttgctacgcccaattatcatacctaccataaacagaccggcggtttgagtaactcttccgtgtaatagcatccaacccatgttggcaacattacccgtccatatggcagttttgcacatttcgaggaaagaaccttctttctgagctgtattgactaactcccagtatggagcatcaagatcagcattaataacatagtcggggttgatgagtgcataaattatttgtcccaattcaataggttgaagtagaagaatgactgctatgatcgtgactgttcgggtagagagtcggcagactgcgatcagtacataaccaagcaaggcgtagagtaccaatatttcacccggaaataaagccgaattaatacaagctataaaaagaagtaatactaaccgccaggcaaaccgcccacgaaaatcttttcctttaagtttttgtgaattgtcttgaataaaaaaactaaatccaaaaagcaatgcaaagatgcagtatgccttaccggaaaaggtaaaaaatacactatcccaaattaccctatctgtaaatatcagaaagttacaggtctcttccggaaagctattgaggctaaaccgttcgataaaatggataagtgtaattcccattacagcgaacccacgtagcacatcagctatttctatacgattattatggggtaatgtgttagataaatgcatactttttagaatttaaaatgttaacgtactttttcagatgcaaatttaacgcagcccttttatagttttggaaaaatactgttcaataaagaacaaaatatgacttttatgtgctttgtatgattgatgatgctgtttgtcttttatagttagcttgttgataacttcctgaatattaatgtaaataatgaaataaaatgctatgttggtcttattaaatagaaacaacttgtactgaatacatttctaatgaaaggtatacatgctattgttttgtttaatttgtgaggggttagtccaaatttaattttgtagtgtgggttaataaagtataactgttcattgacgatttgataatcagtctgttttactactcttcgaaacatttctattgtacatcgggtgtatttgatagttaataactctttgactgtgctttcttgttcgctgaataattccaatatccgtttatacaacatacgaggtagtaaatgtataaatggcatatgagagataatcttacttcttgcaatctgctgatgtccgccgaatggcatttgccaggcaggaaaagcaatgaagatcattccgttaggcgatagatatttttttaagttgcgcagaaattgctccttgttgtcgatatgttctattacatcatgtatgagaataagcgggaaatgtttctgtaaatcttttaataagaagatatcagaagcgatgaaagttcctttttgccttttagtgatgaagaagttttgtgcctgttcaattcgggatgcggcaatatcaattccaatgacatcacaacctagctcggcaaagggaagcagattccctccttcgccacaccctacttccaatactttgtttggcagatttcctgtatattctttaatataaggaatataataatttctcgtagtctgagcttgttcctcaaaataacgttcacggtttgtatgtcgtttctgcatctgatttgtctattgtttctaactgttctatagttatgataaactatcagccggaagactgcatggcagaatgatttttttaccaagagaaacgaatgcctacaggaacagagaacgtaaccggatgttcttttcggattgtgcgcaatgaacttccatcgggaatatagtaattaatggttggctctatatagatgctggtgtgaggtgtaaagtggtattgtacacctgtactcgcattgattgaccattgcaaaggtacatctaatgactggtaaccccaattaatggggacactatctgtgacatgagaagtatgcagagttccttttatcgggatttccatttgtaaaccggctgttgagtaaaatgagaattgtttataattcccaaaacggtaggaaatacggagaggaatacctatgtaatggagcttttgggtttcctgaatccgatattcctttcctgtggtgaactctgattttaaataaatatattgtaatccggtttctatactccagtggttattcaactttttgttcaatgctagtccgatagtgatggggctattatggtgttgatgttctataattcttccactgttgtttttggcaattgtcattagcgtaagcgagtctcctaaggttccttcctgattgcgggtgtttaaatagtcataatattcttcccaagtattgacttgctgggggagaccgctttccaaaccgtcagagtgtggtgttgtcatcaacttgtataggttttgtgccagttgtggtccgactgaccctgccaacatcattttccatttccctgttttctttttggggagtgaagtgaattcttggcttgaatatgagaatgtaataattttctctgcatgctcccatgtaaaagatggtttggcaacaggctgtttctctactgagtcttttatttcagaagtggtagataatcctgttgcacttgtgtctaatgctaatcgggggaggtttgctaaagtagtattaaaagggggggcttctttgtagtgagagatatgtccggaagaggtaatgctctcattttcttctttcttatctaatttcactttccgaatgacattgttagaccaatgattatctttagtctcttttcttttccagtatagatagtcgtgtatcgttgggaaaaaaaataaaatcactagtataagaatcagcctgtaatcagaaatcatctttttaagtaagacttttgccctgaataattgagaagaggaggagtggggagctatattcaacagtttacctatttccttgtgagataatccctccaatacagctaacttgaagattttgctgtatccttctggcaatttctctaccatttctgttattttatcataaggaatagaatcagatgatagcgaattgtcaataggctcctcgttttcagggatatcagataagggaattgcagagtttgtactcttttggttgagataccttaatgaaatattcttcataattattcccatccagctttccagtttttcgggagtacgtaatgtcttaatcgaagtgaaaatgacaatgaatccgtcgtgtaggagatcttgtgcgatttgtttatcaggtatataatgaaggcatattctcatcatctttttcgaataggttttataaagtagacttaatgcctgctcattcccttttttacataaatctacaagttcttttatatccatgtgcgtgtattattttaatatgatgaatagaaaacgaaaagactgcatgctttttcggtttttaacatcttgttttttgcggatatgaagaaactttttgttgataaattgaacttgaatccataaaactttgacgaactttcaattattatgcaatctttgtgctctatacattttttatttcccgacaaactgctaactttatcatcattattataatgacatgtgaatagtcggttgtaccattatttaaatctcgtttatgggtaaatacaaatttatagaagaaagagtggaaacaatgtcttcgtcggagcttaagatattcttgaatatactgaagagcagatctaaggaattgatgtcaactctggagtcagtaaggggaataaaagatttggaggctgtttgtaaatcaactcagaaactaaacaatcgtgtttctgagtttgacggaggatcttttcttatattagtggttggacccgtgaaatcgggaaaatctactttagtaaatctcatagcacatgctcacgtcagccccactcatttcttggagtgtacggtgcgtccgtccattatttcaaaaggacaggaggaatccattacccgtattttttctgttgctgataaagccagaaaggtagaacagtttgattcggtcattgatagcctgcgcggatttgaaaaactggaaaacatttccgagataagcattgaaaagaaagaattgaatgatgctaatctggaggagtgtgtttcgttagctttggaagaaagcgtgataaatacagatcatacgctggtgacatccataacaacttccggtggggagcttttgaaagataatatatttctggtggatatgcccgggctggatggcgggtatgcgaatttggataatcctatttatgaaacgatctctcaaagggcagatttcgtgatatttgtgcaaagttcaaattctgctatatcgaaggtttccaatcgttttctgaagttgctgcaggagaataatccgaaagttccggtttgtcttctacataatgtgtttgaagcggcttactggcattcggaagaggagaagcaggctgtaattaaggcacaggtagaatttgccgagaatgaaatgggcagacgtaacttccagttgaaggagaatatatatagtttgaacttgggaaaagtggcggatgctgccagctatgagagaatggaggatcttcaggaagaagctgcgaaatttcagagatttgagaaggatttgtatggcaaggtgatctccaatagtactgatatacgtctgagaagcgtaatcggaagaacgctgaatcagttggaaaaactggataatttagttggagaatcaattggtcaacaggaagcaatcgatatagaatatcaggctgcggcaacttcgtttgacgagttactccgtcaggcgagtgaacttagttacgatgggagcgattttagaaaaatggtgcaagtctatatggatgatgatttgaaagagtttactgaaatcgttagggagtattatgattccggatgcaattccgcatttgccggtggagcgaaggggaaagatgcgacacgcagccttgttacaaagtttatgactgattcgtcagcggcgataaaaagtaaattccttgattcccatgaacatagcctggcccggcagtatttgcggaaactctctaacttgaaagatgatgtggcttttatagagaagatgaatacttttctgaagcagaaaggttgtgcaccttttgactcagtgccgcaagtgacggattttccggtggtcgattttgatttgcagggagcttttgatgtgaagaatattagtaatccgactgttccgcatatcggaatacccaatccgttcgggacttattcgacaatggaaattcagagttttctgaggaaagcgatggaatgtatcaccggaatcgatcatacgcataccgggaaaacgatcaaaggatatcttcagctgactgtcgggaagagtatatataaggcggctaatgacctttacgatcagtatgtgcctgtacgcaaacaaagtatcattgattttttggaacaacaaaaaacaatgtatctgaatgcgctggtgtctgataaagaagaatttgacaggaaggatgcgttgcttcggtcaataaatgcacaagttcagagttttaaggattcaataagataagaataagccaatgaaacgaaatttattaattatcacactcctgtttttgggctcttttgtgattttattgttgggtaacatcattattattggtgagaaaatagcctccttatcgcaggttgcgtgggcagagtatgctttttacaccttgattctggttgtattttatgccgtcgttatacgtccggtcgttcgggtgcatcgtgctccgcagattccggctttgtctattgatggggagtggaatactgcacaacttgttgcgtttggacataaactggcggataactgcaattatatacctaaagataagtcctgtcccgagttaagaaaactacatcagcagagattgcgtgaagatttggaacgctatgcaacgagtaaggaagaactggtgcaaatcataagcaaagagttgaaattgcgcattgaagggggagaactgaaagaaacttcaggtccgcgtatagaggatatgtattcggttcgtatcatcggtatcaatcgtcgtattatagaatgggcaaaatctgtctttatgattacggctatttcgcagaatggaaagctggacacggtatccgtgctttatatgaattataaaatgatagaggatgtgattgtagcttccggtttccggcctacgaggcaacagttgttccggcagtatgtcaatattctggttacttcattaatgacatttgttgtatccgaagtatttaaagatatgggctcggttgctcccttcggttcattagcagatcaatcttcggatgcagcgtccgatattgacatttccgatgcttctgttgacgctgccgatattgatttggatgacattggtgataccgtttcgggagataccggctttttgagcattctgtctaatgtgaaaataccgggtgtagtcatcggctcgatatgcgatggaatcgtgaattcgttgatgactttgcgtatcggttatgtgacgcgtaactatctgattgatggaatgaattcattaaatggaatcaaagccaaaagaaaagcaaagcgtgtagccgtgaaagaggcgttgaagtctttgcccaaagttgtcgtggtaggtacttctttcgtgggaaagggggctatgaacattattctgaatattattggcgggaagaaagtgaaggaaactgataaaacttgattttctctttcaacctgtcaccgcctcctgaaactctttattcatcagtagtgtatgctggtgataggtcgcagaccatctgtcactgatctatcacctgtcaccgtctgcacacacatatatttattctctttttgctttaatccgtaccacccgatacacattacctcgtttggtatgcacagaaggcacccgattcttttgtaatattcttccgaactgaataatattgcaatcggatacgcgaatcttgctatcatgttgcacctgctcgagaatttcgatggcaaggaattgttcgcattcttctccttctgtggctgcccggaaatactcatggaataattgttctgcaattggcatcacctggaactcctggttactttcattcatcaccttctcatcttccggatcaaaccaataccgttcccccttgtatagatcatgcatcgcctgtgcatagagctgttcgtaatcaattggggaacaatcgatcggtccggtcacatcgacaacaatataacggcggctaccggaagtgtccgtcagcaggtctttgtgattgctcgtcccaatgaaggaggcgtaacgacgcatctcttgcgtagccgtaccgtgtggacggcggacattgacaatcggtttctgaagaatatgtttcaaaaaagcctgttgattcactctgttctggtcaaattcgtccatattgatcagtgcgaaccgattgagggatatctcggtatctcgcttgttactgaaatcaatgcggtccgtgtaatatgcctgtaattcgggaggaagtagactccggcaaaaagtagactttcggtaagcctgcggacctacgagcaatggtacagtgcaattcgcatatttccggtctgtctgccgccaatgtgccaccatattcagaaaccagcgatagaacaagtccgcccaatgtcggttgttgcagggaccccgggctgctagttcgcgaatccggtcgtgcccgtcccaacgtacatccagtccgaagagaaaatcttcgatcggattgaaaatcggaatccggtcggagtccagataacggaccacatccctgtcccaaagactgagtccttccagccttgcgttcatggcaatactgtttcgaacacggctgctcagggggcggaagtagaaacaaaacgtattccgttcccgatattccgttactgtcgtcattgtattgtaacggaattcgtatctgcgttgcataaattcttccgttcgcagctccagttcctgttctgccgataggggagattttttgccgaagcctttggcgatggtgtatacactctgtactgtctggcggatcagaaactcttttttctgcctatataaatgagcgattgcccaacgggcggtttcttcttccggtatgcctgcctggaagcaattttcggctaactgaaccaataaaggcttcaagtcttcatcggatcggggatatatccccggctgaagttcgcttaaagattggcatgccttgtttaaagccacttcgaagagcgcagacaatgtttcaagactgtcatatcccgggatcaatcgcttgaatggcgatgtttccgcctgtacggcttcttggtaggtcgtttccgagggcatttccattggctggcgcatatacataatggtggagtcgggattgtaataaagttccgggtcgtatgtttgccggcaaaattgctctaatgccggatttttcaattcaatggaataggagagtatcggctggtataagctgacagcttttctataggcatgcgcttgaaagatttccgcttcttcccggtttttgggaagtgatttgtccggtcgtgtgaaccgtacccatatttttacggaatgtccgctggaacccatgaaagcaagataagtctgcgaaagctcttccgcttcctgcttcacccggttcacttccatcaagtttgccagatgattgacttctatttgtatgattccgttgtatgcggtcatctgtatgccgttggccgttttgcgaaaagctgcagccgggatgacttttgccaatttcttggcgtcgtccagcttggcgtccggtgatgcgtaacgtatgcttgtccgtagattgctgatcggttgggctttcgtctcatgcttcatcgcttctatttgtaggtttatgtccaacgttcgcatggttggtgtccctccgttgtcccgcatcaaagtaagtttcataatgaatgtgtctgtaaaatgatctaattattgaatttgttattgttaatgtctttcttccggaaggcatgtaaaggtacgctttattattcggcttcacaaatgtttgtgttgtacttttcttaaagttttttatatatcggttggttcgttgtctattataggtttacgtgttgtctattaatagaaaagttcctttcctctaatagtaaagttgcttttgtccgcttacaaactacaaatgcaagttttaattataaaaatgcaagctctgtttttataaatgaagcttgcatttataaaaacagagcttgcatttttagtttgcaataggtggaaaggaagttatctattagagaaaagtaagtttagttctaatagagtggaacttatctaccaatactctaggtgataagtattaatgttttggatgatacaagtggtgataggtgatagatgtggtgataggttcggataacctgtcatcttgtctgcaagtgcgatgaataactgtatgtggagtgacgggtgataggtgatagagaaaaatgagaaaataatctatctattgaagttagtggttatagcccgaaacttactctggtgctttttttgacgtgtatttcctgtgtcggatgagtttctatctaggaaatataaaaaagagttgcaaaacagatgttgcttgtgaaagtagaatggtaaatttgactgttaattcataaattttatccaaaagaaggaaaaagaataaaataaacaagaactaaagttacatcctattcataaaaatactatatttattgcagctagagagcactttaagtaatgcttaagacagaaaacgaaaagtagtatatatgctatatattttctattattaattacttaaacacattttttatggaagccaagaaatcaaaaaaggctgcaattgagaatcaaagaggttcttggttgttgatgggtttggttgttgcgcttgctttcatgttcgtatcgttcgaatggacacagcatgatgtaagagttgcggcagtatcatctgatgatgaatccatctttgtaacggagctcgttccaatcacattccctgaagagaaactggaaccgccccctccaccggaaatcaagcaatccgaatggatcgaaatagtagatgataccgaagaggtgacggataacgtttcagtagtgccggacaatgtgaatgaaccttacaaggttgtttgggtaccgccagtagtggaaactaaagaagttgaggaagatgttattcacgtaagtgtagaaatcatgcctgaatttcctggtggttcagctgaattgctgaaatatttgagtactcatatcaaatatccgacaatgtctcaggagatgggctcacaaggacgcgtaattgttcagtttgttgtagacaaagacggatcgattactaatccgacagttgtacgaggggtagatgcttacctggataaagaagctatccgtgtgataagtggaatgcctaagtggaagcccggagtgcagaacggtaagaaagttcgagtaaaatatactgtacctgtagtattcagactgcagtagttacttgaaataaatgattaaaagggtcggtccaccgcgggagccggcccttttttcaataaaataatatatctttgcgtcacgaacaaaaaaaatgaaagactggtttatgaatcttctgtattacctaaaaagacctttaatctggctctcccgtttccgctaccgttgcggatatggtgtgcactctccttttgctttcagtctgatcacagacgtgatttatgagaagatgccttattatgcatacgacctgctgaaggcggaacagaaaaagcggatcacaacacagggatgggagaaaggaataccaaagatcaaccgtctgttgttccgcctggtgaataaagtgcaaccggccactatcatagaagtaggccagccctcggcagcctctttatatttacagtcagccaaaccttctgccgggtatctttttgcttctgacttatcagagctctttctggatgccgatactccggtagactttctgtatctgaatgactatcggaatccggctttgctggaagaagtttttaacatctgttcccgtcggactactccgaatagtttgtttgtcgttcatgggatctgctattcaaaggcaatgaaaaatctttggaaacagttacagaatgatgagcgggtgggaatcacttttgacttgtatgatgcaggcttgcttttttttgatacaacaaagattaaacagcattatatcgtcaacttctgatcacctttatacgttaatcttatatatagtaatgatgaaaaatagacgtttatgaaaaaaagccttgtatatacaaagaccggtgacaaaggaactaccagtcttgttggcggaagccgcgttccgaagacccatattcgtttggaagcatacggaacaattgacgaacttaattcccatctgggatggctgaatacgtatttgctggatgaggcagaccgggattttatcctgagtatacagcataagctattctctatcggttcacatctggcaactgaccaggaaaaaacacaactgaaggccgccagtatccttactccggaagatgtggaacgcatcgagcgcgagattgataagctggatgaacaactgcccgaactttgtgcctttatcatacccggaggtagccgtggagcggctgtttgtcatgtgtgccgtacgatttgtcgaagagccgaacgtcgcattctgactctgtccgaaacttgtacaatttctcccgaagtgttagcttttgtcaacagattatcagattatttgtttgttttatcccgaaaaattaattttgatgaacaaaatagtgaaatattctgggataatagttggaaatgatagattttattatacttttgccgaaaaatagaaaataagtattcactttttaatactcaagattatgtattggacattggaattagcatcgaaactggaagatgctccctggccggcgaccaaggacgaattgattgattacgctatgcgttcgggtgctcctcttgaagtgatagagaatctgcaagagatggaagatgaaggcgaaatctatgagagtatcgaagatatttggccggattatcctagtaaagaagatttcttttttaacgaggaagagtattgatttagaaaaagaaaccgaacatataaaaatacccgatagctttcacacggctatcgggtattttttattctcatacaatattaaaagaccggcatctgccagatgaatcctaccgaaatccggttggtactgtaattctcttgtcccagcactttggcacgggaggtgaagtcataagaacgtcctacataggtcacgaagaaatgcaggttggtttccatcggataaaattcgatacctgccagatacccccaggaggtacggtagttacctttttctatcccttcggaggctttggttacggaagccgtttcatacattcctttcacgaaggcattccatttcgggaggaaacggtagttacacttggctactacggataaataacctgtatcaaacgcattgtgtccgcccgggcgaccgacgatgccggtgataatccctttacggtcaatctcttcttttgagtacatgaagtcgacaaaggcgttccactttccgagattcagttcatttcctacagcatagtaatacatattatgatctttggcttcgttcatcacagaggccgaccagcgggttttaaatacattattaaaattgccaatccagtttaaggtatagaccagcggcatttttccggatttcagatcggggagattaccctccgcatcctctgtgattccgtaagtgttgtcgaaagagctattgcggctgttcaatatctgcagattaagttgctgatcgggagtaatgttataacttgcattcagaccggtcaggaagttactcatgtaatcgatcatatcacaatattgatagacatcgatcgggttgaggtcaaactcgaagccgccatagttggcactttgtttaccggcaaacaggttgaacttatcgttgagcttgataccgatgcctgcccagtcgatggaggtcgggaggttgtctatcatattgtttccgtcgttcgagcggttgagacgctggcggtaacggtaagaaagccagttgttgatatttcctttcgcttcgatgcggagttggtgcatattgaagtcaccttcctgaaatccattctggaaatgagcgtcaaaacttccttgcatattcagatataagttgaacttatccgttttcttttttacgtctgtcagttcctcgaaaagaggagtgtttggggagaacttttgggcatacattgcctgtatgctacctgcaaggagtagcataaacattaattttttcataagtaggtccggtttttagtattcgttaaagtattcctgaatttgtttccagtccgtggttttggtcagcgcaagcatcaatagtacacgtgacttttgtggattcaattcttgagaggctacaaactgatacttggcgtcatccacttccgcatcaagagtggtaggaccagtcggtacgcgggaagaacgaacgactacaatgccttttctgcgggcgtctatcaatgacggaaatatgtttttatggatattaccgtttccgactcctgcatgaatgattcctttatatccgttgttgagcaacggagtcatcatatcggcttcaatattggaatagctgtatacgatgccgactttgggcaatgaagtcagtttggtgacatcaaatacggattgggtggtatgtttcttcagtgtgatctgattataacatactttaccgttcagtacatatcccaatgcgccggagttgggagcctggaaagtctgtacatcgaccgtgttcattttaactacgctttctgcacctagaatcagaccgttcatggcaaccagtacacctttgtcttttgattctttagctgcagcggtaactactgcattataaagattcagcggaccgtcggcacttaatgctgtagaggggcgcatggcacctaccaatacaacaggcttgtcacttttgacagtcagattcagaaagtaagcagtctcttccatcgtatccgttccatgagtgatcacgattccgtcgatatccggtcgtttcaataactcgttgattttcttggcaagtgtcagccagacttcgtcattcatgtcctgtgaaccgattctcacaatctgttcgccggttacattggcgatatctttgatttcgggaactgcatccagcaatgcaccgatagcaacttgtcctgccgtatagctggtgcccgtagccgagcttcctgttccggcaatggttcctccggtagcaaggatgtggatattcggttttgcggcaaatgccattgttgcggataatagtagtgttactactaccaggcctaatttcttaatttgtttcataactgaaatgagtttaggttaataatatattagaatatttgaataaagagcagtcctaaaacaatagcgactacggtagataccagtccgggcatcataaacgaatgattcaacacatatttaccgatttttgttgtcccggtgcggtcgaaattaatggcggctacgacagtcgggtaattcgggataaagaaatatccgttcactgcggggaataaggcaatcagcatatacggagaaatacctaacacgatgcccagcggcatcaatgcccgcaccgtggctgcctggctatacaacaggatagacatgacgaacagcgcaataccgaacagccatggcatctgccgcacgattccttcgatggaaagagtgagctgtgccatattgccctgaaggaaagtatcacccatccacgcaataccgaagatggcgataacagcctgcatcccggcagggaatacagaaccctgcgttgctttgattccatccgtcttggttactataaggatgatagcggctgccgacaacattacgatctcgataatggaggacataccgagcgtgacgatttctccatcgatcaggaaactgggacgcataccttcaaaagatccgaaaaggacgataaaagcagttgccaatataaagatgagtacggaaagcatggcggaacgtttgttcttgacatctttaatctctatcttcttgtcattgaaaagaccttctttcaagcgtttctgatattcgggatcctctatcagttccttgccgactttcatggagaataaagcgccgaccaatactccgatgatagtggcgggaatcgtaattttaagaatatcgaataatgtaatgtcgaaacctgccagtaacccgagcaaagctaccgttgcagcagagatgggactggctgtaatagcctgttgcgaagcaatcacagcaatacccagcggacgttccggacgaatctttgtttcggtagctacctcagcaatcacgggcaatacggaataagctacatgcccggttccggcaataaaggtgaacagataagtcaccaatgggctgagcaacgtgacgtgcgaaggatttttgcgtagcaaatgttctgccagtttcaccatatagtccagtccgccggctgcttgcatacaggaggcagcggaaataacggcggcaatcatcaacataacgtcgataggtggtgcggtgggttgtaaaccaaaaacaaacgtgagtattcccaatcctactcctcccatgacaccgagtccgatgcctcccaaacgtgcgccaataataatggctgtcagaacaaatgctaattgtaatatcattggttgttgttttataagttcctaacaaagataaaggatttatcttcgttttttctctgtttctaagataaacaacaaaaaagttattgaatagtttttgcatatttattaaaacaataacatctctgactggttattatatcaactaacgaatgtgttattgttataaaacaaccgatatggaacagaaattatcaaaaaaaactcgtacagagagcgacttgataggtagtcgtgaagtgccggaaagtgcattgtatggagtacagacactccgtggtattgaaaactttcgcatcagcaagtttcatttgaatgagtatcccctgtttattcaggcattggccatcactaaaatgggagctgccgttgccaaccgtgaactggatttactgactgaggaacagacggatgccatactgaaggcttgtaaagaaatactggaaggaaaacatcatgaccagttccctgtagatatgattcagggaggggccggaaccactaccaacatgaatgccaatgaagtgattgccaaccgtgcactggaactgatgggacacgcacgcggagagtaccaatactgctcgcccaacgatcacgtcaatcgttcgcaatctaccaatgacgcgtatcctacagccattcacattggtctgtattatacccatcttaaattggtgaaacactttgcaacactgatcgaggctttccgaaagaaaggagcggagtttgcacacattattaagatgggacgtacccaactggaagatgccgtaccaatgacacttggacaaacttttaatggattcgccagcattctggaacacgaactgaagaatctcgattttgccgcacaggattttctgacggtcaacatgggggcgacagccatcggaaccggaattaccgccgaaccggaatatgcggaaaagtgcattgctgccctgcgcaagattaccggactggatatcaaactggcagatgacctgataggcgctacttcggatacttcctgcatggtaggatattcttcggccatgcggcgtgtagctgtcaagatgaacaagatctgtaatgatctgaggctattggcttccggtcctcgttgcggactgggagaaatcaatctgcctgccatgcagccggggtcttccattatgccgggaaaggtgaaccctgttattcccgaagtcatgaatcaggtttcttataaagtgataggaaacgacctttgtgtagctatgagtggagaggctgcacagatggaactgaatgcgatggaacctgtcatggcacaatgctgttttgaatctgcggatttgttgatgaacggttttgatacattgcgtaccttatgtattgatggcatcacagccaatgaagaaaaatgccgtcgggatgtacacaacagtatcggagtagtgaccgcactgaatcccgtaattggctataaacattctacaaagatagcgaaggaggctctggaaacgggtaaaggagtgtatgagctggtgctggaacataacattctttccaaagaagacctggatacgatcttgaaaccggaaaatatgattaaaccggtgaaactggatattcatccgaatcattgattcataggggtaaaaagagaggccagcctgttaatataggctggtctctgtgttttgtatcattagtgtattttatatatttaatcttggattctttttcatctactcgtaaaaaaaacgaaataaataaaggaaataaattgataatgtctgttttttagtatattcgtaaaaagtagtgtacatacaaagcaaaactaaaagaatacaaattaaaaacagcgattatgaaaaacagaccttttgagaattttgactttacagacttctgggatgatgatgaatatgctatgaatgaatatattggcgcgcctccaacagaagagatgatagaagaaacagaacgtgaactgggatacaaactccccgaatcttatatttggctgatgaagcagcataacggtggaatacctttcaatgtttgttttccttgcgacgagcctaccagttgggcggacgatcatgtggctatcaccggcattatgggagttgataaggataagatatattctctttgcggacagctcggcagccgtttcatgattgaagaatgggggtatccggacatcggagtggccatctgcgactgtccttctgcgggacatgatatgattttccttgattatcgggagtgtggtccgcagggcgaaccgaaagtcgttcatgtcgatcaggaagatgattattatgttactttccttgccgataactttgaaaaatttattcggggacttgttaacgaagatgtctttgatacatcggaagaagatgaaagaatggagctggaaaaagttcggaacgcagctttctcaccgctcttgtccgatttgtgcgcaaagtgtgatcatcccgtggatacggaacggtggattcggaagatatcggaagaaatagtaattgataagggattctttgcgcttcatgccgacgaacgttcttatctgctttacgacatccagctttggctttacaccaacgcttatcccgatacgacggaagaagattacctgtctgcctataaaaagataatagcgctggacggtgagttcagtacaggaggatatgcttcggattttgtaactgattggctgacgcgacgcaaggagagcggtatggttacgtgtaatgacggtattctttcgatggcagcggggactaaggaggccttgctggcaaatcgggagttgatttcgaacaaagagcaataatttgtgtttatttattataaatatatatctttgtcccgaattataaacacgtagatttatgaaaaagatttttggtgctttaatgattgccgtatgtatcggtatggcgatgcctgcccaggcacaattacattttggtgtaaagggtggtttaaacttgtctaaagcaagcttttctgatgtgaaagaaaactttaaaaaggataattttacaggtttctttatcggtccgatggcggaattcaatatcccggttgtgggattaggagtcgatgcgtctttgctttttgctcaaagaggtataaaaatctctgatggaggtgaagaagctactgtcaagcagaatggcttggatattccggtcaatttgaaatataacatcggcctgggaagtctggtaggtctttatgtggctgccggtcctgatttttactttgattttgccggtaataagacaatagacggagtaagaaccgataaaaagaaagctgaagtcggtatcaatgtcggcgcaggtgtgaagttgctgaatcatctgcaagtaggagctaattataatattccgttgggcaagactgccagctttgaagacattgaaggctcatacaaaaccaagacttggcaagtatccgttgcttatatattctaagctatccgttactttttatcataaaaagaaagagcttccgatagaggaggctctttttttattctaaggtattttgtttaagatactggtctgtaaacttgaatctattttattaaattccggtgtacagactatttttcttatcagtgttcccttccctcttttaaatccccatttttttattgtacttttgtgcttgcaatgaaaaagtatgtagatgtcatattaccattaccgcttccgaagtactttacctattccctgccggatgaatgtgcggaagaagttgaaatcggatgccgtgtgatagttcctttcggacggaagaagttttatacagctatcgttcgtaatgttcattattgtgctccgacggagtatgaggtgaaggatatatctgcattgctggatgcttctcctattttattgtccactcaatttaagttttgggagtggctggcagattactatctctgtacacaaggagacgtttataaagcggcacttccttccggtttgaagttggagagtgaaacgattgtagaatataatcccgattttgaggcggatgcaccgttgtcggaaagagagcagcgtattcttgatttgctttcagtagattctcagcaatgtgtcacgaaactggagaaggagagtggcatgaaaaatatcctcacagtcatcaaatctctgctggatagagaggccatctttgtgaaagaggaattgcgccgtacttacaagccgaaaacagaggcgagagtacgattagccggttctgctgatgaaaagcggcttcatatcttatttgatatcctgtcccgtgctccgaagcagttggcgttgttgatgaaatatgtcgagtgttcgggaatccttggaagagaaacgccgaaagaagtttcgaaaaaggaactattgcaacgtgcaggggtgtctccttctattctgaatggcttggtggagaaaaagatatttgagatttactttcatgaagtcggccggctgaatcaggaggtgaaggaggtcgtaaagttaaatgccttgaacgagtttcagcagcgggcgcacgatgagatcgtgcaatcctttcaggagaaaaatgtctgcctgcttcatggagtcacatccagtggaaagacggaagtatacattcatctgatagaagaaacgattcgtcaggggaaacaagtattgtatctcttgcctgaaatagcattgactactcaaatcacagaacgcctgcaacgggtattcggttctcgtttggggatttatcattccaagtttccggatgccgaacgggtagagatatggcggaagcaactgggagaaaaaggatttgatatcatccttggagtccgttcttccgtatttcttcctttccgtgatctggggctggtgattgtagacgaagagcatgagaacacctataagcaacaagaccctgctccccgctatcatgcacggaatgcggctatcgtactggctgccatgtatggagcaaaaacgcttctcggtactgctaccccctccatagaaacatggcagaacgcaaggaatggaaaatatggatttgtacaactgaaagaacgttataaagaaattcagctgccggagattattccggtggatatcaaagagctgcatcgcaagaggcggatggtcggacagttctcgccgttgctgatacaatatatgaaagaagcactggaacagaaagaacaagtcattcttttccagaaccgtcgcggatttgcaccgatgatagaatgccgtacttgcggctgggtgccgaaatgtaagaactgcgatgtgagtctgacttatcataaaggcatcaaccaactgacctgccattattgcggctatacctatcaactgccgaagtcctgtcctgcctgtgaaggaacagaactggtcaatcgcggttttggtacggaaaagattgaagatgatatcaaagtcctttttccggaagcggctgttgcccgaatggatttggacactacccgtacccgagctgcctacgagaagattattgccgactttgaacagggaaagacggatatacttatcggtacgcaaatggtatcgaaaggtctggactttgatcacgtaagtatagtgggtatcttaaatgcggacaccatgcttaattatccggatttccgttcttacgaacgtgctttccaactgatggcacaagtagcgggacgagccggacgtaaaaataaacgcgggcgggtggtattgcaaacgaaaagcattgatcaccccattatccatcaggttatcggtaataactatgaagaaatggtagacggtcagctcgccgaacggcaaatgtttcattatcccccttactatcggttggtgtatgtatatctgaaaaaccataatgaagctttgctggaccagatggctgcggtcatggcagataaactaagaaccgtgttcggaaaccgggtattgggaccggacaaacctcccgttgcccgtatccagacattattcatcaaaaagatagtgttgaagatcgaacagaatgccccgatgggacgtgcgcgggaattgctacaacgtatccagaaagagatgctggaagatgagcgctataaatccttgattgtctattatgatgtagacccgatgtagcacttgatacagacctaatattttccttataataacctttataaattaactaaccatgaaacgacttacgatttattgcttaacatgtcttattggtgtgagtcctctttttgcccagcaaggagtgacgcagtgtggaacccctacggggcaaccgaaatttccaattgaaacttatcaggaactgcccgatccttcttccccctctgataaagactgggcagcagttaccatccctcagatttcctggggaactattgacacccgctatgcgaagcatcggcttccccagctgaaaaagcagcagcttaccactttaaaaggctggcgtggcgaacgtgtaaacgcgcaggctgttgtctggaccggcactgaggtgaaagatctgaacttcagctttaccgattttaaagataaaaaaggaaatagtctttcggatgaggcgtttaaagccggtttcatccgttatgtaatgaccgatgaactgaataaagatggcagaggcgcgtgcggtcaccgtcaagcagtggattacgattcgttgttggtagccgacccgattgatacgaacttgaaatcaatgtctgttccggcacgtaccgttcagcctatctgggtgcaatgctggattcctcaatcggctactcccggaacctacaagggtgctttgctggtaaaagacggttcccgtctgttgcagcagcttaatctcgaaatcctcgtttcttcccgtgaacttcctgcaccgtccgaatgggcttatcatctggatttgtggcagagcccgtttgccgtagcccgttattatcaggttcccttgtggagccaggagcatctggacgctatgcgcccgctgatgaaaatgctggcagatgccggtcaaaagattatcacagccactttgacacataaaccctggaacggtcagactgaagattatttcgagacgatggttacatggatgaaacgtgccgacggcacttgggctttcgactatacggtttttgatcgctgggtagagtttatgatgagtgtcggtatcgatcagcagattaactgttactctatggttccctgggaattatctttccagtattttgatcaggcaacaaattcattgaagtttgtaaagacagcaccgggagaacctgcttatgaagaaatgtgggttgcgatgcttacttctttttccaagcatctgagagaaaaaggatggtttgatatttgtgcgattgcgatggatgagcgtccgatggatgtaatgcagaaaacgttgaaagtaatccgtaaggcagatccggagtttaaagtttcactggccggtaattatcatactgagatagagccggacttgtacgattattgcattgttatcggacagaacttcccggaagaagtgcgtctccgccgtgcggccgagaataaacgtaccacctattatacttgttgtacggaagcacatcccaatacattcactttttccgaccctgctgaggctgcatgggtgagtttctattcttcgaagaagcatctggacggctatctgcgttgggcatacaatagctggcctttggagccgttgctcgattcacgtttccgcacgtgggcggcaggagatacttatctcgtgtatccgggagcccgtagctgtatccgcttcgaacgtctgatcgaaggtattcaggcacatgagaaaataacgattcttcgtcaggaatttgagaagaagggaaataaagccggattaaagaagatagagaaaatgctggccccgttcaatttgggtaatatgccggaaataccggcagccgttaccgtaaaccgggccaatcagatacttaattcgttttgataatagaaacgaatgaagcctgtcaattattaaacgtaaattatgaagaaaatattatttgtctgcctcggaaatatctgccgtagctctacggcggaaggagtaatgcttcacctgatcaaagaagccggactggaagaagaatttgtgattgattccgccggaatcctgtcttatcatcaaggcgaattgccggatagccggatgcgtgcacacgctgcccgtcgtggttatcaactggttcatcgctcccgtccggtgcggacagaggacttttataattttgatctgattattggcatggacgaccgtaacatagatgatctgaaagaaaaagctccttctacggaagagtggaaaaagattcatcgcatgacggagtactgtacccgcattcccgccgaccatgtccccgacccctactatggaggggccgaaggatttgaatatgtgctggatgtactcgaagacgcttgtgccggtctgcttacttctttaactcaggataactgatccgtgtgtgataagcgattttcagcttttctttgaataccgtcttgatggtcgcaatgtccttgaaagtgatagggcactctttgaaataaccttcagcaacttgggagtcaatgatcttgtcgaccaagttgctgatagtttcttccgtatattccggcagactgcgtgacgccgcttcgacagcatccgccatcatcagaatagctgtctcctttgagaaaggattaggacctggataggtgaacagttcttcattcggttcctcgtcggggtgctcgttcttccatgagatataaaagaacttcgttttcccccgtccatgatgggtgctgataaagtctttgattactttcggcagattatgcttgtccgccagtttcaatccgtctgtcacatgactgatcacgacctgggcactttgctcataattcagattcttatgaggattgacgcctcccgactgattctccgtaaagaaagcgggattctccatcttgccgatatcatgatataaagctccggtacgtactaattgacttttcgctccaatacggatcgctgcttctgccgccagattggctacctgcatagagtgctggaaagttccgggcactgtttcggacatctgtcggagaagatcactgttgatattggaaagttcgaccaaagtcacattagaggtaaagccgaacgtcttttccagcagaaacagcaacggatatgtaaacagcagcagaataccattaataaagaaataggtatacatccgtgcattcaacttagagaagtcattggcaagtccgttctcggtcattagctcgaatgcgaagtaaatagccgcataagtcagtatcaccaataaggccgtgcggaagagctgtgacctctgcgaaagttcccttaaactgaaaatggcaactaatccggcagccaactgcgtcagaatgaactcatgcggaaaacgcagggatatagagcagattaatatcgtaatgacatgcgtcaggaaggcagttcgtgaatcgaggaaaacccgtatgatgatgggcagcatcgcatacggaatcatatatacattaaatatattatgtgataccatgaaagctgttaccacactataaaatacaatcagtgtaaacagtaacgacaggctgcctttgcgctcataataatcttttcggaacaggtcgagatagagcataaagcaaagcatcagcataccgacaaacaaaatctgcccgccaagaatcaagcggctctgatcaatggattcactgcgcttgatagactctttgcgtaatgattccagaatattgtacgtttccggactgatgatttctccacggtctataattttctgcccgctgacgactaatccgttggcccaggaatagttgttcagcatttcctctttggcggtctgtgtccgttgctggtcgaatgtgagattgggagtgatgtattcgtttaaagaacattgtctcagaatctcacggttgaagtgggtcgtatctgcggatagcaagtactcataagcttttttgaccgtatatatatgatcggtaggcttggagtttgcgagcttgtcgtcgataatcatgatcgccgaagtgctgtccttgtggagttcttgtatgttttctgtcgaaacgatgccctctccgtatatttcttttaatgtccgttcgatgtatcgcagataatctacggaaggaagtatacctttcaggtgagtatggtaattctctttcagcttggcgattgcgtctttctctacttgtttgttaagcagataataaggttggaaggaagccagcagactatcctgttcccggttcaccactgcgtcgtctttatagatcggaaagtcaaaagtggctatcaactgcccgtacttccagggcttgtttatgtcaaactgatagttgaattttccgtcacgtggcaggaaatagacaatcagtgtcactgtcgctacaaacagcaatgatttatataatatatctcttcttgagaacctctttttcttcttcatatgttccatacgcattgaaatttttgcgaaaagtacaaaaaaaaacaatagtgtggaaaaaaaggtttaattttgccacgatttacctatactaacccaaattatggcagaaagaaaagtaagagttcgttttgctccgagtcctacgggagcattgcacatcggtggtgtgcgtacagctttgtataattatctatttgcgcgtcaacacggcggagacctcattttccgtattgaagatactgactccaaccggttcgtgccgggagcggaagagtatatacttgagtcattcaagtggttgggtatccactttgacgaaggagtgagcttcggtggagaacacggcccgtaccgtcagtccgaacgtcgcgaaatctataagaaatacgtgcagattttgttggataatgacaaggcatacatcgcttttgatactcccgaggaactggacgctaagcgtgcggaaattgctaacttccaatatgatgcatcgacccgcgggatgatgcgcaattctctgacaatgtcgaaagaagaagtggacgcattgattgctgaaggaaagcaatatgtggttcgctttaagatcgagccgaacgaggatgttcacgtgaatgacttgattcgtggcgaagttgttattaattcatctattctggatgacaaggtgctttataaatcggctgacgaactgcctacttatcatctcgcaaacattgtggatgaccatttgatggaagtgtctcatgtaatccgtggcgaagaatggttgccttcggcaccgctgcatgtacttttgtaccgtgcattcggctgggaagacacgatgccggaatttgcccacttgcctttgctgctgaagccggaaggaaacggtaaactaagtaagcgtgacggtgaccgtttgggattccctgtattcccgttggaatggcgtccggaattgggggaagtgtcttccggatatcgtgaatcgggttatttgcccgaagcagtgattaacttcctggctttgttgggatggaatccgggcaacgatcaggaagtgatgtctatggacgagatgataaaactgttcgacattcatcgttgcagcaagtccggagctaagttcgattacaaaaaaggtatttggttcaatcatcagtatatccagcttaaaccgaatgaagaaattgccgaactgtttttgcctgtgctgaaagagcatggggtagaggctcctttcgagaaggtcgttacggtagtcggcatgatgaaagaccgtgtaagttttatcaaggaactgtgggatgtatgtagcttcttctttgtggctcctgctgaatatgatgaaaagacagtgaagaaacgctggaaagaagactcggcaaaatgtatgactgagttggcggaagtaattgccggcatcgaggatttcagcattgaaggccaggagagagtagtgatggactggattgctgaaaaaggttaccatacaggtaatataatgaatgccttccgtctgacactggtgggcgaaggtaaaggtccgcatatgttcgatatttcctgggtattgggtaaggaagagacattggctcgtatgaagcgtgccgtagaggtacttaaataattaggatttgtaaattatgctttacaatctggcaatagttgtttatgaccttttggttcattttgctgctccgttcagccgtaagccccgaaaaatgatgaaagggcattgggtggtgtatgaacttctacgacagcaagtggagaaaggggagcagtatatttggtttcatgctgcttcgcttggcgagtttgaacaagggcgtccattaatagaaatgatcagggaaaaatatcccgattataagatattgcttacatttttctctccgtccggttacgaagtgcgcaagcattaccggggagcggacattgtctgctatctgccgtttgataaaccgcggaatgtgaagaagttcctggatatcgcaaccccgtgcatggcattctttatcaagtacgaattttggaagaattacctggatgagcttcataagcgtcgcatcccggtgtatagtgtttcttccattttccgtcgcgatcagatattctttaaatggtatggtgggacttatcgcaatgtgctgaaggatttcgatcatttgtttgtgcagaatgaggcttccaaacgctatttgtcgaagattggcattagtcgtgtgacagtggtgggagatacccgtttcgaccgtgtgttgcagattcgggaagaggccaaagatctcccattggtgaaaatgtttaaaggagacaatgcttttacgtttgtagccggcagttcttggggaccggatgaagatttatttctggagtacttcaacacccatccggaaatgaagttgattatcgctccgcatgtgattgatgaaaatcatctggtggagattatcagtaaactgaaacgtccttatgtacgctatactcgtgctgatgaaaagaatgtactgaaagttgattgcttgattatcgattgcttcggactgttatcttctatttaccgctatggagaagtggcttatatcggaggtggttttggcgtcggtattcataatacactggaagctgctgtatatggcattcctgttatcttcggaccgaaatatcagaagtttatggaagcaatccggttgctcgaagctaaaggcgcatactctattaaagactataacgagttgaaaaccttgttggaccgtttccggacagatgacgttttcatgcgtgagaccggcgcgaatgccggttattatgtgaccagtaatgccggagctacggagaagattatgcacatgattaacttttagagatggataaagttgcttcaagtcttcagaataaataatttgaaatagataaatggagcggcttcattaatgaactgaagtttgatataaagaatatagatccccttattttagaactcctgttgtggacgaagctaaaataggggatctttttatgaatctattttttctttatttataccattgggaatacatcaggtaattgtgagcgattttttggtttagttcctttgcctgttccgggtctaccttcttgataaatttagccggtacccctccccagatacttccgggttcgatcactgtattgctcaagaccaaagaaccggcggcaacgatggccccttcgcctattacggcatgatccagtatagtagatcccatcccgataagtgcataatctttgacggttgctccgtgaatcgtcacattatgtcctacggaaacatgatcaccaatttcgatggttgacttctcgtataaagtatgtagcacgcttccatcctgaatattgactccattacctatccgtatggaattaacgtcaccgcgcaatactgtacaaaaccagatgctacagtcatttcctatttttacatctcctatgatggttgcattatctgcgagaaaacagttctctccaatttcgggggtaaagccccgcactgatttgattaaagccataaattatattgtttctaatgatgtttttattgaatatgattggggattgttcgacacccgggtctcgtgatgtctgacacccggatctcagactgcctgacacccgggtgttaagcagcctgacatccgggtgtcagacaaaagctgttttaaatagcttttgttgcttctagcagccatttcttttcttcttcgttcagacttggagaaagttttttgtaaacggtttgatggtagtcattgaaccacttgacttcttctgctgtcagcatttctttgatgataccttttttgcaaatcgggcatagggtgatcgtctcaaatttgaaatattctccgaacatgccttccttatctttgcagaccaatgtcagattctcggtgcgtatcccgtggctgcctgccttataaacaccaggttcattggatgtaaccataccgggttgcagcacaatgggattttcgttcatacggatactttgcggaccttcgtgtacgctcagaaaatgtcctacgccatgtccggtaccatgaaggaagttcatgccatgactccagataggcatacgggccaatacatcgagttgagcgccgcgtgttccggctgggaatttagccattgccaatgcaatatggccttttaatattaaggtatagtctgttttttcttcctccgtcagttcgcctaatgcaatggtacgggtgatgtcagttgttccatccagatactgcgctcccgaatctaacagcaagaaacctttagactgaagcgtgacatcactctcctccgttgcggaatagtgtacgattgctccatgctctttatatccggcgattgtgtcaaaactttctcccatatacaaaggttgggctgctctgaactcatgcagcttccggtctacgctcagttcggtctctttgcccgaaagcactgatgcttccagccatttgagaaacttgacaagcgccacgccatcccgctgcattgcgtgatggatgccggcaatctcctgctcattgcgaatggctttcagtaatgtcacaggagattctccacgaacgaccttacatgctggattgatagccgaataaatcgcatagttcgttttctttgggtcgataagtatgttttctcctgcaaaagaattcaggaaagattcagcttcgtcatattttctcaggctgacttgctgctcttgcaagtattcatttacctcttgggtaatcttttccggcgaaatgaagtagactacttcatcttgagtaaccagtagataacttactataaccggattgcaatgcacatcacttcctctcagattgagagtccatgctatttcgtccagactggataaaaataaagcaaagatgcctttctttttcagctcggtacgaatggcggcaactttttctccacaactttttcctgcatatttaacatcgtagataaaagccggagcatcaggcatggatggacggtccttccaaatgtttttcagtggatcgccaaacagattgacctgtaactgatagggggcaagatcttctttcatttgttccacctgttgcacggaaaacattttcccatcaatactcacagattctcccggctttagattctgacagaggaactttgtgatactaggagtttccggcagcatctctttatataatgtaatgccgctgccttccagttccttttccgcttgcaggaaataacgggaatctgtccatagtccggctttatccattaagatgacggctgttccggcggaacccgtgaaaccggaaatccattcacgggacatccaataaggagctacatactcactcaggtgaggatcggtgctgggaatgatgaacgctttgatattgttagggcggaatgtcatccgtagtgcgtgtatacgctcttttatgctctgcttcataccttattatgttatttatagacatatttatgagtctcaaaggtactaacttttcgcggttaatgatttgtttatgaatagtttttgagaaatatttgccgaaagttttgtgaataaagaaagtatgtgtaattttgcggcgcaatttgactgcggaaatttttaaccaataacatattaataataacaaaatgattgtagtacctgtaaaagaaggcgaaaacattgaaaaagcgctgaagaagtttaaaagaaaatttgagaaaactggcatcgtgaaagaattaagaagcagacagcaatttgataaaccgtctgtaactaaaagacttaagaaagagcgtgcagtttatgtacaacaacttcagcaagtagaagattaataattcgtaatttcctttgaattattgaattcttttcatacattcgttgcacgattttagatgtagcgatattatgttaattaaatcttttcttgattacctccggtatgagcggaattattccgaaaaaaccgttctggcgtatggcgaggatataaagcaactacaggagtttgctcaggaagagtacggaaagtttgatccgttggaagtggaaggtgaactgattcgtgaatggattgtttcattaatggacaggggatatacttcaacttctgtaaatcgaaagctaagttcgctccggtcgttctataagtatcttttaaggcaaggagaggtgaccgtagatccgttacgaaaaataacaggacctaagaataagaaaccgttacctgtctttctgaaagagagcgaaatggataagttgctggatgatacggattttggcgaaggatttaaaggttgtcgtgatcggttgattattgaaatgttttatgctacaggcatgagactatcggaattgataggtctggatgataaggatgtggatttttctgcttctcttttgaaagtaaccgggaaaagaaacaagcaacggctaataccgttcggtgatgaactgaaagagttgatgcttgaatatattaatgtaagaaacgaagcgattccggaaaggtcgaaggctttctttattaaagaggatggcggacggctttataagaatctagtctataatttagtgaaacggaacctgtcaaaggtggcgacgttgaaaaaaagaagtcctcacgtgctgaggcatacttttgctaccacaatgctgaataatgatgcagaattgggtgcggtaaaagaacttttgggtcacgagagtattgcaactaccgagatctatgcgcatgctacatttgaagaacttaaaaaagtgtataaacaagctcatccaagagcttaaaaaaaaggaggtaagtatggatattagaattcaatcaattcactttgatgcgtcagagcaattgcaggcatttattcagaagaaagtgtctaagttggaaaaatattacgaagatataaagaaagtagaggtgtcattaaaggtagttaagccggaagctgctgaaaataaagaggcgggcataaagattcttattcctaatggtgagttttatgcaagtaaagtgtgcgatacattcgaggaagcagttgatttggatgtggaagcacttgaaaaacaactggtgaaatacaaggaaaaacagcgtagcaaataaaaaaatcgcaaatattttgcgggaaagaaataaataactaaatttgcagccgtttcgctcgcgttagaacgtgacggttgcattttttagctagaatgcctctttagctcagttggccagagcacgtgatttgtaatctcggggtcgttggttcgaatccgacaagaggctccaaggatgaatgaggatcatccgattttagcgaaagggatgacggcagtcaattcggttcgcatggcggggaagaattagaagaagaactgagaataaaacatctatgttcagagtattgttcgctatttgattttaattctttgtttgaaatattaagggcaaataccagagtggccaaatggggcagactgtaaatctgctgtctttcgacttcggtggttcgaatccatctttgcccacaatcagagtgacaactttggcaagaatgcggaagtagctcagttgatagagcattagccttccaagctgagggtcgcgggtttgagccccgtcttccgct

SEQ ID NO: 4536 - DNA, 79585 bp, Unknown
  gut microbiota DNA sequence
tgtttccgcaatccccgtagtgcttcgaataaatcttcgttttctccaccggggataccgaaaggaagttcttttgcgatgaccaccttcttctttttcccttttcctgtgacgatttcttcccgatgaatcacggcaagcattgctttcgcttttccaaaaagaatgttacttccgcttggagtgattttgagatggttattttcattgtaggctatttcgaaatagcctagttgtagcatttgaagtaaataatcctgccaatcacgaggtggtatgtctcttcctgcgccaaacgtctttaattcctgatatccttttgccgtaatttctgccgaataacttccacgaagaatatcaattaatatccctgtacttatttgttgttctgcacgagctatggcgctcaacgctttttgtacgatgactgtaccgtcaaagcgttgtggagggtttttacagacatcacagttgccacaatcttctgttgaggtttctccgaaatagctcagcaggattcttctgcggcagatgtccgcttctgcgtattgctgcatacgttgcaacttttccagattgattgtctgttggttgctttctgtggcgaatttagttaacaggatcagatcgcccagtgaatagaacaatacagtatcgcttggtaagccatcccgtccggcacgcccgatttcctgataaaaactttcaatacttttaggaagattataatgaataacccatcggacattcgatttgtcaattcccataccaaaagcaatggtggcgcatactacctgaatacggtcattaatgaagtcattctgagtctcgtcccgatgctgcggagacaatccggcatggtagacaccgcatcggattccctgcttttgcagcatttgtgctacagtttccgttttattacggctcatacaataaatgattccactttcttctctgtggcgatggataaactccagaatcgctttattcttctcttttgcctgaaaaccgcgttttacgtccaggctgatgttgggacggtcgaaagaagaaataaacgtccggggctgtatcagatgcaactgtcggattatatcctcacgggttattttgtcggctgttgccgttaatgcaataatcggtacctgcggaaattgctgatggagcattcccatttgtgtatattcaggacggaagtcatgcccccattgggaaatacagtgggcttcgtcaattgcgaagagcgaaatactcatatcccgcaacagatagtccttttccgctatcagcttctccggtgaaatataaagcagtttcaggcgtccttcgatacaggcacggcggagattggcattttccgtttcgtcattgctgctgttgagtgctcctgctgcgatgccgttggcttgcaatgtttctacctggtctttcatcagtgagataagcggggagaccactacagccgttccttcagaaagcaatgcaggtagttgataacagatcgatttacctcctccggtgggcatcagtaccagtgaatcctgcttgttcaacaggtggcggatgatttcttcctgtaagggtcggaagctgtcataaccgaaatatgattttagagtttctttcatcaacatttgtttaaactttgtggcaaaggtacgcttttctttagcaatctttatcatgtctcgatttctgttttgattttaatgccccaagagttaaagtttcttattatttacccttaattcctctttttcaaggtttttgattgttttattagaaaaaaaatgcacaaaataattgtgtgttttaaaaaaaagtaagacatttgtaacatgtaacgttgcgaatgagcaattaataacaaataaacaaaccctaaccagttaattcaatgagtgatttagagaacaaaaaagcggaggaagctccaaagaaacgtccctacaatttgagggaaaagaaagaaaagaaggctgcatatcggtcattaatcagaccggaactggcagacgagttgtatgacaagattctgaacattgtagtagttcagaagaagtataaagatcctgactattcagctaaagatttggctaaagagttgaagaccaatactcgctacctttctgcagtagtgaattctcgttttggtatgaactactcttgtttgttgaatgagtacagagtgaaagacgctctgcatttgttgacagacaagcgttatgccgacaagaatgtggaagaaatcagtgcaatggttggctttgcaaatcgtcaatctttttacgctgcattttacaagaacgtaggtgaaactcctaacggatatcgcaagaaacacgctgaaagtaagaagtaattgcgttttccgatactgaccaaaaggaattacctctgaatgaaaagtttggggataattccttttcttatttaattaatcaatatcagtaattatgaaaaaacattttatttcgatggcagttaccgctacgatccttgcatcctgcggtggggccaaaacaacaactgctgaggcagataaatttgattatacagtggaacaatttgcagacttacaaatattgcggtacaaggttcccgaattcgaaaccttgacgctgaaacagaaagaactggtttattacttgactcaggctgcgctggaaggacgcgacatcctgtttgatcagaacggaaagtataacctgagaatccgtcggatgctcgaagccgtttacaccaattataaaggagacaagtcggctcccgacttcaaaaatatggaagtgtacctcaaacgggtatggttctccaatggtattcatcatcattacggcatggaaaagtttgtgcccggtttctcgcaggacttcttgaaacaggcagtgctcggaacggacgcccaattacttccgttatcagaaggacagactgccgaacaactctgtgatgagctcttcccggttatgtttgatccggctatcctggcaaagcgtgtaaatcaggcggacggtgaagacttggtgctgacttctgcctgcaattattacgacggagtcactcagcaggaagcggaaagcttctacggagcaatgaaagacccaaaagatgaaactccggtttcttacggactcaacagccgattggtgaaagaagatgggaaaatacaggaaaaagtctggaaggtaggcggactttatactcaggcgattgaaaagattgtgtactggttgaagaaagcggaaactgttgccgaaaatgatgcacagaaagctgtgatcagcaaactgattcaattttacgaaacaggcagcctgaaagacttcgatgaatatgctatcctttgggtgaaagaccttgattcaagaattgacttcgttaatggctttacagaaagttacggcgatccgctgggagtgaaagccagctgggaatcactggtcaacttcaaagacttggatgctacgcaccgcacagagattatcagcagcaatgcgcaatggttcgaagatcattcgccggttgataaatctttcaaaaaggaaaaggtaaaaggggtatctgccaaggtgatcactgccgctattcttgccggcgacttatatcctgcaactgccatcggtatcaatcttccgaacgctaactggattcgtgcccatcacggctctaagtcagttactatcggcaatatcacagatgcttataataaagctgcccacggtaacggattcaatgaagagtttgtctgcaatgacgaagagagacagcggatcgaccaatatggcgacctgacaggtgaacttcatacagacttacatgaatgtctgggacatggttcgggcaaattgcttccgggagtagaccctgacgctttgaaagcgtatggttccactatagaagaagcacgtgccgacctgttcggattgtattatgtggccgacccgaaactggtggaactgaaacttgttccggatgcagaggcttataaagctgaatattatactttcctgatgaacggtctgatgactcagcttgtacgtatcgaaccgggaaataatatcgaagaagctcatatgcgcaaccgccagctgattgcccgctgggtatttgagaaaggtgctcctgacaaagtggtcgaaatggtgaagaaggacggaaagacctatgttgtagtcaatgattatgagaaagtccgtcagttgtttggtgaactgctggctgaaatccagcgaatcaaatcgaccggtgattttgagggtgcccgtacattggtcgaaaattatgccgtgaaggttgatcctgctttgcacgccgaagtgttggcacgctataagaaactgaatctggctccttacaaaggttttataaatccggtttatgaactggtgactgacaaggatggaaatatcacggacgttaccgtgtcttatgatgaagactatgtagaacaaatgttgcgctacagcaaagattattctccgttgccttccgtaaataattaatattgaaaatggatataaaagaacaactgaaggatatcaaaacacagctccgtctctctatgaacggggctgtgtcccaaagtatgcgtgagaagggattggtatacaaactcaatttcggagtcgaaatcccccgcataaagatgattgtcgaagggtatgaaaagaaccatgacctggcgcaggcattgtggaaagaagacattcgcgaatgcaaaatcatggcagccatgttgcagcctgtggataccttttatcccgaaatagctgatatctgggtagaaagtatccgtaacatagagattgcggaactgacctgtatgaatcttttccagcatttgccgtatgcccctgctaaatcttttcattggatggctgatgaacaggaatatgtgcagacttgcggtttcctgacggctgcccgtcttttgatgaaaaagggagatatgacagaaagagcctccggcgaattgctcgatcaggcactttgcgctgttcattcagaaagctatcatgtgcggaatgcagctcttctggctatccgtaagtatatgcagcataacgaagaacacgctttccgtgtttgccggatggttgaaggaatggcagattccacagtggaagcggagcagatgctctataatatggtaaaagaagaagtggagaataagtaataggtaataagtaataggtaataccatgcgggcattcgccggatggaattttaagtaactacggttattacctattacctattacttattacttatttcccaaaattcttttgctttccacaaaaaaggcttaactttgttcgcgctaattttgtgctgatgatggaaactcaaaatgtgaaagatacagtaaggcagatattcacagaatatctcacggcgaacgggcatcggaagactcccgaacgttacgccatactcgaaactatctattccatcgacggacacttcgatatcgatatgctctattcacggatgatggatcaggagaatttccgggtgagccgggcgactctttataatactatcattctgctgatcaatgcacggctgatcatcaagcatcagttcggcacttcctcccaatacgaaaaatcatacaatcgcgagacgcatcatcatcagatatgtactcaatgtggtaaagtgactgagtttcagaacgaggaattgcagcatgccatcgaaaatacaaaattaagccgctttcaactttcgcattactccttatatatatatggattgtgcagcaagtgcgacagagctaataaacggaaaaaagtcagtaacaacaataaaaaagaaaaatgaaagtagatgttctattaggattacaatggggcgacgaaggtaaaggcaaagtagtcgacgtattaacacctaagtacgatgtggtcgctcgttttcagggcggtccgaatgccggtcatacacttgagttcgaaggacagaagtatgtacttcgttctattccttccggtatttttcagggagataaggtaaatattatcggtaacggtgtagtgctcgatccggcattgttcaaagcggaagctgaggcactcgaagcatcgggacacccattgaaagagcgtttgcacatttctaagaaagctcatctcatccttccgacacaccgcatattggacgctgcttacgaagcagccaagggagatgcgaaagtaggaacaaccggtaaaggcattggccctacttatacggataaagttagccgtaacggtgttcgtgtaggtgatatccttcataatttcgaacagaaatacggtgcggcgaaagctcgtcacgaacaaatactgaagagtctgaactacgaatatgacctcacagaactggaaaaagcatggatggaaggtatcgaatatctgaaacagttccattttgtagacagtgagcatgaggttaacaattatctgaaagacggcaagagcgttctttgcgaaggtgctcagggaacgatgcttgatatcgatttcggttcgtatccgtttgttacttcttccaatacggtttgtgcaggtgcctgcaccggtctgggagtagctccgaaccgtattggcgaagtgttcggtatcttcaaggcatactgtactcgtgtaggtgccggtccgttcccgacagaactgttcgacgagactggtgacaagatgtgtacattgggacatgaattcggttctgtaacaggacgtaaacgccgttgcggatggattgacctggtagctctgaaatattccgttatgataaacggtgttaccaaactgatcatgatgaagagcgacgtgctcgatacattcgataccatcaaggcttgtgttgcttataaggtagatggcgaggaaattgattatttcccatatgatatcactgaaggtgtggagcctgtatatgcagaactgccgggctggaagacagatatgacaaagatgcagagcgaagatgaattcccggaagaattcaatgcttatctgactttcctggaagaacaacttggtgtggaaatcaagattgtatctgtcggaccggacagagcccagacaatcgaacgttatactgaagaataagaaatgttattctattcctagaataactttgttctataacttaatgagaggcggagaaatggaaatgactccgcctttttgttttctctttacccccaatattaactataacgcattatgaaaacacatttcatcactttcctattattagtaggtatgagtctgggaatctcctcccggctccacgcacagtattcttaccagcctggtgaagaaaacctcaaagcccgtgaagaatttcaggataataaattcggtattttccttcattggggactgtatgccatgcttgccaccggtgagtggactatgacaaataataatctgaattataaagagtatgccaaactggcaggcggtttctatccctccaagtttgatgcggataagtgggtggctgccatcaaagcatcgggagctaaatatatctgtctgacttcccgccatcatgacggcttctccatgttcgatacccaatattcggacttcaatatcgtgaaggcaactccctttaagcgggatatcatcaaggagctggcagcagcctgtagcaaacagggaatcaaacttcatttctattattctcatcttgactggacgcgggaagattatccttggggacgtacaggacggggtacaggacgttcgaatccgcaaggagactggaaaagctattatcagttcatgaacaatcagctgacggaactgctgactaattatgggccggtaggagccatttggtttgacggatggtgggatcaggatggaaaccccggctttaactgggaattgccggaacaatatgccatgatccataaactacagccgggctgcctgataggaaataaccatcatcagactccttttgccggtgaagacattcagatattcgaacgtgacctgcccggagaaaataccgcaggactttccggacaaagtgtaagtcacctgcccttggaaacctgcgaaacgatgaatggtatgtggggatataagattacggatcagaattataaatcaacgaagacactgattcattatctggtaaaggcagccggaaagaatgcgaacctgttgatgaatatcggccctcagcccgacggagagcttccggaagtagccgtacagcggttgaaagaaatgggagagtggatgaatcaatatggtgaaacgatttatggaacccgtggcggtgcggttgctccgcatgattggggagtgacgacgcagaaaggaaacaagctgtatgtgcatattctgaatttgcaggataaagccctgttcctgcctttggcagataagaaggtgaagaaggcagtactgtttaagaacggcacacctgtccgattcactaaaaataaagaaggcgtgttgctggagtttacagagataccaaaagatattgattacgttgtagaacttacaattgactaatttttagctaattcttcataaaagcatagggaaactatcgttacatacgtagtttccctttatttttggcaaacaatttgtttatatagatatagagtaataattaaaatgaaaagtatatgatgtcttattgggtattatttattggtattgccgtagcaagttggttggtacagatgaatttgcagaacaaattcaagaagtattccaaaattccgacaggaaacggtatgacaggacgcgacgtagctctgaagatgctgcacgacaatggaatttacgatgtacaagtaactcatacacccggtcagctgaccgaccactacaatcctgctaacaaaacagtgaatctgagtgaaggtgtatacgaaagtaatagtatcatggcggctgccgtagcggcacacgaatgtggacacgctgttcagcatgcacgtatgtatgctccgttgaaaatgcgcagcgccttggtgccggtagtgaatttttcgtcctctatcatgacttgggtattgctgggcggtattctgctgttcaactccttcccgcaattattgtggatcggtatcattctgtttgctaccactactttgttcagctttatcaccttgccggtggaaatcaatgcaagtaagcgcgcgcttgtgtggctgagttcatccggcattactaattcatacaatcatacgcaagccgaagacgctcttcgctctgctgcatacacctatgtagttgctgcactgggttcattggctacgctgatctattacattatgattgctatgggcagaagagactaagagataagattaatcgttttgacgcctccatcgttttcaaaaactatggaggcgttctttttttattgatgttttttttagatatatgcaagcgttgctcggaaatttgcagtaaatttgcgcaattaaaatactaaacagtaattatatcatggcagcaaaaccaagtattcctaaaggaactcgtgacttttcgccggtagaaatggcgaagcgtaattatatattcaatacgattcgtgacgtatatcatctgtatggtttccagcagatagaaactccgtcgatggagatgctttctacactgatggggaaatatggcgatgagggtgacaaacttctatttaagattcagaactccggagattatttttccggcatcacggatgaagagttattgagtcgtaatgctgttaagctggcaagcaaattctgtgagaaaggtttgcgctatgacttgacagtgccttttgcccgttacgtggtgatgcaccgcgatgaaataactttcccgttcaagcgttatcagatacagccggtatggcgtgcagaccgtccgcagaaaggacgttaccgtgagttctatcaatgcgacgccgatgttgtcggcagtgattcactgctgaatgaagtagaactgatgcagattgtcgatacagtattcagccgtttcaacatccgtgtgtgtattaagatcaataaccgcaagattctttccggtatcgctgagattatcggtgaagcggataagattgtagatatcacagtggctattgacaaactggataagattggtctggagaacgtcaatgcggaactgaaagagaaaggaatcagtgatgaggcgattgccaaattgcagccgatcattctgctgagcggaaccaatactgaaaagctggctacactaaagagcgtgctggcagccagtgagacaggcatgaaaggagtcgaagaaagcgaatttattctgggcacattggaaacaatgggcttgaaaaatgaaatcgaacttgacttgacgctggctcgcggattgaattattataccggtgctatcttcgaagtgaaagcgctggatgtgcagatcggcagtatcaccggtggcggtcgctatgacaacctgacaggagtattcggtatggccggtgtgtcgggagtcggcatttcttttggtgcagaccgtattttcgatgtattgaatcaactggaactttatccgaaggaagcagtgaacggtacggaattgatgttcgtaaactttggtgataaagaagcttctttctccatgagtatgctggcaaaagttcgtgcggcaggtatccgtgcggaaatcttcccggatgcggcaaagatgaagaagcagatgagctatgccaatgccaagagtgttccgttcgtagctatcgtaggagagaacgaaatgaatgaaggcaaagcaatgctgaagaatatggaaaccggcgaacagaatcttgtttcggtggaagaactgatagctgctttgcgcaactaaaagcagggtatagagtaagaatatccgcttttccggtgaagtacttgacaaatgactttttatgttgtatctttgagaaaagaaaaggcataaataagatgaatgtaataagaaaaatagatacataaatatcacctttatactgttacttataagtatcagaagaacttggaatggggcaatgatcagatgattattgccccattttgtcgttaattatgcctgctacatttcgtctcttacttaaaaagggacgaatatcgtttttaataaacttggataccgtttataataaacgtgcgataagtttattataaacagaatccgtgtttattaaaggccgtttttgtttttgtaaagatataaggatgcggtttcgaatgaaaactgactatcggaaactatatagaatgaaatggtaattatatgtaacaattacttttggggatcatattctcggaaggcttaattctacttcttaattaaaaactttggatattagtttttagattagactgaaaaggtaaggagaaccggacagtaatttctatctttgtgcatacattaaatcgttagcaaatatatgaaaaacgacaaactccaaagtagtatgaaaacaataaaaaacacgttttttctaggcatagtctgtgccgccagtgttgtttcttcagtagctcatgaactcgaagcaaatgagaaataccccgggaagtcggtgaaggcacagacaagaaaagagattgttacgttcttttctgaatctctttccggtaagacaaccacttttgacgcaggaaaaccgttgaaactgtcagaagtagaacactatcgtgatgtcgtatggcagttgtggaaagaggcaaatgatggttttaaagaagaaaaattaatagctttggatacactctcatccgcttctaccggctattgggaacttcctgatagtttggaaccaaatgcagtgatgccctattactggggaatgaaagggacagatgaaacaggaaatgaacttccattattcctctatctgcatggttcgggacccaaagagcgggaatggagtaccggattgaatatttgccggaattttgatgatgctccttccgtttactttattccacagattccgaacgaaggcgagtactatcgttggtggcagaaagctaaacagtttgcctgggagaaattgctgcgacaatccttactcttgggaaagattgatcccaacagagtgtatgtttttggaatctcggaaggcggatatggcagtcagcgtctggcctcattttatgctgattattgggctgctgcgggaccgatggcaggaggggaacctttaaagaatgctcctgcggagaattgtagtaatattgctttttctttgcggacaggagataaggataccggattctaccggaatacactgaccggatatgtacgggaagcattcgatagtttggcgcatcagcatcccggctatttcactcacaagatagaactgattcccggaatggggcatagtattgattatcgtccgacgactccctggctgaagcaatatgtccgtaatccttatcccaaatatgtaagctgggagaattttgaaatggacggactctaccggaaaggattttataatctgtatgtgaaggaaagatccgatgaagaggggaagtcgcgtacttattatgaaatgagtatttcgggaaatcatatttcattgaaagtcgatgatgttgtttatgaagccacggagaaggatcaacgatggggaatagagatgaagtttgcgaagaaatatgcgcaggcgcataaagggaaagtggtcatttatctctgcgacgagctggtcgatttaactgaaaaggtgactctgacggtgaatggcaaaaaggttttcgagggaaaagtaaaggctgatttgaagaatatggttaatagctgtgcggtgttcttcgatccgcaacgactttatccggcagctatcgaggtagaattaaaatagatgagattgctcaaaaaaagtatccccggtcgtatatccaagaattactcttgtgtacgaccggggatacgtatttatcataaattataaatggcgttccggatacatttccttccaccattccggctgatcctgtagccaacgggcaaaccatgccatgatggaattatgccatttgattcgcttgtcataatcggagatgaaatggttttctccgtctacggtcacgaactctacagtcttgccaagtatcttcaatgcgttgaaaagctggatactttcaccgataggcacattggtatctaccgtaccgtgtagcagcagtaacggagtgtttatcttgtcggcgttgaacagggagccttgtttggtgaacaagtccgggtccttccacgggtaactgtcggctgcggcgatggcattgtaggaataaccccagtaaccttcaccccagtagctggtcacgtcactgattccggcgtgcgatacggcagcggcgaaaatatccgtctgcgtctgtaaatactgcgtcatgaatccgccataagaagcaccgagacatccgattttcttttcatccacaaacggatgctctttgcagaactgcttcgtgccttcgatgatgtcatctgctgtacgtttgccccacgcattgacgtggcgggcggagaattcctgtccgaagccaatcgttccgctaggctggatgacgtagaccacatagtcacgtgaagcgaataattgtgcgcaatacggattactgattccgcgggtagtcggagtcgtaccgccatagtaatatacaatcatcggatatttcttgttcggatcaaaattcggaggcaggcacatcttgccagtgatgacagttccgtcggaagcggtaaagttccacggctctgttttgcctaattctattttctccagaatcggtttcatcgggtcggcaagcaggctggaagtctttttcttcatgtcatagagataggccactccggcgttgtagtccgattgaccgatgtaagctgcgatgcccggattgtattcggacaaagcgaaagcgctggtaacatccgtttcgaggttcagcttctcaaattttccgtccttcggagaataacgatagatgtttttgcaatcgccatcgtccgtattgaaatagatgcacccatcgccatgattccattgcagagggctgactgtcggatgaaagtctttggtaatcggttgtatcttgcgggtactcagatccataataaaggcctgagtatcgaaatcattggcaatagggtgattgccacaattctttccgatgccgccgaacgcttcggggctgccggtcagcaatagctgcttgccgtcaggagagtagcccgcacctccgataaagcggtcttcatagaaaagagtatccactttcaacgtttccaaatctacttggtaaagtgaggacagagagaacggacgttgagtgatgttttctttggatgtactgtataacatgtattttccgtccggagaaatatcttgcagatatgtgctgtggttgccataggtcaggcgctcggagacaccgtcggccaggttgtatttcgcaaggaaactccgtccgcgggaattgggaatacggtctgcaggacttacgatgcggcggagaggaccatcttctttgactccttcttcgcggggatagtaaatcagaaaatcttcgttgggcgaccatctgaaactctgttcgggaatactttgcaaaatcgtttcttcgcggagtgtggcaggatcgagggtgattacgtcatttcctgtcagggcagttaccgtgtagtataacttgtcacttttaggcatccagctcatgccgtctctgagattggtcaggagtacttttccgctctttagttccgtcagttcgcaataagtgcgtgagcgtttggcggcgtggttatcccaataacgggtcagcagatactttccgctgggagagatggaaacagagatggcacggttgccataaactgtattgtcgagagaaaaacgcttctttgcttccggatctagattgcaggcgatatccttgaatttctcgtctttgatcagttcgcatttcagcgttggagccgctttgtcgtcggaagcagaaagcagtttgatgattatctcgtaatcccgctccggttcaaggctgagagcgatgtcacgtgatgagccggaggtgatgctgtcttctgccgcatcttttacttgcttggaggctccgtcaatgaagacttcccagcggacgggggaggtgattttcaacttccctttcaggaaacgttctgcacgaatctgagtcttaaccagataaagtttattgtctttatctgctttctcgaagctgagataccccgctgtgtccgcagtgagcgactgcatcggtgcatccggcaaatgtagtacgaccggggtctggagtaacatctttttggtgtgtttttctcctttaggattgatgctgtcgttcataatgggggtacgaacgctgatggcattccggactttgtactgtgtcagtcggtcttgtgcttgcatagtaacaccggttgccagaaagatggccaaagccatagttctctttttcatttgtttatgtctaaagttaataaatatttgattgcgtgactaatataagacaaatgcttgaagtctgcaaggttctgttctttttattttaatattctatttgattaagtatcccgttaaggaaagcgatagctactccgtaatttgtcatcggtacattttgtaaccttgctctttcgatgcggttcagcacatatttgcggttgaacatacaagcgccgcaatggattaccaaagaataaggagtaaggtcctgcgggaaatcagttcccgccacgatatctatcgataacttttctccaatccgctttcttaacagatgcggaagttttactctcccgatgtcttcggatagaggggcgtgtgtgcaggcttcggctatcagtacacgggaagattctgtcagacttccgatggctgaggcacttttcacatagtaccggatatctcctttataacctgcaaaaagaacagaaaaagaggtcagtctgctttcttcaggcttttgctcgtagactgttttaaagacttgtgagtctgtaataatcagtttaggagggcgggagagggcttgcaacgtttcctgtaacttatctgtggtgcagctcatgatcagacatttcttgtcgagcaattcccgcattgtctgtacttgtggcaaaataagcctccctttgggggcttgaatatcttgtggcatgaccagcaagacaagatctccttccgttaccaggctgcctgtgatactttgctgatcgaaatcttccggcaacttttccagaatggcttgtcgtatcagttcgacgcctgtcttctctttggcactgacaggaatcggctggcttccaaaagtctcctttatccggatggcaagggatgcggtgttcttccgtatatctgccttgttgatgagcagaatggtcgggatgttttttgccttgagttgttccagccaatgaagttcttcggtaaagtccggttctccggtttcctcggcagagccaccacctgcacaaagcagaagggcgatatcggttttctctacggctttccatgtgcgttcgatacgcctgtttcctagttcaccttcatcgtcaaatcccggagtatcaatgaacaggcaaggaccgataccgtgaatttccattgctttctgcacggagtcggtcgttgttccgggagtatcggaaacaagagcggtatcctgtccggtcagtgcattgatcagggaggattttccgctgttacgctttccgaagagggcgatgtggagccggttggcattgggggtgtggactaaattcataaatcaagcaattgttgtaacgttaattatccgcatggaaacttggcaggggcaccttgccccttaaaatctgaaatctctttttccttccgcaatatcttttaagttccggatggctatttctctgattttgggattcggaatccggtcggtctctttggctatcagcttcatacctttgattcgggtgtcttccgacgcataatcttcgaggtattctttcagagtcattaatgcattggggccgcagcagttggctatctgtcccgatttgactaaggatataaatcggtccccggtgcgtccttcccgatagcaagcggtgcagaagctggggatatatcctgattcgagcagccagttgaccacttcgtccagtgtccgggtgtcgcttacatcaaattgtgcggagttatcttccggaagttccgtttccgcatagccgcctacgctggtgcgggagccgccgctgatttgtgagataccgagttcaagtactttttcgcgggactcctgtgattcacgtgtggatataatcatgccggtgtaaggaaccgctatccggatgacagcaacaatcttgctgaatatatcatcggaaatcgcattgggaaaatcccccgcatcgatgtcgtccgccgaacagatgcgcggtacgctgatagtgtgcggacccacaccgaaacgggcttccagatgttctgcgtgcatcagtaatcctacgaagtcatagcgataggtattcagtccgaagagtactcccattcctacatcgtctatgccgccttccatggcgcggtccattgcttcggtatgataagcatagttacttttcggtccggtggggtggagagcttcgtagttctttttgtgataagtttcctgaaataggatatacgtgccgatgccggcatctttcaaccggcgatagttctcgacggtagtggcggcgatatttacgtttacacggcggatagccccattcttgtgtctgatactataaatggtccggatggattccagtatatactccagtgagttgagagtcggatgttcgccggcttcaagtgccagacgtttatgccccatatcctgcaaagcgattacttccttgcgtatttcttcctgcgtcagtttcttgcgggcgattgttttgtttttggcatgataagggcaatatacgcatccgtttacgcaatagttcgacaggtaaagcggtgcgaacataacgatacggttgccgtaaaacttctgtttgatttctttggcgagatggaagattcgttctatcaggtcaggttggtcgcattccagcagggtagctgcttcacggtgcgtcagtcccttgcaaagagcggctttttcgatcagctgttctatgaatgcgcggttgtctttgtgactccatgcatattcaagagtttccagaatctcttcatgatgaatgaattcttctgcttggggtgaatctactttatacatttctttattgtttgtaatcgcctctggagaaggagatttgataaccgatcttttccagctgctgttgcaatatgttgagtccttccgcagattccgctccgagggaggctttgttattatacagattgtactttttgcgttcttcctgtggcgacaaattgggcatgacaacattggcgcctgccagtattccctgttcccggccgtcgggagtgagggtagccagtgccgtagttgccggaatcagcgccgacggatgcatcagacggaagatggataataaaaggagcgtccgttccacggttccgctgggggactgggcaaaaggtgtgtcgcgatgagacaggaaggggccgataccaatcatttcggggcgaagctgttcgataaacagaatatcctgaatcaggtgttctatcgtctgtcccggactgccgaccattattccggtgcctgtctgatagccgatgtcctttaaatcccgtaagcattgcagacgatgctcgcatgacataccggcagggtgcagttgttgataatgttctttgtcataagtctcgtgacgcagcagatagcggttggcgcctgcctgaaagaaacgttcgtatgcttcccgtgacttttcaccgagtgacagtgttatggcgcaatcgggataactccggcgaatcgttgagactatatcctctatccgttcctctgtcagtgcggggtcttctcctccttgcagcacaaaggtacggaagccgagtccatacccttgcttgcagcaattcagtatattttctgtggataaccgataacgttccagattcggattccctttccggataccgcagtaatagcagttatttcgacaacagttactgacttcaatcagtccgcgaataaaaatccggtttccgaaatgacggagactgacttcttgcgcctgtttattgatatagcgcaatgattctccgtcacattcggtcagcagttgccggaattcttccggtcggagtgtcctttcttctcgcagtttatctatccattgtctcatagctttctttccgcttgagcagctcttgtgctaattgacgacgtcctgaaacaatgtcgttgtgcgtactcggtccggtgatacagccaccttcgcaagccatcacttcgataaactgtcccgctgcttttcctgttttggcacaggcacgcagcaaggctatattttttttgttgatatccgacacttggatagcattgatcttgtccgcttcttctttcagatatgcttttacggctcccatcacaccaccggcttgtgcaaaaccatgtgcttcgcggacggaagtatgcagtatagagaaagaattcacctgttccagctgaatgtccattccatccaagatagaacctacttcctcgaatgtcaggatatagtctacagcatcgtcacggcgtacctcttttcgtttggctacgcatggaccgacaaatacaatcttcgcatccggatgtttctctttggcgattcgtgccgcataatacatcggtgatcctgtggtagaaacatacggtttcatttccgtcatgtgcttttctaccagttcaatgtaagaaggacagcaggaagtagtcatgaatttctgaccttcttccagtttttccagcagttcgtgtgcctcattgctggtggtcatcatggctccttcggctacttcgataatgtcggtgaatcctatttctttaaaggcgccgtatacctgttcgatagaagtcttgaactgtccgaggatggacggagcgatgatggctaccaatttttctcctttcttgatgtgttgcagtacatcaaaggtttgtgaaatctcaaagatagcaccgaacgggcaggcattcatacattttccacagtagatgcacttgctttcgtcaatatgttccacgccatgctcatctttgctgatagctttcaccggacaggattcttcgcaaggaacagggatatatacaatcgcgtgataaggacaactcttatggcagataccgcaactgacgcaagtatcatgatcaatcattgcctgaccgtttttcttgaaacgtattgcatccttagggcaattcatatagcagctgcgtgccacacatccccggcaaagattggtgatttcataattaatctgtacgcaggaagaacaggcttcgtcaatgacacacatgatattttccttacttggttccgggcggttcaatgccatccgtgcatattcggagagaggagttacttcgtcgtgttcgtccgtcatatccagtcccatcagcgggaaggtcttgtatctccatacagcacgttctttatgtacgcagcaacgccccagcggttttgatttgcgcggactcagctcaatagggagacggtcaattttttctactaactggtcgtttttccagagtctgacgagatcagccagcaatttatgccggacaatcataatattattagtaaaagccatatagtaattaaaagggttgttagtgggtgcaaagatagtaactagtttgcggataaactaataatcgttaaattgaatgtagcagattgttacattaatatttccggaaggataaaacagcctgtatgcaggagactatttccctccggttggttaaataaattcaatatttaaggtttttgaaacattcttgtcaattttttgtagcatttcggtgttatctttgtgaaacataaaataagagaggagaagagatatgagtagcagtatgttggaacaaagaagtcgttttgcgatgatcggtgcattaatgatcatcatcagcctgatgttttggtattatatggggagttcgctggttagtgctacaaagaagtacctcgagcaggtacagacaatagagatcacttgcgagtaaaaaacagatatttgtttgtatagagcgatagttatccggctaaaatcattacttttgccgcaagcaaaccaaataatgatggaagagaaagagaaggcctggaaaacagtaagtagcaaatatctgtttcgccgcccgtggttgacagtacgctgcgaagatatgctattgcctaatggaaaccacatccctgaatattatattcttgaatatcccgattgggtaaacacgatagcaataaccaaagacggcaaatttgtatttgtccgtcagtatcgtcctggattgggacgtacctcttatgagctctgtgccggagtttgtgataaagaggatgcttccccattagtttccgctcagcgcgaactgtgggaagagaccggatatggaaaaggaaactggcaggaatacatggtgatatctgccaatccgagtacgcataccaacctgactcattgctttctagctacggatgtcgaaccgatagatcatcaacatctggaagataccgaagatttgtctgtacatctgctgacttttgaagaagtgaaacaactgctggaaaacaatgagatcatgcagtcactcaacgccgcccccttatggaaatatgtggctgaacatgcggcagactttgaacaggaatctgtcgagaaggtggaacatgaaaaaacggaaaccatctcacaccgtatcaacgatttgctttattatcagaactcaatttcacgatctttgtcccgttttctgaaagatgaagaagtcgagacaggaatttatgagatattaaaagatattttggctttttatcgggcgggacgtgcctatattttcgagacggacgaagaaaatcatttttataactgtacctatgaagttgtagcggaaggagtaaaagcggaaataaataaattgcaggaaattccggtagacttcatgccgtggtggacatcacagatattgggcaagaagcctattttatttgaaacattaaagccgatgcctggaatggggcagggtgaatatgaggtgttgtcccgtcagggaattaaggctttgatggcgactccattggtagttaatgatcatgtctacggatttatgggagtagatttggtggatggttccgcttcatggtcggacgaagattatcgctggctgtcttctttggccaatgtaatcagtatttgccttgaactacgtagagcgaaagagaaagtaatcttcgaacaagcagctttggcacgcagtgaaagactcttcaaaaacatctttgccaatattcctgccggggtggagatttacgataaagaggggaatctggtggatttgaacgagagggatatggatattctgggaatttcagataagtcggaggtgatcggactcaatttctttgaaaacccgaatgtggatgcccagatacttgagagtatacgcaagagcagtattacggattttcgtgcccgttattcgttcgaatgtgcccgccacacggggtattatcgtccattgaaagccggtgtcatcgaactttatacaaaagtccgcaaattatatgataatcatggtaaccttaccggatatatccttattaatatggataatacggagcgtattgatgccttgaagcgtatttctgattttgagaatctgtttcttcttatatctgattatgccaaggtgggatatgccaaactcaatctgctgaatcgtcagggctatgccatcaagcaatggttcaagaatatgggagaggatgagaatacacctctttccgatgtagtcggtgtttactccaaaatgcatccggatgaccgttcccgtatgcttgctttttttgaagaagcaaagaaagggaaagcaaaagccttcaaaggtgagatgcgtattttgcgtcccggtacgaagaatgaatggaactgggtgcgtaccaatgtagtgctgaatctctatgagccggaaaaaggccaagtggaattgattggagtcaactacgatatcactgccttgaaagaaacggaagccaaactgatagaggcaaaagagaaagccgaagaatccgaccggttgaagtctgctttccttgccaatatgagtcatgagatacgcactccgctgaatgccatagtcggtttttccagcctgatggtggatacggaggatatggaggaaagacggcagtacatggatattgtggaagaaaacaatgacctgttattacaattgatttcagatattcttgacttatcgaagattgaggcgggaacattcgatttcaccgaacgtgagttggacgtaaatctgctttgtgaagatattgttctcgctatgagaatgaaggccaggccgaacgtggaaatcctttttgaccgccatctgccggaatgtcgcatcatgagtgaccgcaatcgtttacatcaggttatttctaactttgtaaacaatgcgattaaattcacggaagaaggaaatatacgggtaggctatgatcagcttgatgaggctcatctgcgtttctacgttgccgatacaggcattggcattgagccggaaatgcagaacgagatttttgagcgtttcgtcaaactgaattcctttgtacatggcacaggactcggactttccatttgccgcagtattgtggaacaactgggtggcgagattggcgtagatagcgaaccggagaaagggtcttgcttctggtttaccctgccgataaagtaaagtcgttattcctttgtgcggttagtccgtgcaactctttctgataaaggctgtttagagtgccggcatggggacactgacattttttaagatgtcgctttgagccagatagctgctattattggcatagataaacataacactgccatctttaattgtattaatgatgggcttggctagttttgtcgggagggcaggacatcccagacttctccccaaacgtcccgaggcggctactgtcggattggcgtatgaagccccgtgcacgacgatggaacgttcttttgctttgtcattgattcctttttcgagtccgtttaggatgagtgagtagccgtttccgccttggtaagtgttttcagtgagataaaatcccaatgaacttttataagagccgttttggttggaaaaagaagtggcatagttccctccactgtttcgtccgtgtgagactactgatgaaaacagcagttgtttcttctccatatcgaagacaaaaaaacgtttttcggtagacggctttgagaagtcaatcagcgtcagaatcggtttactcttctccttgatgcggttgtaaccggcgacagcctgacggaatgcaatgaaattgacaattccacccaactccatttcttcaaagagttgttcgccggcagctaattcggacacaggagtcggagagtcagatgcaggaacggccattgtgtcgactgaaacatggctgaatggaatgaaaaggaatgataaaaataatataactttctgaagcatagggcttaagcttgaaataaaatcgcggtaaagatagggatttttattccaaaacaaaaataatcgtctcattaacaggtgcccagtcgaaaataaatttggcatgggaagttgcgttccgtacacacatatgtgatcggggagtggttcccagtgaccagctgtattctatctgtgtctttcggggctcattgacaggtactccgtgaatgtaggccccgtccgtgaagcggctggcgtaaggcgcataacctcctgtctctttcgagccgtctttcagaaatatcattttcaccttcttttcctgcagtacgaacattcctaaaggggtttcctgcgcatacggcggtcggtgaagtccggtagtagaagggttcatactgcgtactacccatttccctttttccgtgcgttccagtgcggtaatattctgattatggcggtccacaaagatggctttattgaaaaccaccgtatctccgatcactttgacatactttttaggaatcatccattcgccttctgtaaatatcggttctgctttgacaaagttttctccgtcttcgatgaaacgcgtcagttcaccatcctgcccgtagcgttcgggggttaccgtatccgtcagcagataaagcgggacagactggtatcgttctaccccaagcgtgtccgctacccgtccgtaggcatttcttttgaagtttttcaccaatggagcttcaccgtttctgttcttgtaattctggaggatagcccattgagacggctgtatttgtatattttcgagcaaagcaagctgttcctttattttctcccattggaaactgcgggtcgtatctttataaggatatgtatcttccagcgtgtacttatcatacagcagctctttggtgatttgaatttcttccggagtaatctttttgacgacgggttctgccacagttttcgcaattgtatcctgtgccagcgaatcgacctgcaaagttttatcagaagatttttgtcctgtacgtgaagtgcaggaacagagtacgcaaaaagcgatggatatgccaaaacttattttattcatataatctatacagttcatcttggggttcgtttacgaatatacgttattataaggaataatccgcttctattgtttaaaaagtgtggaacaaatatgcttttttgccattaataacctgttgtcagtcattttgtcagtcaatttctgccaaacaatcattattttgctttggcatacttttcgcaactgatttagcgtcttcttcaagaagaggacaaatcatgaatataatgtataacaaataaaatcaaaaaaaagaactatgaacattaaaccattagcagacagagtgcttatcctccctgcacctgcagaagaaaaaacaattggtggtatcattattcctgatacagcaaaagaaaaacctttgaagggtgaagttgtggcagttggtcacggaacgaaagacgaagaaatggtattgaaagtaggcgatacagttctttatggcaagtatgccggaacagaacttgaagtagaaggcactaaataccttatcatgcgtcagagcgatgttctcgctatcctgggttaattcaaaattctaaatttatcatattaaaataaataagatatcattatggcaaaagaaatattattcaatatcgatgcccgcgaccaattgaaaaaaggtgtcgatgcattggcaaatgcagtaaaagtaactcttggcccgaaaggacgtaacgttatcatcgaaaagaaattcggtgctccgcacatcacaaaagacggtgtgacagtagcaaaggagatcgaattggcagacgcttaccaaaataccggtgtacaactggtgaaagaagtcgcttctaagactggtgacgatgcaggtgacggtacaactactgcaactgttttggctcaggctatcgtagctgaaggtttgaagaatgtgactgccggtgcaagcccgatggatatcaaacgtggtattgacaaggctgttgccaaagtggtagaatcaatcaaggcacaagctgaaactgtaggtgacaactacgacaagatcgaacaggttgctactgtatctgctaacaatgatccggtaatcggtaaattgattgctgacgctatgcgtaaagtttctaaggacggtgtaatcactatcgaagaagctaaaggtactgacactactatcggtgtagtagaaggtatgcagttcgaccgtggttatctgtctgcttatttcgttactaatacggaaaagatggaatgtgagatggagaaaccttacattctgatctacgacaagaagatttctaatctgaaagatttcttgcctatcctcgaaccggctgttcagacaggtcgtcctctgttggttatcgcagaagatgtggatagcgaagcgttgactacattggtagtaaaccgtctgcgttctcagctgaagatttgtgctgtgaaggctccgggcttcggcgaccgtcgtaaagaaatgctggaagatatcgctatcctgacaggtggtgtggtaatcagcgaggaaaaaggtctgaaactggaacaggctacaatcgaaatgctcggtactgctgacaaggtaacagtatctaaagattatacaacaatcgtaaacggtgccggtgtgaaagaaaacatcaaggaacgttgcgatcagatcaaggctcagatcgttgctactaaatcagattacgaccgtgagaaattgcaggaacgtctggctaaattgtcaggtggtgtagcagttctctatgtaggtgctgcttctgaagtagaaatgaaagaaaagaaagaccgtgtagacgatgcattgcgtgcaactcgtgctgctatcgaagaaggtatcattccgggtggtggcgttgcttacatccgtgctatcgattctcttgaaggcatgaagggggacaatgcggatgaaacaacaggtatcggtatcatcaaacgtgctatcgaagaaccgcttcgcgaaattgttgccaatgcaggcaaggaaggtgcagtagttgttcagaaagtacgtgaaggtaaaggtgacttcggttataatgctcgtacggatgtttacgaaaatctgcatgctgccggtgtagtagatcctgctaaagtagctcgtgtggctcttgaaaatgcagcttctatcgcaggtatgttcctgactacagaatgtgtgatcgtggaaaagaaagaagataaaccagaaatgccgatgggcgctccgggaatgggcggcatgggcggaatgatgtaattcttcctttccggacataaaaataaggtatggaaccgctttccctgtgggggaggcggttcttttcttacgtaatgaattatttagcttcgtttataatattcttcgctttcctttcataaagcaatgctttggatatccaaaagctatgctttatggttgctaaagcatagctttaagctgccatacgggagatgttataaatattattttcaccttcactttaccttcgaaatcctttatttatcggtgatatcgggtgaaggactagttattcactctttgaactgaaaatgacattcgttcatgaaagtattattcattttgctataagctaatttatttttgctataatgatatttgcattagctataaccttaatggaaagatgctaatagattatttttttcttctcaatgtttgttttaaacatcctattgattgtttttaaatatcctattgattgtatgtaaatgagtggtcgattgtatctgacttgtctgaagagagaggtgaaggtacctcctttcacccgctatcattgatgaataaagggtttcaaagaaaaggtgaagggtgaagcccttgtttgatcattctaaactctcctccttcctgaaggaggggaatttagttacttttgacacatcttctttctataactggataatgtttaaccagtccaaatttttttggggcacttcactttcggacaccctctttttgtatattatcatttgcctctgtacggcttaatctgccggaaatccttgtcatacagccctaccagtaaactctgtcctttattatctactctcaatccaccataggcggcacgattatagacagaatcctgtccttcttcaaaaaagaaggattcggcaccgaggaataacctgccatttattgttttatatttcaggacgatctcattttcatttactggttcaagggattcctgaagacgtattatttctccgacgtgattcttgtcaagcttgagcacagcataactgcgtttagctttctgtctgtttatcaactcggaatttgcttctttatagttaagtctcatataatctccttgcatcagcgaacggggatcgacaggagccagttgcaataatacgagttgtccctctttcagcgtctgttctttctgataaacagaccagttaaaatatcccagaagaagaattaaattagcgataatcagtattcggctatattttttcatgtcttgtctttttttgagtgaaaatataccaggctatgagcaatgcgattcccgtaaagaacagggtgatcgatttcgtcagcaaggtgatatccagatcatagtaatatttggatatggaatagatgaagaggaggagcgcaactgcggactcagctttataaccgtactgaaaacatatcagtatcagcaggatactgcccgatagataaggggcatgcagactgggaaagcagatcaggatacaaagaagatagatgcacacctgatgtaccggactcttaacctgcatcacctgcacgattttataaaccatcagaaggatacccaccaacatgaaaacagatatgatccagtcatttgtgctttttgtcaagtaattgacagacaacccggccaatgaaaggacacaagatacgaacagaccggaatgaataggtttatatttagacaaatccccgttcgtatagctgagtatttttgtctcagatagattgacgaataagaaaattgctataataggcacggcagccacattcagcggattcagtgaagagaataaattcgttatctctccgaacagtgccatatagaatgagattaccgaaaggaaggtcaggatgaaccctttggataacagcatcgttactacactgatccctatcagtacaataaagaggacatccatgtttctattcattccataaccggctaatatacatccggctatgtagcatgtaatattcatcgcatccagaaaaggtttggtcaggaggcgattgacaaataaagtagtaatgatcaggatacttcctgcaatcaggcaggatgtttcggaccggagaatggaggaaagtacaagaaatcccagaaagaagatagcggtcagcactcctccgataattgaaaggacttcgattgtcaggttactcttctgtgccataccattgtttttttaggtgaaggattgcataaatcaataaagtggtaccggtgataacaataattcctgagaggaggaatatgttgacgtccctaaggttactgtgacagataaacagggatagtaaaatcatcagtatggcaaaaggaatggcggaaagatagaataaattcctttgtctccatccgaaccataaccctgccgagaacagcagaacggtacttgcgagcggaatggatacgattgcatccttttcgcagattactgccatcataagataagtcacatgcacaatggtcgccagagaaagcaggctgacaaaccaacggttttgtcggctgagggtacctttgatactcatccattctgtgacgaccgttgccgaagcgcaaatccaggttactgcactggtcagtaaagtgactgcccattggttatccggcactatttgcatagcgtatagccatatggtagtacagagcagtccgataaacgtcagccagagcggagtgaaacggatggcgaatgcccagaggatggtgaacagtgtccagcccagaaataagtcatacgcatcagcgcctgtctgatagatttgtccgaatacggcaaagagtgtacccacaaggaatgtggctccggtgaggattatctgtttgataagtatattccatcgggtaaatactgttagcagaacagatgcaacaagcaatgtttgtacgattcccagtttggcgaatttgggaagatcttcccagttataggcgaagaaaaagataattcctgctaccgtaaaaccaacgcctgctgctaacagaaaaatagaaagaaattgtttccattgttttttatcggcatacatcggttgcctgaataggagtgaagagtccggtttttccatgtacttttcttttttgatgattacaaacataagaaaataaaatgattatctttcggttggatatataaaaaaggcagaatctgattcattgttagtctgtaatgagatcagattatacctttctgaagataatcatcttgtctgtgtgcaaggataaatatcgttgaagaaggaactgtcagaagacttcccgtatatgtttataattcgaattaatagtatcgatcacttcctgtgagcgtccgttaatcaacagtttatacatggactgggcgaagcctaccatctgccccaactctatcttaggaggcatggcaagagcgttcggatcggtcatgatatttaccagtaccggaccatccagttcgaatgcatttaataaagtagtcagtacttcttccggattgctgacattgaagcctgtcattcccattgcttcggctacttgcgcgaagtccggattcagcatatttgtctgccagtccggcaggccgtctacttccatttccagttttaccattcccagggagcggttattgaagacaatgatcttaatcggtaacttatattgaacaacggtctccagatctcctaaagtcatcgacagacctccgtcaccacagagcgccactacctgacggtcggggtaggccagtgctgccccgatggcctgtggtaaagcatttgccatagaaccatgattgaaagaacccagcatatgccgctttcccgtagcttgcagataacgtgcaccccatacacaagtcattccggtatctacggtgaatattgcatcgtccgatgccagtttatcaatctcggacatcacatattccggatggattttgtttatatctcctttattttccgtataggctgccaggtctttctttactccttcatatcttttcagttgtttcagcaggaaagtatcatcagtcttggggtccagcatacgcaataatgcctgaatagtcattcttacatctccgcaaagtccgatatccactttggcacggcgtccgagccgttcgggtttgatatctatctgtgctatcttgatgtcatcgggcaggaaagcggaataaggaaagtctgtgccgagcataagaagtacttcggcttcgtgcatactgtaatatccggaaggcattcccaacagtccggtcattccgacttcataaggattttcatattgtacttccatttttcctttgaaagtatataccacaggagcattcagcttctcggaaagcgcaatcacttcctcatgtgctccccgacagccgatgccgcagaaaagagtaatgcgtttatgatggttcagcaactccgccaattgtaccaagtcttcttccgccggacagacttcaggcggagccggataattctttaccgaagattcgacagaaactgaagatgctttggccaggtctcccggtaagcctacaacagctaccccttttcgggtaatggctgtctgaatggctgattgaagcatacgcgggaattgtcccggagtagttgccacttcattatagtagctgcaatcattaaagagttttatagtattggcctcctgaaaatattcagtcccgaattctccgctggggatggtggaagcgatggcaatgaccggtgctcctgagcgttgtgcatcatatagcccattgatgaggtgaacatgacccggtccgctactgcctgcgcagcatcctatccgtccggtcagttgagcttcggctgctgcggcataggctccggtttcttcatgccgtacatgtatccattgtatcttattgttttttctgacagcttcgtttacttcatttaaactatcgccagtcacggcatagatgcgctctacgcccgattcaactaatgtatcgatcagttgttctgctattttttttgccatatttctaataggtttaggattgattcttaatgtaataacagatgtatgccaagaaaagttctgttttaacatatgctaataagtccgttgtgtcggtacacatcgcaggttttatgttaaaaataattttgtaacaactttttagtgtcggggagggaacaattgtgatatccatttgttatctttataggcgaaatcttaacctaatgtttataacctcttaatagctgtagaaaatggatagaaagcaaatcggtgtgtatgctggtaaagtctggcaactgctgagcaacaatgagaaatggggctatggtaccttaaagagaaagtccgggttgaaggataaagaattgggtgccgctctgggctggttatcgagagagaataagatagagttcgatcagtgtgatgaggaactttatgtatatctctgcgtaaatgtttatattggatgaaagaatgtctgatgttttaatgagaacagattaaatccccgaagttacatctttgtagatgaggcttcggggattttggtattttattccttctctttcttctgtattttcatttcgatgaggaaagctgccagcagccctgcgccaccgaaaagaagtacgcatgcgccatacacgacacttgcctgacgttccacgtcccagtttctggaagcggtgtatcccggaaatgagttgatgcagataaagaaggcgaccagtagacctaatcctattccaagcatcagcagaccgctttttaaagaaccgaaggtaaatcgggagcgggagtaattaaggttgagggataagttactgttgatttctcctgtgttgactctgtcagccagcttttcaatcatggctatccgctctttcttgcatacaaaaagttcaaataatttgtagattcctaatgtaatagtacctacgaccaagggaatggtgataaaatccatcataattatactgtttttaagtgaatattttcgttctttgtatcgtttgacgcagtggacggaaaaaggttacactgaaaagcggataatttataatcctgtatttttcctttcccggactgtaaccttttgtaacgggcagcgtctaaagagtcaagatggaacagaaagacgaatcatactatatcaaacgcatactggatggagagacggaatacttttccgtatttcttgaccgctacagtcgtccgttgtatacgttggtggtgcagatcgtcggttgtcccgaagatgcggaggagctgcttcaggatatttttctgaaagctttccgcaacttgaatcgttataaaggcgagtgccgtttttctacatggatttatcgcatcgcttacaataccgctatctcggctacccggaaaaagaaacaggagtttctttatatagaagagaatacgattaacaatgtacccgatgagatggcggacaatgtgcttgctccggcagaaaccgaagaacaattggttcgtttggggatggcgatagatcagttgagcggggaagagaaagcattgattactttgttttattatgaagaaaagtcaatggaagagatcggtgaggtgctgaaactttcgatcagtaatgtgaaagtacggcttcatcgtacccggaaaaagatttgtgtattgatgaataataaatagaagagaggatatggaagaggaaagaaagataaacgagaatacgggcaatatgctgaaacaagcattggaacggaggcaaacggaacgactgtcttccaatttttcgtatcggatgatggagcgtgttcatcaggaggctgagaagcagacgaagcggaaaacgagagtcggttgggcagctttgctgatatcggctttggcgttggtagggctgggtgtctatgtgctgactttctatctggaatttaactttgccgatgtgatgccgcaaatgaatgtccggcaggattcttctttgtttggattttatgtctatatcgcactccttgcattggtcttgctcggattagattattggctgcgcaagaagtatatctggaaataattctgttactttgcatgacaattaaaacaatgtgaagaaacaagaagaaacaatgagaagttttgcctctgataataattccggtgtgcatccgttggtgatggaagcattgagctgggccaacgcagatcatgcgttgggttatggtgatgatcaatggacggaagaagccgtagccaagataaaagaaacctttacaccggactgtgttcccctgtttgtattcaatggcacgggcagcaatgtggtggctttacaagtaatgacgcgtccgtatcattcaatcttctgtgcggaaactgcccatatttatgtagacgagtgcggctctcccgtgaaaatgacaggttgtcagatccggccgattgccacctccgacggtaagttgactcccgaactgatgcagccttatctgcacggcttcggcgaccagcatcattcgcaaccccgtgcgctttacatctctcaatgcaccgaactcggaacgatttatacacccgaagaactgaaacgtctgactgactttgcccatctgaacggtatgtatgtccacatggacggagcaaggattgccaatgcctgtgccgcccttcatctttcgctcaaagagctgactgtagactgtggaattgacattcttagtttcggcggaacaaaaaatggactgatgatgggggaatgtgtgattatatttaataaggacctgcaacgggaagcccgttttgtccggaagcaatctgcccaactggcttccaagatgcgttacctttcttgtcagttcactgcctatctgacgaatgacctgtggctgaagaatgctgctcatgctaatgctatggcaggtaagctttatcaggcgcttaaagagttgccggaagtcacctttactcagaagccggagagtaaccagttatttctgactatgccccgtccggctatcgaccgaatgctggaattttatttcttctatttctggaatgaagcgaataacgaaatccgcctggtgacttcttttgacactacagaagaagatgtgaatcaatttattcgacttttgagacgttaaaggagaagaatggaacaacaaaagcgcctgtaatactgttgtaataaaaagtttggggctaactttgtccccgtaatattgcttttattatgatggatgctagacgaaacggacttgtattattggcgctattgttgttgacacaaaccactataagtgcgcagactgattctatgggtaaagatgtgccggtagattctgtctctgtggcaacctcagactcgcttcagacaaagcgtagtttctttaagaagtttcttgattattttaatgacgccaataaggaaaagaaaaataaaaagttcgatttcagtgtgattggcggtcctcattattccagtgataccaagttcggtcttggattggtggcggcggggctgtatcgtacagaccgcaatgattcgatccttcccccttcgaatgtttctctttatggagatgtctctactgttggattttatctgttgggagtaagaggcaatcacttgttcccgcaagagaaataccggttgaattataatctttatttttattctttccccagtctttattggggaaggggatatgataatggagcgaactctgataatgaaagcgactacaaacgctttcaggcacaagtgaaagtcgacttcatgttccgtgtagcgaaaagtttctatatcggaccgatggctgtatttgattatatagacgggcatgactttgagaaaccggaactttgggaaggaatgttggcacggaccactaatacgagtctcggcctttcccttctttatgactcccgtgattatctgaccaatgcctatcagggatattacttgcggatagaccaacggtttagcccggcttttctcggtaataaatatgcgtttagcagtacggaactgacaaccagctattatcatccggtatggaaaggcggagtccttgcaggacagtttcacactttactgaactatggcaatcctccgtggggattgatggcaaccctcggaagttcttactcaatgcgtggttattatgaagggcgttatcgtgataaatgtgcgatggatgcacagatagaactccgtcagcatgtatggaaacgaaacggagtggctgtatgggcaggagcgggaactgtatttccgcgcttctccgactttacgccgaagcatatccttcctaattatggtttcggctatcgctgggaatttaagaagagagtaaatgtacgtttggatttagggtttggcaagcaccagactggatttatatttaatatcaatgaagctttttaagaacataaagaaatggtttgaaaatcaggaacatttgttttacttgtttctgatcatcctgataatgcccaacatcgttctgtgtttcacagaacccttgccgttgatggcgaaagtaagcaacgtcttgttgcctttagcctgttactatctgctgatgactctgtcccgcaactgtggcaagatgctctggattttgttcatcttcctgtttttcggcgcctttcagattgtgctgctttatctgttcggacagtccatcatcgctgtagatatgtttctgaatctggtaaccaccaattcgagtgaagcgatggagttgctggacaacttattaccggccatagtcaccgtagtcatactttacattcctgctctgatattgggcatgatttcaattatccgcaagcgccggctttctgtggcatttattcacagagaacggaagagagccttcatcctgcttggaatctctcttctcaccttgggcggagcttactgggaagactcccgctatgaactgaaatccgatctttatcctctcaatgtatgctataatgtgggactcgcttttcaacgtacggcattgacgcaaaattaccgtcatacctcgaaagattttactttccatgcccaagccactcatccggcggacaagcgtgaagtgtatgtaatggtagtgggagagacttcccgcgcattgaactggcaactctacggatatgagcgggagacgaatccgcttctgtcccgtcaaccgggaattgttgcgttctccaaagtcctgacagagtcgaataccacccataaaagcgtacccatgctgatgtcggatattacagcttgtaacttcgactccatctaccatcaaaaaggaatcatcacggcctttaaggaggcaggttatcagacagcctttttctccaaccagcgctataatcattcctttatcgatttcttcggaaaggaagccgatacattcgattttataaaagaagattcgctggattccgcctacaatccttctgatgatgaactgctggcattagtagcgaaagaattatccaagggaaatcagaaacagtttatcgtacttcatacatacggttcacatttcaattatcgtgaacgttatccgtcggaagacgctttctttctgcccgattatccggtagaagcggaagtgaagtaccgtgataacctggtgaatgcctatgataacaccatccgctatacagatggctttctgtcacgtctgattcatatgctcgaagaacagcacgtggatgctgcaatgctctacacctccgatcatggagaggatatttttgacgattcccgtcatctgttccttcatgcttctccggttccttcttactatcagcttcatgttccgtttctgatatggatgtccgacacctatcgggaagcttatcccgaacattggcaaaccgtgaccgggaataaggataaagacgtatcttccagctgttcattctttcctaccatgctggaactgggcggagtgcaaacttcttaccgcaacgattcctcatctgtagtcagccctctttacaccatgaagccgagagtatatctgaatgaccataacgaaccccgccccttggatgatctgggaatgaaacagcctgacttccagaaatgtcaagtattaggtattaagtattaggtaataggtaataagtaataggtaataagtaatacaccgtagccgtacaggcaaggctatacgaagctacgattattacctattacttattacctattacttattcattaatccttgttaattcttatatccaaaagcatgattggcgtgttatttgcgatataaaagtatgaacgattaaattcataaaacatggcttatatagattattataagattcttggagttgacaaaagtgcttctcaggatgatataaagaaggcttttcgtaagttggcccggaagtatcatcctgacctgaaccctaatgacccaagtgcgaaggacaagtttcaggaaatcaatgaagccaatgaagtactgagtgaccctgagaagcgtaagaagtatgacgagtatggggagcattggaagcatgccgatgagtttgaagctcagaaaaaagcgcggcagcaagccggtggctttggaggtgccggaggttttggcggattcggtggtggcggtcagggattctctgatggtgacggaacgtattggtattcgtccgacggtggcggtggattctccggaggtaatgccggtggtttctccgatttcttcgaatcgatgttcggacatcagggcaggggacaaagttctgccggattccgtggacaggactttaatgcggagcttcatctttcacttcgtgatgctgctcagacgcataaacagatattgactgtcaatggtaaacaagtacgtattaccattcccgcaggtgtggccgacgggcaggtgattaaactgaaaggttacggagctgaaggtgtgaacggaggtccggccggggacttgtatatcactttcgtcattgccgaagaccctgtattcaagcgtttgggcgatgacttgtacgtagacgtggaagtagacctttatactgctgtattgggtggtgataaagtcgttgatacgctggacggtaaagtgaaactaaagatcaaaccggagactcagaatggaacgaaagtgcgtctgaaaggcaagggattcccggtctataagaaagaaggacaattcggtgacttgattgttacctattccgtcaagattccgacgaatctgacagaagcgcagaaggagttgttccgtcaattacagagtatgaactaaaatgaatgagcactatgcagaccgaattaattattgtcagtgaatactgtcaaaagtgtcatattgaaccttcattcattgagatgttggaagaaggtggtttgattaatgtacgtaccgaagccggcaagcattatctgcttgtttctgaacttccgaacgtggaacgttatagtcggatgtactatgacttatccatcaatatggaaggcattgacgccattcatcatatgctggaaagaatggacgatatgaggcgtgaaattacttccctccgcaagcaacttctgttgtttcgggaaagggaaatagaggaagcggactggtaaaaaaacgaagcctctgtttgatgcaaacgaaggctctatttatagcaaacagaggctctgatctacgtgaacagagcctctgttttattcgggcggtacagtacaaagaaaactagtcgatgtacgtgcagatttcttccagatagcgtgcgtccgtttcatcaaagctgtccggtgtatcactgtctatatccagcactccgatgacgtttccttcttttataataggtactactatctctgacctggaatcggaactgcaggctatgtgaccgggaaacagctctacatcaggaacaatcagcgtctgcgcttccttccatgccgtgccgcaaactcctctgccgaaacgaatgcgtgtacaggcgatgggaccttgaaacggtgctaatacgagttcgttgccttccaccatataaaagccgacccagaaaaagtggaaagtctgcttcagtgcggcggcaatatttgccagattggcgatacgattcgtttccgagcttaccaatgcttgtagctgtggaagcagttcacgatatttctcttctttattacctgtgtgaatcagtaaattttctgccatctcttttctatttgatttggtttagaatactcggatcttttattttatcatcctctgcgaagaaaatgattttcgtcagtatctccgctgttttcgggtcttcatccacaaaaggcaggaacagtcgtccgcgactttgcgagtgtaccggaagaacggctatttgtgcaccgcctgctttatggataacaccactgcccaaatgaatgttgtatttgcccagcttgccttcgatgtatgcaaagttccctttcaccctgacgttgctgaagtgaaacaggggtagggtaagttctaccaatgcacggcgcatctcgatggtggaatggctggtttccggatcgacacttccggcgtgagccacactgacggcgaggtctacatccctcatcacttcggagaagacaacaggtggaatctccgaaatcttcatcggtttataatccttgcggttatggaagcagacaaattccagcgtgggagcttcgatgtcggcaggagagaaccagtccgccatcgcataaatcgtggcaataatattctctttatagtatatcttctgaagtccgtcctcgtaatcggctacccagcggcgtcctttcagtacggcaaccgttttctgcggttgaatctgattgccggcgtaacggcgggattgcgtagcgtctttctcttccggtgtcgggatgtacaattcgcggaatacctgcttgaaaggctggcggatagctttgtcaaacaagaacttctgataagcatgccagttgccactcgcatacaggtctgtgggatgggcgatgcgtagttcctctttcggagtgagcggaagacagatgccgtcagccgttatcaataggccgtcggtgtagaagcctgttctgccgttgctggtgaagaccaggtttctcagtagcggccagataaccggattcttcatcagcttgcgcagttcgttttccttaaaacgggtacagtcctccattgcctgttcgagcatgatgcgggaacgggcgtgctggtctttcagtattttgtgtaccgctttcagctcttccacgtatgggtgctttttcagtttgggaggcaggctgttcagctcttttccggctcttacttgtttgatctccggtttgccttcgttgttgacttgcacatagacttccacgccttctatttctttgggggtcaggtaaggagtgatctccttgatcagttccgtttccatgctccatgtcagacgggtgacgtctccgtaaccggagttgcgtgccaggttttgcagggcgatggcaacggctttcttttcactttcctgtctctgtgcaccaaattccttgctctctttcaggaacttttgcaggaactgatagcgttcgagcaattccttgtcggccttccggcccagcgggataaggccgtagctcatcagtaagtctttatttcgcttcgctatgatttctttcttcgcatctgccgctttggtcttgccgttgacggcatcggcaaatttacgggcgcgggtatgcgtgttgcttaatgaaatatatttggctgcattgtacactacttcgaaacgttccttgccgatagtcttgtaggcttccttgaaccagtcgatgtcaaaagcaccttcctgaaggtcttctatggcaatcggggtatatcgggcgatgatcgctttcttcttgtcgtcgaaacattcgctggtatgggcatggaagtagtaagcggcgctttccagtcctttccatccggtcgcttcttcggtgagttccagccattgcggggcgaacatggcagcttccaccagtcgtatatggctgatgtcggcctgactggcgaggcttttgagtgtatcgctgtcgtcgtccggagacgggtagcaggcatggagcaggctgctcaatactccccgtttggtattgcgccagttgtagctgtcacgtatgaaggtatctttgccgaacgcttgcaggatacggatcagtgtttctgctccgtagacgcggtgaagctcttccgccagacgggtgacctgagtctcggaatctccccgctgtaactctatttccagaatccggttcactactttctgggtcagtgaatggaagagggagtggttgcgctcgtccagtgccgaagtgatatctttgatgcgtgtgggcgagttgacacgtcccatcagttcccggtatatttcttcggtgggaatcagtcccagcatccatgcgtgggcaaagtccatgctttgcaggtagacatccgtttcttccagttcgggagtatgctccatatagttggtgagcttgtagagctggtaccggacggtgaaataacgggtgaagagagcgtcattgatgggatgctgaggcgcgtcgagccagaaccgtacaaacttgttgttgtgtatcgggtaaacgatctcccttgctccatattcctgcttgtctctgagccatgtatgcttattggtgtattgacggaagatattctttgtattgagcagaggaagcaactgcaaaagcatattgacggagaactgctgataagttgcttcgtttctgtattcatgtgccagtccgtcgataatatcttctatctgcctgtaataggtcagcttgcggagcgacttttgcagcccgcggtaagtgaagcctgcatacatcttattgataatcggttcgaacgtgttgagcgattggatggcggcttccttgtcttcctgttcttcttcgtcaaattcatcgtcttcgtcctcttctatttcgttgggtgctccggtagaggccagcatgaacttcatcatcagcaatttgtcgtaactgccgatttcctgttgatagaaattctgccagagttccggaagtccgagttcgctcagtccgtcgtagtgcttgtaccagttcagtaagacactgttgcccaccaagcgtacttcaccgtatttatccgtgaattcgtcttctttatgcttttcgatgtatttgttcagcttgtcgaagatcgctttggcttttcctaaacgaataaactcaaatgctttcttcacattgaatccggtatcgggagtaatcggaggcaggctgacttcaagcgcaggattgtatagcccgaagccattctctagggtatagttgcttgtcgtgctctgttccgtaccgtctccgatcagcgattcgatcagaaccttctctttggcgttcggtttctgaatctctctgacggtggacagtagttcctggtatctgtctttcagaaaatcgacgttgcggatgctcttcatcatatccagcccggcaaggcggcgttcggcattcttgttgctcagcaatcggcggatactggctgccagttgtgcttccggctgtttcatcagcagattgatggcattgatacgcatctcgctatatttgaaacggagcagttcttctatattctgatactgttcgggggacagggacatttcggacaatactttgtatgcttcgtcccgtatgtctgacgaacggtcgccgagtgattgcagtacatattcctgctccaccttgctttcggtatgggccagaacgattccgatatagctggcacggctgtaagattcgagtgcgggaagatacgtgcaaagttcctctctcagtcggatatcgttggtcatccatgcgatgtatgccattttgtggactacatccgaacgggtgagcactacacaatcccacgggaacacataaggcgaataaatctccttggcggaaatagactgatagacttgtttcagatatccatagtgacggaccgcctcttccggtgattcaaaataatcgctgagtgtgggagcttccttgttatcgctgtatcggctcagataaagaccgtccatataaagaggaaggatagccgccaccactttcgggtcgtcgtgccatacctcgaatgcgtctttgctgatcagatgattcatctgagaggattgcgtgcagcgcaggaagtacagtaatgtctgtatctgatgcttggctccctttcggatgatgtccggtacgatggctctgatctcgtccgtatcatagaatccgatgctccataaagccagataaagtacgactgtatccttgctttgcagggcattgcgggctgtttccggatgattcaggaaattccagatcagttcgacatacttgttggtaatccgttcgctgctgtcctgttcgccgattccggtgcatacggcgatgcttcgcttgacggaggcaaaacgttgcagtccgttgttatagatgatggagaataggtagaggtaactttcgggacatccttcgtccatcgtttccacaatggcttggcgcagtccttcctgtagcttggctgctaatagcagtttgccttccagctccagaagcgggcggtatccgctgatggcgatggcgtggagataccagcgttgcaggcggtggacgttgttttcgctggtcagtacctgattcaggtattcgattactttttcgttaccttgtgctatttgtgcggccagccagtaggaagagttcatatagccgctgaattcttctgtatcttcgggtgtatttcctccttttaagatcgcttccactgaaaatccggtagcgcgtaacttcagaaactgtagccatgcgtctctggcgtggtccagatgattggacggattggcggaacgctgggcgcgccggtcgtatccgatggtatgcggacagcgtgcttcgagttgcagataagtatggaacagtccggcgaattcgtcgcccaacatatagcggaacagcgtgttaagtctgccatccatcagattggcaatgctttcgatgttttcttcccggatgatctcctccagacgaggttccagtatctcactgaatataccataccgtcctcccatgtccaaatcctccatgaacaggtcgaacagggtaagcgtttccggctccaggcttgatttttcctttagtaaactctccaaataggggtttagcagcttgttcaatttgtcgttgtaagtaattctcatgactttaagcttttagagtttatattgcagttaccaaagtcttcctgacagcattgtcagccggataaaggtaagtgtagattcttctttcagttggacggaggaggataattctccaagttccgcatcgtccagaaagatgcggaagattccgtcttcatatgattgtaaagcgttgatgatagcttcggtttccgcagccggtctgccgttatagtttgcttcgaagcctactttgccggcggcagccttgtcttccatctcttcactggtgaggtatttcagcatttcactttgttgcagccgttcgttgtactcctttacttgccagcagacgaccgcttcaatcagttcctgcacactggcaggaggagtagggaaatcgaccggcatcttttcgatgctgcatttcctttttcctacttgcttgacttggatatatgctttcatacttacttttatttttcgatttgaatactggacgtgattgcgtccagatcagcctgagccttttcgtccgcaaccagcatgacgatggcaaagactcttctcttattctcctgaaagtacaataatacggtttgttgcatttcttctccttcttcgtcggggtgcccgatccgcaaaggattggtcgtcttcgtcataggcagaccgttgatgttgactttgctctgcttgtaatcctccgagggctttccttgctcatttcgggggagggtgaggagcagcttcttcatacgctcgaactcatcctgcgtatcatagctgttactggtcactgtcagctgactgccgccattgacgagtttcagcaggggaggctccgaatcgggagtcggcgctttcgtgccggttatcttgtaccagttggtaggatactggcaactgaattttgatacagcgtcatagcatgaaagccacgtatcctcatccgacatgggagtatacgggaactgttcggaagtggaagatttccgggggctgccggtcacccggcgactggcgctttttttctgttcctcttcctgttccttataataggcttctacaagtccgcttttccattcgttacgtatttcctgatatgtcgagggaacattgcggcaaagtgaaaggaagctgaacaggaagacactgaagatgatcagttctccgatgatggaaaccgttcttccggcttcgggcttcttcatccgttcgccgaatacatagatgaatcccaaaaggaatccgctgagtaaaccgccgatgtgtgcggcattgtctactccggcccgtatgccgtagatgagattgtagcctacgaagataagaatgctggtcagcaaagccttccgctgcgatctctcgatgcggtggaacagcaggaaagccagaaagataccgtagagtccgaagatcgatccggaagctccggcactgatcgtttccgcatgcatatagaggctgaagacagccgaacagagtcccgtcagcagataagagacgaacatacgacgcgtacctatcagatgttccagccagatacctatatatataaaggcgtacatattcatcagcagatggaaagcgccgatatgcacaaagttgcaggtcacggcacgccaccagtcaccggtcagggtgagcggaccgaagtcggcgccccagtttagcaaggccagtgtggaaggttccagaattcccgctccggtagctgccatcagtatgaagacaaggatattgatgtctatcagaaccggtgtcgcgatgaatcccttccgggggataaagaaatggatgaaagacgactctttttcgctttctgcctgaagcctccgttcttcttccgtcagcgggcgggtgaggtcttcttccagctcgttggctttttgtgccagttcttccggtgtcagagttgatttgatctcttccatcgtttcctgtaatttttggatattcttgcgatttttgccataatctaccagttgtacggaggcgcattgactgcggacggatatttcaccgctgtttccttcttcgatggtgaaagtcacttcttctccttgggaacgcatacccattggaacataaaatatgacttcacgaagagcgattccttcgatattccattcaagtttctgagacgcttcgagtgccagtatcagaatttgtgtatttgataaatctgcaaaatgtagcttatcctcgtgtaaaggtctgagtctaaacgccatatttctctcttttattaagtcgtagattgatattactctctttttgtacaaaagtacagaataataatgaaatagagggtaaatgggagggggatatttatgcggacaacgagaatactaatactttgagatttagtaagttccttttggaaagaagaggacaaaaaaagcatccgcttcgttggaagggatgcttttatcgttagtcacccttttagggttactttttgtagaaagcaaggtcttctttatccatatttttgataaagttggtatgcttcgtaacttccgcttcagcaaagttcagatatacatgtgcagatttggagaacaggtcggcagccttgcttgcgtcctgaatcagcaggtggcacatgatgatatcggcagccatttccatcagtctgcgggctgtgaagtcgagcagttcctgatcctgtgcttctttaacggcgttggtgctggcttcgaacaggtctgccatcttcttcagacgtgacatcagcggttccatttccggtgaacaaggtactgtttcgaattcgcggatcgtagcaaggtaagaaccgttggttacatagcggatagcggctacagtctgcaactgggtggtaccttcgtagatgctggtgatacgtgcgtcgcggtagatgcgctggcaggcatattccatcatgaagcccgagcctccgtgaatctgtatacagtcgtaagcgttctgattcgcatattcggagttcatacctttggcaagcggagtgaaactgtcggctaactttgcgtatttcttctgttccagacgttcttccggagtcagcttgcgttcgcgtgagatgtcgtccagtgctttgtagatgtctacgtagcgggctgtctgataaagcagcgcacggccggcatccagcttacctttcataatggcgagcatgtcatacacggcagggaagtcgatgattgcttttccgaactgcttgcggtctttggcataggccagtccttcattgtaagcagcctggctcaatcctacagattgtgcggcgatacccagacgggcaccgttcatcaatgccattacatatttgatcagaccgagtttgcggtcaccgcaaagttcggctttggcattcttgtaaaccaattcgcaggtaggagaaccgtggatacccagcttgtgttcgatacggcgtacatccacaccaccctgacgcttgtcatagatgaacatggacagaccgcgaccgtctctcgttccttcttccgaacgggcaagtaccagatggatatctgcatcgccgttggtgatgaaacgtttcacaccgttcagcagccaacaaccgtctttttcgctgtaagtagctttcagcatcactgcctgaaggtcggaacctgcatccggttcggtcaggtccatagacatggtttcaccctgacatacacgggggatgaagcggctgtgctggtcggcattaccaaattcatacagtgtttcgatacagtcctgcaaagaccagatatttccgaaacctgcatcggcggcagcaacgatctcggcacacatggtgtacggagtgatcgggaagttcagtccgccgaaacggcgtggcattgtcattccgttcagaccggctttgaccatcgcatccagattttctttagtgccggaagcgtattccacccgtccgttggcgcagtgtggaccttcttcgtcaacaccttcagcgtttgcattgataatttcgcctgttatttctccggtgatctccaatactttatcgtaagagtccagtgcgtcctcaaaatccagaggagcgtagtcgaattcatctttatctctgtagttgcgttctttaagttcgcaaatacgtttcatcatcggattgttcaagtgatacttgagttccggtatttctgtgtaaaaattagccatctttctttacttgctattctgtttataatacttaatcatcttcggcacaacttcttcgatggttccgttgattacatagtctgcaatcgtgttgatcggagcatccggatcgttgttgatagagatgataataccactttcctgcataccggcgatatgctggatttgtcctgagataccacaagcaatgtagagtttcggacgaaccgttacacctgtctgaccaatctggcggtcgtgttctgcaaaacctgcgtcaacagcggcacggcttgcacctacttcggcgtgaagttcctttgccaggctgaacagcaggtcgaagttttctttcgaacctactccgtaaccaccggcaatgatgatcggagagcctttcaggttgttcttcgctttttctacgtggcgttcgattactttgaccacatagtctgtgtcggctacgtacttcttcacgtcgtggcggatcacttctccctgataagccggagaaacgatttctttcttcattacaccttcgcgaacggttgccatctgtgggcggtgttcggggttgacgatggttgcaacgatgttaccgccgaatgccggacggatttggtacaacaggttcttataaacttttccttctttcttatcttcgtggtcaccgatttcaagggatgtacagtcggcagtcaaaccgctggtcaaagccgaagaaacacgtgggccgaggtcacgaccgataacggtagcgcccatcagacagatttgcggctgttcttctttgaagaggtttacgaggatggaggtgtgaggaagtgaagtataaggatagagtccttcagcgtcgaaaacgtggagtttgtctactccataaggaaggatttgcttttcaatttctttgaggccggtgccggcaactactgcttcgagttggcagttgagttcgttagccaacgaacgaccttttgtcagaagttccaggctgacgtctgcgacgatgccttcttctatttcgcaatatacaaataagttattcatgattatccgatggtatggttagctaacagttcaacaatcagttcttccacatcacggtcgctgccgctgatggttttgctctctttggcctggaacacgatgttctggatggcttttactttcgtaggcgaaccggacagaccgcattgggcgaggtctccgttaacgtcggctacgctccattcgggcaggttgaggtaatcgcgcttgtcatacaggtcggtatagtcgaggttaccttgttgtttttccgtaacggttttggcgtgtttgtacttctgtaccagcttggcgttacgcgggcggcagggagcagccgaaccgttgactgtgataacgatgggcagcgggccttctaccgtttcaacgccaccgtcgatgtgacgtttcactttgattttgccgtcacctacttccagaatctcttcagcgtatgtgatttgcgtcaaaccaagtttttctgccacctgcggacctacctgtgccgtatcaccgtcgatagcctgacgaccgccgattataatgtcgcactcaccgattttgcggatagcagttgccagagcgtagcttgtagccagcgtatctgcaccggcaaaagcgcggtcagttagcaaataaccattatcggcaccacggaaaagtccttcacgaataatatcagcagcgcgtcccggtcccattgtcagaatggttacggtagagcctgggtgagcatctttcagacgaagagcttgctcaagggcattcaggtcttcggggttgaagatggcagggagtgccgcacggttaatagttccgtcggctttcatggcatctttcccaacgttacgtgtgtcgggaacttgttttgccaatacaacaattttcaaactcatgctattaattttagtattagtatttctacacattagcagccagtagtcaagtagtaataatcttgctatccaaactatccggttaactatcagcgtgcaaatttactcaaacacttggttctgacaagaaaaccgagtaaaaaatgcacattattaagttttttgagcaaataagggcaagtttatgaggttagccatagtcctatggcagtttgggggagaagggggatgggaatggggaaaagagacactaccataggaattgttttttataaaaacatctgtcaccgtcaccgttcgaagggtaactgtctgactataaatgattcatctggtgacagcaagtggtgacagcagtgtgacggaagaagttgccgtcacaacgtgataggagggacaacggataaaaagcaggtaaagtaacaagggatggcggctcttgtttttattctatatacaggcgatttcaggaatgccttagtctagttggtttccatgcgatgaaactatagttccaaagccttgaaaccaatggttccaacgccttgaaactaatggttccaagctgcagaaactttagttccaagccgcagaaactaaagtttcaagctgcagaaactctggtttcaaggtgatgaaactgtagtttcaagcggtggaagaaactactgaaagctatatatgtttgggttataaggtaaggccgactacaaagtatacttgttcttcataaggattggcgatcacttttccgaagatcggcaaagagaaagtagaggtaatctttagttctttggtggccgaaagtccgatattgacaacgttgaatttatcggaatacatgccgtcccaaggggtaaagcctgcttcaagggcaaggtccaccttctttatactgaacggataactgagttcgcagtaactggaccacgcacgtttcccgttttcgcggtaatcattccccgcaaatgtggtgtaccagctgattgaaagcgggaacttttcactaatcatatatccggcaccgacttcaaaagtatgtccggtggagtgtgaactgtaattgaagtacttgaaaggttcttcttccgtttgcgtgaagtagttgttggcgtataaggtcagattcctgtattcgtattccaatgacaaatctatttcattattcttatggcgaaattcggtcgaaccccagacgtaggcagtcagtcctttccagttgacgcccaatgacggttgtacgctggcgttaccgctgtccatacctctccaaatgtagctgctgacaaaatccgctgttacaaaaacatcctgtgcctgtgctaaaacggaacaaaataagagtgcaatcagtaaaattcgttttttcattttgatgactttgttgtattcgggcggcaaagatacgaattgttgacgaatctgaaaggccccggaaacagaaaaagcattcggacaggtggttaaacgggaagagtaaccaccattttgcagccggaagtatagccggtatctattctgatttgccctccgagccgttgtatgatgatgcggcagatgtacaggccaagtccggtgcccggtttgaagtcatctactttggtgaaacgttcgaacacccattcctgcttgtcggcagggatgccgatgcccgtatcggtgacggagatcaccagttgtcctttttctttgtcgatgttgcaggtcagcgtgattgttccgctttctgtaaacttggcggagttacttagtaaattgccaatcacacgggagagataaaaggcgtttgtctgtgccgtcattccgtctttatcgcctgtgatgatacattcgatattcggcttggacagagtttccttaagtttggccatttcttcaacacatagtccgtatacgtcggtagactccacaggaagaggtagttcggagctgacaagctgagacagctccagcatattgtccatcaaagaagctaacgcggtagaattgctttgtatcaactgccggaattcttgtctggtggccgtgtctaaagattcatcgaagatcagttcggagaatccggcgattgaattgagcggagtacgtatttcatgacagatagagttgaggaaagccgttttcatcttctcgctttcggtggctttcatgctttgttttctgacttcttcgtgcgcagtcattagtgcgcagtgcattttcttcagccgttttaccatcgttcgctgatagatgctccatccgattgctgccagtaataagataaaagtaccggtcagtgcgatttgtttgtttttgttggcgagtttgctcttttccagttccagtttgttgacgtcgaagcgggtttgcatttcgatcatttgttgctctcttttttgtgatttatccgacatccggttcttattgctttcttttaaagtcagatatgcgtttttataatcattcagtttatagtacagaccggctttcgcattgagtatgggaacgaggttgactggttggaaatggtctgtttgagtggcggaatcaatgtaagctatcgcctttttgtattcgcctattgtctgataatatcttgctgtcgtctcgtaagtgctttttacaaccttctttttatttgctatctggatatatttctgataatagtcctttatctcttctttcgaaataagatctgccatgaaaataatctgcgaatatttagccatgtagtaatgtgattcgtccagaaatctccggtcgaaagtcgtattcagatgattccattgcttgtgtagctcgatcattttgttcacttcgtctactgcctttttgttttcaacagttgtatataagtctgccagttcgtagtggcacaatatttcgaagtgcaccctgtcttgcaaaggataaggggctagtatctccagtgcgcgctctacgtaaggaatggctttggaaacttcattgtatgaatgtgtcagtaccgctgaataatcgagtgatactccggtcagatattcccattgaatttgttcttcaggtgtcatttgtccgtgattttcctttttcagcttgtccagttcctgttcgattgtttccagcgaattgttctttcgcatttccgcccagatgttgtaacaatacaagtaataccggaaaagggtgttgtgttcttccggcagatattgtcgggcgaaggttatatacttttctaccttctctttgtttttggaagcatatcgttgtatcagattatcgagtgcgagcttcatcatatattcgtctttggcttttgcggcctcggtgagggctttgtcccaatattgggaggaaatgttgaggctgtctacgtggatatccgccagatgaatatagataatggcccgttgcccggcatccgtgtcgttttgcaagagattctgcagactgtcgacggaagccgtaacggcggaagcacgtgcgatagagggcgctagcaggatagctccgatgagaaataagaattgtatttttcgtgtgatcagattcttggtcatatgattagatattatttgttttggaataaggatatgtgaaagtcagtacgggaccttccggagtattcggttcaatcgtatatgtacctttgaaatattcgattgtcagacggttgatgctatggcgtacttctgctttttgtgtttgcagggtcggatcggctaacggactgttgactacccgaaagacaaatagttcccgttgcgtgtcacgttccagatagagagacactttccttttctcttcacacgggtctgtgtagatcagtgtactgagaatcaattgtgtgaatcgggcggtgtctacctgaaacggctggctttctatttccgtatgaaagtctgcctgtatcttatctccgcatctcatgcgtaccataccgagaacgtccgagcacaaggagatgatttcgtgctcctgtatctgccatttcgttcttccggcctccagtctggagaggtcgagcacgtcgttcaccagttgtatcagttcggcggagttggtctggataatctccgaatattctttccattggtcggcatccatgctttccggatcagtagtcatgagttgagaaaaccctaagacgttattcaacgggatgcgtatgttatagctcatgttaacaaggaagcggctttttacttcgttcgcttcttccgcaatctggctcatcttgcggatttcctcttcttctttcctcaatttcttgcgtacataatagatacgtatggtagacggaatcaggataagcagtgcgatggctatcagagtcagtccggcataatgaaccattgctttgtactgttctttttcaagaagcaggttgtccatgttgcgcatctgatagatttcattcgtctgcgagatggatagtgcccgatagaatgagtcttttttcgccagcaaactttggaataacgggattgcttcatccgcttgtcccgcctctgtaagaatgcttgcatgttctattttgtagttcagcccttcattgtccgatacttcggacaggagttcgatagcattttgagagtatgacagggccttttcgtattctttggtaatccggtaataatgggaatacacattataatataatccccggcaaggaatgtaagtggtaggagagaagtattcatccatctttttcagatgggggcgggcttcgtccagtgtgccttcattcagataatagtcggcatagagagactccaataacaggtagctgtatgctttgggtgtctgctttgcttctgatagtgtgtccagcactttcttgtattcctgcaggtacttcaggaagtttttgtttctagtggcggaacaagataaggctatttcttggagcacgcttttgcgcgattccagggaggcggcgggtggcagaaggcggtaggcttcgaatccggcctcttcgccttctttaaagcgggcggtcatcatataagcagtcatcaggcatagtttggccgatgacattccttggggattgtttaacttttgtgccagtttaaacatctcttcggcttgggtgatgctatattctattttatgctttatgatatgtatggttatttctgctctttttccttcgaagtataagctgtaggagttgttttttaaagcaaccggagagagcttgtccatccagatgactgtgttttcttcgtcttggtggttgaagtaataaacgacatgggcatacagagcaagacactgataatacttgttgtcctgtgtggtagcttcctccaataattttcccagatagtagacgcaggaaggtgacatcgggtccagataagcgagtgaataaagcatctccagccgggaagaatcggccggcaaagtgtccagtatctgaagcagactgtctttggcagcttcgttattgctggagagagccttgccggttcctcctgccagtacgatcagtatgaagaatatccataaccgtttcatgactgtgcctcctttccttcttttgtggggttgatgggatgggtgaaataaaatctgcatccggtggtgtaggcagggtctatccatatgctgccgccgatccgttcaatgatcagttggcagatagagaggccgagtccggttccctgtgctccttcgttcagtttttcaaagcggttgaaaatggaactttgcttttccagtgggattccgcaaccggtgtcggtgacggagaagagcgcaaattcttccgattcctgacggacttccagcgtgatacttccctgcggggtgaacttcgtggcgttgatcaataggttgatcagtaactgttgcaggcgtgaatcgtcagtgtataactttagggaagccagcgatgtgttgaaacggagctcggcttgtgtctgctttactttgttgacggtatcgattacgttattgcagatggcgatagcgtcacaataggtgaagttgaacttcatgtttccgatctccagattggaaaggtcgattacgtcatttattagttttagcaacaagtcggagttttgctggatgatgtcgccgcattggcggcgtgtttcggcgtcgagtgcctgctcggtcagcagactggagaagccggagagggcactcagcggagtccgtatctcatggctcatgttggagaggaaaagacttttggtctgcatggcattctcggcgttgagtcgtgattgctccatgcggattttggattccgctatcttcttgttttgttttaatatgtgtatcacgaggtaaatcatgatgcccagcactatgactcctattaaaatgccgcccatgaaaatacggttgaactcggctttattctctactttcatccggttttcctcataagatgcccgaaggctgttgatgcggtgtgcatagctgggagcgactaccgaatcggtgacgatactgatttcttcatacagatgcgccgcttctactttactgcccatttctatcagtaagttcgctttggcataagctacttgcaggtagatgatggagcgcgtcttttgccggatgccggtcagaatctcattgtaatactgtaatgcaagattgtagttccctgttgcttcgttatatcgtccttgcatataattgtaggtggtgcgataataaggttgcctgtccgaaaggtagatttgctctgcttgcagcaggcagttgttcgcattgcgcagatcgttcttctggatatagtaagaaacatctgtagcaagtgtcagaaattgcagcgtctgatgggtctgtatggattttgattcggaaagtatctttctgtatttctctgcttcctctgtcctttgagtcagaataagcacctgtataagtttcaggatagtcatttctttataatggttgttctccgaaggcgaggcgggataacggatggcttccttataagaatcagtggcttcttcgggcatattggagcagaaataggcatctccgatagctgcgctcgaaagggctattcctaaatcatatctcatcgtttctgctttttcgtacatttgtcgcgcttcgtcgattgctttcccgatgtctccgcgcagggagtagatgtaaaccaccagttgccggatgctgaaagacagttccatcttgttttccttttccagtatagggctcagttgctgtccccaggcgataacgctgtctatcggcgcgatggaatcgtacgcaatgttgttttctatcaggcgtttcaaattggacagtcgttcggtattcaggtttactgaatgtgaggggagaatccagataaacagacctatagtaaataatatatagatattcctcttcattaaaagtggtgttttgttgtatgtgttatactagttgccaaaaataagcaaaaatcacaaagaagcggtaggttggcggtgaatatttttctctttgtgttaatatacgttgctgcttgttcgtttcattggttctgttgccggccatccgggagctgaggctttattctgtgtggatgtatataaaaaaatctgtcggggaagtctccccgacagatttaaccagtaatctaagtgagtttttcagaatgtgatgtccattttcactacaaaagtacggggagcggctactgccatcgggcggtaactgtattctttattcaacaggttgttgaccatgaattggaaggcgacttctttggtcgcttttaccccgaagcgcaagtcaacggtggcatagtctgtattatgttttttccagtaagtagccagtgtttctcctctcgattttccgaagaggatcgtgcgtacatagtccattaagtcttgttgttgcttttcacgttcgtccatcatgaggtagtccactgccagtatcttgctcttccatgcaaagttggcacccagattgatacgcttccattgaaaatcgaccgtggctttaaagctgtgcttcgggcggtatttcagatatttgcctgtattcgacttctccttcatctgaagggcgtcggtgtataaatcttctatttcattacgttccttgtagtcggcatcgcggggctcagtatatacatatcccagattatagaatagtttcgtattcttgttgaagtcataaacgccgtttgtcgaaatctccataccgtagatttgcgctttcgatacgttgtggaactgtgctccgataccgaaacctttgccgtccgtcaccatctggatggcatcgctgatgctgttgatcatgctgtagtctgcgttattgaacagtccgaactgaaattcaaccatgtctctgtactcggtatagaatccggctacgtctacaaatccttggaagttgccgatcttgtatccttgcttgaatcccagttcggcattgtaacctttctccggtttgatgtcgaggttcggatagatacctactcctccgatgtccttgcggagatatttctcgttgatggacgggttgcggtaaccttgtccggcgctggcacggataaagctgtaatcggctaactgatagttcagtccggcacggaacacggggcggaacggaactttggctccgaatattttcgtttctgcttcacggtgatggttgttcacacggtagtattcggctcgtacccctgccgatacgctcaggcggttccagaagcgctggtcgtactggaagaaggcggctacattatcgcttttgtacacctgatccatgatggaagaattgtagcggacgtgctcgtaagtcattccggtagtgatctgtgcgccgccgtcccatttcttgttgaactggtagtcaagataatagttatagttcttgtccgttttcgtctggacgttgtttcgggtcggattcattacgttggatagccaggggatgagatcactggggacttgtccgttttgtatgccgttcatcaggtcacttggcagtccgttgtccatcacccacgagatgaggtcacaataatcggcggtggtggcgttggggaagatgttgcccaaggaagtgaataccccgttcatggcatcttccagattattgttgatcagaccggaaccgatgccgaccaatgccgggtagagcgaactgtaatcgccgcctgctatattctgtatagtctgggcgttcgttcccatattcccaagaatatcagtgatggatgctccctgactgggcttgactatgttgtcggcactatggtagaaacgtcctttgatcttgtgtgacgttccgttttccggatttacgtagttgatgaacgggtcgatgtggaagttgttttcttcgcgccccatgttggtgaaaggagaaggtttgtaaacttctgttggtgatctccagatgaagaagtctccgtactgattggaaagaaagtcaacgtttagaccataattcaatatcttcatacccatgtccggttgatgataagtcaggttgccgcccatgcggaaacgtttgttatatccttgctgccggtatccttcatcggtaaagaggttaatgcttccgctgacgtcaaagttgccgatacggcgggagtgggagagatcgaatccctcataaatagggtttcgtatgccgctgagaaggtttccgcgcaggatgggtttgacggaatacttgtcgtctttccagaaactcttgtcgctccattggtattcgtcattctcggcatcgccatatataccgatataggcgttgaagcgggttttcggtgtcaatcccggacgggcggtacggatattgataataccgttgagagcagacgaaccgtacaaaacggatgaggctcccttgattacttctatctgttcgatgttttctagaggtacggtgttccagttgatttctccggtttttggatttagggtgctcattccgtctaccagaatctggctgcgggcacctactccgtaggtccatccgctgccgccacgcatggaaggctgtttgtccacaatgtccacgccgggcagcgtgcggagagtagaagtgatatctgtcggtgcctgacgggcgatatcgcctgctttcaccaagtccatggatacggtgacattactgagcttttgctcaaagcgtccggcgcttaccactacctcttccagcagcttggtactttctttcatgtacacgtctttagtgatcacttcacgtttgccgataacaatgggcatcagaacgtcttcataaccgatatagctgaacacaaggtcgacacctccctccggaagtttgatttcatacgctccgtttatgtcggacacggttccctgattgccgtgtaatttgtacgttaccgctgcgccaaccaaaggttcattggtattggcgtcatatatatgccctttcaacgtttgggcaaaactagtcccgaatccggcaaggcagatgaataatgtcagaatatatagtttcttcattgtttctgtaatttatgtttttttctggtggaaagtctcattcgtttttgtctgtcaggtcgagtcccaagtccagttgggtgatgatagaccagttatcatacagtggacctatataggaattgtacaacatcggaccgaagttaggaataccttccatcgctggctgaagattggggatgaaggctatgagagggctcagtgcttccctgttcagatagatatgcgtatgtccgttctccttttctatctgcatggggatgccttcctttatccacgagaagaacatctgaaaactttggtgatccatattggcgatcatagataataaagagttatccaatgattcgctcacaattcccagtagagtcttcagtaagaaaggattagatttcaggatagcatctgcaatgcctgctatcagatgagcatcgaccgtctgtccctgcccttgcatggtcaggctgataatacccggaaggttcagtttgacatagagaaggtcatttttcagataccagaaagccagtccccggggagactttgcataattgcgtccctgagttgcgtcagtaatgtcatcggcagacaatgtattgaacattaacttcatcatgatgaaattaatgagttgttgctgggatgcgggattatccatgtcgatttcgctgaacttctgttcccccaattgcagttcgtccgatgtatattcggccgtaatgtttccgtcggattccaaagtgacacttttgagtaattgcggtaagaggtatcctcccatgccttttataataacggatacggttgcgtacaaacttcccgcatcctttaccatctctaaatccatgtcggtataaagggctgctgtcagtatctgattgtccgactctccccattcatattcgccggttgtctgattgcgtacgacatcttttcttctgccgcgtgtcagttcgctcatctgataagtttttatccattgattttgcggcatcgttacattcaaatccagtttcatcgttttcggagtaatggagccggcgtatttcacagttgctcccgcgcacgaaactgtttctccgctgaacgtatagttgtcttcctgctctgataagtttatccggaatgatgtctctttttctcccggaatgatatcgtttaatgtcaatgttccttttttactgtcttccgtctgaaagttgacggtttttccgattaacttttctccgctgtaggtcaggtccagagtggatggtttgatatacgagccatattcctggctgagttctcccggccagaacagcttgtcattgtaggtttcttcgcaagatgcaaggaagaatgttgtacaagctacataaaatagttttcgtaatgttttcattctcttttttgtttttatttcaacgtatttattaaaacattgcaaatgtcggttaatattgtttctacatcaagctctattcttggtattcgatgttctattttaactattttatatgcacgtgtatttgaatagataattgtaatgttctcttttaaataatagatgttctgtttttcatattttaataaaggacttggaggaaattcgaatggaaaaagatatctttgtggaactaaatttcttaattatgatcatagatgatgctcttcccaagtttgaccttccggtcgattttgttacagatgacagcataaccggcgatattctgaatcaatacggtcgttttccctgccatataaaggcgggagtctttgttctttgcacgcggggaactgtacgtgccactatcaacctgtccgagtataccattacccataatgactttgtgactgtcctccccggatcattcatacagattcacgaagtatcttcggatacccgtgtttgctttgcgggcttttcttcggaatttatctcccgtgtgagttatgtagagacctatctggattttctccctatgattttggacaatcctattatggcattacaggaagaggtagcgcaattataccgaaacgctttcagcctgcttatccgtgcctattctttaccgaacaccctggataacaaagaaatattaatgtctatttttactatattctttcagggggtgggtgagttgtataaacgctgtaagccgactaccaacgaacctatcaagcgggaacatgaactttatcgccagtttatccagttgctgatgactcactatacacaggaacacgaagtttctttttatgcgaagaagtgcggagtaactccggctcatttttccggtgccatccgtaaagccagcgggcatagtccactggcgattatcacgggaattattatcatgaatgccaaggcacaattgaagtcaacccgattgccggtgaaggaaattgctttttcattaggatttaataatctttccttttttaataaatatttccgtaaacatgtggaaatgactccacaggaatatcgggaatgctaatggatgacggtggttagaccgatgatggatggggatgctccggaggatggtaaaacagcagtttaccgttgaaataagtcctttggtcgattatttttgtggagaagaagtaacggttctatctttgtatcagtaatttggaacaatgaagcatggaaagactgcgtaaacaacaattgctggagcagagcatttatggggctatctggactgttatttttcttctcccactgataggcggatactttgccgtcagtggtggactcgaaaaagaagaaatccgtgtaattgttcatgattcgtggttgagcatccttccttttttcgtcttgtttctgttgaataattatggattagttccgtatttcctgtttaagaaaaagtactggtattatattatttctttggtttttctaatctctactgcttgttgggttattcctgatccctctatggagcgttttccaaaggaattcagatatagagatcttcgcaagggtaaaggaaaaagtcagagagacctgattattaagatgagagagaaagctcggcaggaagagtctgttcattgggaagcgcctcaggcaaacgatccggttttggaaaaaccgcaacgaccgggcggcttctctaaaccgactctttatcccattcctcccttcaccatccgttaccttattcattgtataattgcttttttgatggtaggctttaatattgccgtcaaactgttttttaaatcctttcgtgatgaggaaatgctgaaagaactggagcatcagcgtttacagtctgaattgcaatatctgaagtatcagataaatccgcatttctttatgaatacattgaataatatccatgcactagtggatattgatacgggaaaggctaagagtacgattgtagaactttctaaactcatgcgctatgtgctttatgaggccagtaataaaaccattctgctttcgcgcgaggttcagtttctggagaattatgtcactttgatgagtttgcgctatcctgagaaagtttctattgaaaagaatttccctctcgaagtgcccgaagttcaaattcctcctttactttttatttcttttgtggagaatgcttttaaacatggagtgagctacaggaaagagtcatttgttcatgttgtgatgcaactggaagaaggaaaccgccttgctttcagatgtaccaatagcacggggacttcgtctaacgagcaacatcacggcatcggtctggagaatatacgcaaacggttgcggttgttgtttggtaatgattacaccctctccattactgaggaagatgataaatttgatgtcttacttattatacctttattataatgaaatgtatagcgattgatgacgagcctttggcattgaagcaattgacggattatatatcctgtgtcccttttctatctttagtcaagtcctgtcaggatgcttttgaggcgatgaaggtgttggcagacgaagatatagacctgatatttgtggatatcaatatgcccgatttgaatggactggattttatccgctctttaatcagccgtccgatggtgatctttactactgcttattctgaatatgcggtagacggtttcaaactggatgctgtcgattatttattgaagccgtttgaatttcaggatttgctgaaagcagcggataaggcacgaaaacagtacgaataccgaatgttggaacagcagggagaactgggaaatagttcgcagatcaaaggagattccttgtttgtaaagagtgactacaaagtggtgcgcattgatgtgaaaaacatccggtatattgaagggatgagcgaatacgtgcgtatctttatagaaggagaagataaaccggtcataacccttgccagccttcaaaaaatggaggaacggcttccaacgtattttatgcgggtacatcgttcttacattgtcaatctgcgtaggataaccgaagtttcccggcttcgtatcatctttgataaaaatacatatattcctgttggtgataattataaggagagatttgcggagcatattagcaagctgagtttctcttaagtatttggctgtttacagtatacaagagatcatcattaaacataaaagctccggaagtcatcttaacttccggagcttttatgtttaaataagagtgaatctttatttgatacctagtttctttgcaatttctttaggaagtgcatctttgtgcaccaggatattcattgttttgtaagcaacgaatgctttggatgcataccagatacctttgtacttaccacttgtaccccaagagttctttaccatgaagtattcttttccgttctgatctttggcgataccgtagattaccattccgtggtcatctgtagtttcccagttgtcgaaagcagtctggcgcatttcctgagtgatttccatttccggaagcggtttggaagtcagttctttgcgtttgtcggcagcagtcagacctgtccagcgagccatatccgagccggtaagttctgctcctttggcagcatccggcattacggcaacaccgtcacgggtgaaaccttgttcgctgacgtcactaccccatgcgaatgtatatccttgctttacagcgttgtccattacagccatgaactcgtctagcggaagattgtaggacagaccattacgccagttgtcctgaatctcgatagcgaattgagaatagaaaggatggtgtgtatatgaagtcagtgatacataatcttcagctttcagtccgagtgattcagcgaaagtcttcggagtatattccttgcctttgtaagtgaaattctccgggcacgctcccaaataagtatcgtagatggcgctaagaccttttttccataccggagtcagtttagtgagtttacctttggcgatcgcattgatgtatccttctgcaacagcgtccagttcattgtgtaccggcagtgtatcaccatacatgatacccggcattgcttcttgcggaaccagtccgtaattcttcatacaatagatgatgtcatagaaacttccgccgggagagaaagaactgtcgccatgatagcgtacatagtttgttccgcggtcttccattgttttgtgtacaacgaacatttccgaaaggtcgtattcgcctttacccaaacgtagtagttctgattccaggaatcccaaagcagagaaactccagcaagtacttgaacgattctggttcttgatagaagtaatcggattttctttcactgttgtgaaaacgaagccctcttcgggttttgcgtcttgtgccattgcgctcaggctgaacaagcctaaggcagcgataaggatactctttttcattctgatgaaattaatattaaattgttttggttacaaagatatggattccttgggggaattccatattcttgcatagattttgcataaaaaaagagtagaaaatgctgtatcccaccttctctactatacaaaaagaggaaaaggcaatcgtatgtgatcaccttttcctctttctacatttattttattttgattccgagactttctaaatcatcgagagtaacagtataattctctctgcttttcatccgtttcattactaactgtccgacttgttcggcatcccttttctccatgaaaggttttttaccggaaatacagggtatgaaaggctgaaaaatcgttatatgattgttgtgagatatttgatagccatatcctccgtttacctcaatcacttccattgaaaaagaaggatcagaagaatctgtattagaaaaagatgctttggaaaaagacagacaagcgattactgtcaatattcctgcaacagagcatccgagtatctttttcttagtcattctcttcccattcatatggatgtaactcccatgtatcgtcataataatagctgctgctgcctccggtagtgataatacctcgtctgccggtagcgaaacaaaccgctttgatgcgtgaacttccttcgaaaggagtgtagtcaaaatcatcttccgtttcactgctgcgccataagtctttagcaggatcgtatatccagtaattacttcggaagctaccggaggctgtttgtcctaaagtgatgtatgcctgatcgtctatgacaaaagcacagccgtaggtacgggtgattgatttgtaatcgtcatcgtaatcgtcactgctctggtctgtaatgtcccggagacgtacccatttgttctcttcacttttgctgggatcgaacttccagaagtcatcgacatccttaccattatttgttcctcctacaatgtaggcgacattatcgataataaaggagagtccgccggttcttttctgaccgccgaatccattgacgatagtccattgactgccggaagcggctgtcggatcaaagcggtaaaagtccttggtctgtttatcatctttagactgaccggtgcctacataaccgtaattaccgatagcgaaggctatggcgttgatccgggcatctccggggtagtcatccatctgtttccaggtgtccgttgccggttcatattcccatgtatcttttaaatatgcatatcctccggtatgtaatggatcgtcgtctctgtatacggtatatcccgtagttacatatcctttggagttgatcgcaaatccgacagctccattccgggccgccgcctcttcgggaaggtcggcacattgcgtccaccagtcgttatcaatattatattcccaacagtctctttcccgttggtcttttccccgatatccaccgcacaaatatccccggttatctatcacaaatccggctgcgtcctctcttgcccttccatcgaaatcagaacggcgataccacacacctaatgtgtcgtcatcatcatctgaacatgagaacatggatagcatagctattgacactaataacagttgtagttttttcattatttccattcgttttattacgttttaaacttggggcaaatgtagttatcaatgcggttgaagaaaaaagatatcgacaaatagccctattttctctatcgaacaaaaccgagtctataaatagcgggaaatagtcgattaattttggggatgctttcctaaaggggttcctttgcaactcaaaaataatattcattatgagactattcattacacttttttattcattactcttattttgtacaatattctcctgtagggatgaatcttcttccattggaagtaaatgggtagagagttcttttataaatgtagtgacagatacgtgtatggtgactctgagcacattattagccgactcgctggcaacttcgggagatacgatctgccagatcgggcgatttaaggatgctctttacggagaaataaaaacttcgttttatgcagaatatcaagtaccttctcactcacttaatgagactactgactatcagtttgactctatcacgttcaaatggtatacttccggggattatctgggggatacgctggtctatcatcgtattgacttatatagtttatcgcaaggactctctctggaagataacggttacctgtttaataagaccaacgttagctataatcagaataatcatcttggttctgtctctatacgtcctacacccggctatcggaacgagttgcatgaaatgcgcctgcctgacgaatggggaaagaagtggtttaatttaatgctggaagatgatgaatgtatggagtctcaggagcgtttccgggctttcttcaaaggaatagcttttattcccgatgaaaacgggacgtgcatcaacggctttcaggtgaacgattcgagtttttgtattaccctttattatcatgaactgaaagagaagcctacggaacagaccttagtgttcaatgccagcacttcactgaactacaccaaggtggaacatgaccgtactaatactcctttggagaatctcaaggcaggaacagattatgaactgccttcttccgagagcgaacatcaggtgtatctgcaaggactgactggtatgtatatcaatgtcgaatttccctatctgaataatctgaatcagaccggaaggcttgtttccattgaaagcgcagtactcaagctatatcctatcaaaggtacgtataacggaaagtatccattgccgaaatcgttgtctctctatacggcagaccagaataacgccactcagagtgtcattactgatatctcgggaaataccgtgcaaacgggaagtttggtggaggataatatctattatgaagatactcactattcgtttgatatcacctcgtttattcagaataatctggggacagcgggggagagccgtgagaaactgcaaatattcctctctgacaatgctttttataataccgttcagggagtagtgctgggagatagcaaacaccctgtgaatgaccatgataataatgtatcactcactatttattataagacatatacgaaatgaaaagaagagttttatctatccttatactaggtgcgaacttattgaatgtggctgcccaaaatatgacgagttcgccggtttccatgttcggactcggtgaattgtctaccggagaaggcggaatttattcaggcttggggggagttggtattgcattgcgtggagaaaatgtgattaatgatgccaatccggcttctttaacgggattattgccgcagtatttctttttcgatttgggtgtcagcgggtcttatctgaaatattcacagtcaggagcgagcaatcattctcttaatggcaatcttaataatttggctgttggattccgtatagctccccgttggtatggagctatttttatggctcctgtcagtagtgtagggtatgccatatcgcttgatcaggatgtggcgggtacggacggaagtacggtgacttcactttttcaaggtgagggaggggtatccaaaatgggcatcagtgttgcgcacgaactgtggaaagggctttcactgggtacaaacttttcttatgtgggaggaagtattttacaaacagaaactcaagggagtgcaacagaaagtaatagttcgcataaacatacgatttatgccgatttcggattacagtatacctataagctggatcattaccgttcggtggtggcaggagtcgtatatggatattctcaagacttgatgcaggataatgatcatgcggtgagcagtagcagttccagcggaaacattgaagaaaaaggaaaaaagtatcgcacttgtttgccgcagtttatcggcttcggagcgtcttatactacgttgcgctggatggcttccatcgactataagtttgttgactggagccggctggagtcttcgcattccagtataagttttcgtaatcaacatcgtttgatgctgggaggcagctatacattggggaacccttatagtaaaccggtacgtttattgcttggagcaggtatgggaaattcatatatttcagtgcatgataagacgacaacgaattattatctgagtaccggacttaattttgagtttcgtagccgcagtacgctttctttaggagtgaaatatacagatcaactgaaggtgacttcggggagatttaaagagcagaaactttctttttttctgaatctgactttctcggaaaagacttataaggcaaaattgaagtaactggcagggtgctttctttatctggcggatagggagagcatttataatatagaaaagggtaccctcagcggtacccttttctattatttattgcctttcggtgtcactacatagtcttcttttataaactcatcataaacccgtttaggatgatcgaatgctgcggttccattcctctgttcattgaagttttcccggcggaattgtttcagcttcaggttgtcttcggcatattctcttaacttcttatgttcacgtccatagagtgaactttcagtaacatcagaatcaagcaggctttctttaggagtaatagtgggcaggagcacttgttccaatagtccacgataggcaccgttatattcgcaccagacaagatcgttggcaacgaatatacgatagaagtactttgaccatgcggttttaatttcgatggattgagcgtaaatctcaatcgttgcttctgaaccatacgcttggtctcggatcacgacggtcgtccgaccgctgatttcttccttcacggaagtttgccatttgtcggaatgcaggatttcctcaatgagttccggcaacttttctttaatttcaaactgtattctcatggtgcttgcctgcgggcaggactttttttgaatttcctacttaaaacaattaagctagcctaaagttacatagattgaagcaaaaaaacaagattttgtttgaatatttactatttttgccaaactatctgcctttttcgtttgtttttattataattatgcaacaaatagcaaaaaaacaagtttatgcagaataaagcccggaagaattacatcatttatgtacttatgctccttctgtttggagggttgatttatgtcgctattgaagagggcgacaggttttcacatcacgctgcgaatacgttaaacacggtacaagacgggccttttgccatgtttctacaatttatgcaagataatctgcatcatccgctgactacgttacttattcagattattgccgtgttgttgatggtgcgtcttttcggctatttgtttagtcttatcgggcagccgggagtgattggagaaatcgtagccggtattgtcttggggccttctgttttgggactttttttcccggaagcttttcatttcctgttccctgtccattcactgaccaatcttgaattgctgagtcaggtcgggctgatccttttcatgttcgttatcggtatggaactggactttagtgtgctgaaaaataagataaatgaaacgctggtgatcagtcatgccggtattttagtacctttctttctgggtatcctgtcttcttattggatttacgaaacgtatgccgccgatcatactccctttctgccttttgccttgtttataggcatttccatgagtattaccgctttccccgtgctggcgcgtatcattcaggaacgaaatatgaccaaaactcctttggggactcttgcgattgcttctgctgccaatgatgatgtgactgcctggtgtttgctggctgttgttattgctatttcaaaggcgggtagctttgccagtgctctctattctgtgggattggctatggcgtatattgcagtcatgtttttggttgtgcgtccgtttctgaaaaaggtgggagaggtgtatgccaataaggaggcgatcaataaaacgtttgtggcatttatcctgttgattctgatcatttcttcctgtctgacagagattatcggtattcatgctttgttcggagcgttcatggcaggagtggtgatgccgtcgaatctgggtttccgaaaagtgatgatggaaaaggtggaagacatttctttggttttcttcctgccgttattctttgctttcacaggtttgcgtacggagataggtctgatcaacagtccggagttatggatggtgtgtttgttgctggtgacagtggccatagtcggtaagctcggtggctgtgccatagctgcccgtctggtaggtgagtcatggaaggatagtctgacagtgggtaccttaatgaatacgcgcggattgatggagttggtggcattgaatattggttacgaaatgggagttcttcccccgtctattttcgtaattttggtcattatggcgctagttacaacctttatgaccactccgctgctacatttagtcgaacgtttctttgtacatcgggaagaaaagttatctttgaagcgcaaacttatattttgttttggtcgcccggagtccgggcgcagtctgctttccatttatgatttgttattcgggaagcagttgaagaaagaacatgtgattgcagcgcattatacagtgggtacggatttgaatccgttggatgcccagcattatgaaagcgaaagctttgctttactcaaccaaagagctgtcgaactgaatattcaggtggacaatcactatcgggtgacggataagctggtacaggaaatgattcattttattcgcaaagagcatcctgatatgttgcttttaggagccggtagccattaccgtcccgaaatgccgggaactccgggagctattttatggctgacgctcttccgtgataagattgatgacataatggaacaggtgaaatgtcctgttgccgtatttgtgaatcgtaattatcgggaaggagcactggttagttttgttttgggaggaatgattgatgtattcctgctttcgtatctgaatataatgttgcaaaatggtcattcggtgcgccttttcctttttgaaacggacgatgaagagtttcatcagtgcatagatgacttgttggctcattatgctgatcagatagtagtggtatggtttgcaggagtagaagaattagtaaccaaagagagagatggattgctggtaatgagccatctttcctatacaaaattatccgaggatgagcttgtgatgcgggaattgtcatcattgctggttatccgtcggaataagaataagggagaaaaaaatgaaagacttgaaattggatgagcatacggggttagtacttgaaggaggcggaatgcggggagtattcacttgtggggtacttgactatttaatggatcatgatattcgttttccttatgcgatcggggtatcggcaggagcctgtaatggcttgtcgtatgcatcccgccagcgtggtcgtgccaagttcagcaatattgacctgctggagaaatacaattatatcggcctgaaacatctgctcaggaagcgtaacattctcgactttgatttacttttcaacgaatttcccgaacatattcttccttatgattatgatacatactttgcttctcccgaacgtttcgtgatggtaaccacgaattgtatgacaggagaagccaactattttgaagagaaacgggataaaagccgtgtgattgatattgtccgggcatccagtagcctgccttttgtttgtcctgtcacttatgtggatggtgttccgatgcttgatgggggaattgttgattctattcccttgcagagagctattgcggacggttacacccgtaatgtggttgtacttacccgtaatcgcggttaccggaaagacacgaaagatatccgtattccatcctttgtctaccggaaatatccgaagttgcgcgaggcattgagtcgtcggtgtgcagtttacaataaacagctggaaatggtggaacagatggaagatgaaggaaagatcatcgtcatccgtccgcagaaaccggtgatggtggaccggattgaacgggatgtacagaaactgacagaattttatgaggaaggatacgactgtgcaagaaacctgttcgaattctaagtaaataataaatgacctgttttgttgatagtctgcatgaagaatgcggactatatctgtgatatttatatatttctgtataatatttctacaaatactcttctttttcttcaattaatccgattttaagtcattattaattcgtttttgtggtatttattaagggatgcccctttactttgctgaaaaatatttttgggcagacttaataacataacatgaaaaataaaagaataacatggtaaaaaggtttgattggttgttggtgtgtttattgttttcaataggggtgatggcacaatccggcgggaaacagtataattcttacaagggattggtcatggcaggttatcaggggtggttcaacacccctggtgacggctcgggccgtggttggcatcattataatggacgtaatggttttcggccggggtcatgctcggtagacctttggcctgaagtgtcggagtataagaaactctataagactgagttttcctttgctgacggtaaaccggcttatgttttttcttctcatgatgaatctacggtagatgtacattttaaatggatgcaggagtatggactggacggagtatttatgcaacgttttattacggagatacggaacgaaagcggattgaaacattttaataaggtgttgaattcagcgatgaaatctgctaataaatacgaacgggctatctgcgtgatgtacgacctgagcggcatgcaaccgggagaagagcagttattgctgaaagatatagcagaaatagcagaacgctattctttaaaagaccatgcaaagaacccctcttatctgtatcacaatggtaaaccgctggttacggtttggggagtcggatttaatgataatcgtcgctatgggctgaaagaagccgctcatattattgacggcttgaagtcacagggattcagtgtgatgcttggagtacctacgcagtggcgtacactgaatggggacacagaatcagatccccgcctgcatgagcttatccgaaaatgtgatatcatgatgccttggtttgtagggcgttataatgaaacgacttatcccaagtatcagaaactggtggaagaagatattcagtgggcaaaaaagaatcaggtagattatgctccgctggttttccccggtttctcatggggaaatctgaaggggaaagatcataattcgtttattccccgcaataaaggttctttcctttggacacaattgatgggagccattcgggcgggtgctgaaatgatctacgtggctatgtttgatgaaatagatgaagggacggccatctttaaatgtgctaagaaggtgcccgtaggtaaaagtacatttgtaccccttgaagaaggcgtggaaagcgatcattatttgaaattggtgggagaggccgctaagattttaagaaaggaaaaagctgtggcatttagtacaaagctggatacgaaaagtccgaatccttttatccggcatatgtataccgctgacccgtcagcgcatgtatgggaagatggcagattgtatgtgtacgcttctcatgacattgctcctccgcgcggatgcgacttgatggaccgctatcatgtattctcgaccgatgatatgattaactggacggatcatggagaaatcctgagttccgaccaggtgccgtggggacggaaagaaggaggttttatgtgggctccggattgtgcttacagaaacggcacctactatttctacttcccccatcccagcgaaacagactggaatgatagctggaagatcggtgtagctaccagtgacaagcctgcggagggattcaaagtacagggatatattgagggaatggatccgatgatcgatccttgtgtatttgtggacgatgacggacaggcctatatctacaatggtggcggtggcacctgcaaaggtggcaaactgaaagataatatgatagaactggatggccccatgcggactatggagggactctcagacttccacgaagcgacctggatacataagtataacggaaaatattacttgtcttattctgataatcacgacgacggagaaaaacataaccgaatgtgttatgccatcagtgattcacctctggggccttgggaatacaagggaatttacatggaacccaccgatagttataccaaccacggctctattgtcgagttcaagggacaatggtattctttctatcacaacagtgcattgtccggtcatgattggctgcgctctatctgtgtggacaaactgtactacaatccggacggcactataaaaatggtgaagcagactaaataacagatagatcgatacacaggcaattaataaatagaatccttataatagttgaaaaacgaatatagcatgaaaaacaaaatgaaatggatattggcagtaggattattgtcatgttcggtagcaatggcacagcaacagagtgatatattatcggtatctgcttctgcaaatgcagaaaatgctgctttagcctttgacaggaatgtaaaaacgatgtggacaatcccttctcaggcactaaaggctgaacaatggctgatgtttaccattcagcagcccggagatgtttgtgaactggaccttcagatgcagggtatcaataagaatgaactgaaagaagtactggatatctttgtcacttatgaccccatgaatctgggaactcccgtgaactaccggatcgaagggagcgacaaacagatgaaagtcaaattcactcctaaatacggtgcacacgtcaagctgaattttaagcaaggaaagctggataagcctttctctctgaaagaaatttcagttcttgtggcagaaaaggtattgacggacagtcagggaaaagtaaccgaccgtcggtatatgga

SEQ ID NO: 4537 - DNA, 62343 bp, Unknown
  gut microbiota DNA sequence
tttcaaggcttcttcctccttatccaattcaagcataactcttccatgataaaatagagcctttgcatacattactggggaggtctgagtttttgtatagtaattcaaagctaatgcaatcaacgaatccgaactaaacttcatatagttcttatccattgcctgcgtcatcagaagagcataagtcgcctgtgactcgccccacaatttttcaggttcaggaataccttttaatagatttagagcactatccggacagagatccatacacttttccacatttgaaaaagtcatgttgagagcgtccatatctctatgacaggaaactatcaaaaaagaaagaataaagaaaaaagcaatacgaatagaaaaggacgttttcatcttatcttgagttttatgcaaaaatacgcaaaaaactcaagatttatttcttcggacctacattttgttgcatccgttgatgttcttctatcaactgcatgttctctttggccttcgtcaagaactctcgcaccatcttattactcttaaaagaatagggagcatcctttattatatcatctatttgtggagtcataataggatatggcaaagagctgcaaagcattataaagacattaggtcctaatacattttcataattatccgagatgaaagtcttgacatattgattcatcgctttcatcagtgaatctccttctgcaagtaactgttcatgaacttcttccagatcagcaccatccatcaccatacgggtttcttttctttccagttcaccgatactttcttccattgcattcttctttgcaataaagtcatacaatgctgtgttcaaaggagttccaaccgctttgagatcggtattgctaatagtaataacgatcttgccactttccaacacaaccggcatgacactttcgtcatccatataaagtgttgtcatttgtacagaatcgattttccctttcattgaaaatgatccatgtactacctcggccgagtccagttttgtccattctccatccctcaaagtcttcagatataacatttttccatccagaccatttactgaagatgttccttctatcttatacttatgagtacacgaagctagaaagggaagcaaaagcacaaaaggcaaaatcttattcacgttcattgtttcattaaattctgggtacaaaggtacaactgattcggacttaaaagaaacattttatcaatatttaaaacttgtaagactcttttctttaataatccttataaacagaggtgggagatcatttttttcatttagtttatctaaatttgcagccatgaaagcaacaacttatgcaccttttgccaaaccgctttatgtcatggtaaagcccgtgggagccgtatgtaatctcgcatgcgaatactgctattatttggaaaaggcgaacctatacaaagaaaaccccaaacatgtaatgagcgatgaactactggaaaagtttatcgacgagtatatcagctctcaaaccatgcctcaagtgctttttacctggcacggtggagaaacgctgatgcgtccgctttctttttataaaaaggcgatggaactgcaaaagaaatacgcccgcggacgtacgattgacaattgtatccagacgaatgggaccttactcacagacgaatggtgcgagttcttccgtgaaaacaactggctggtaggggtttctattgatggcccgcaagagtttcatgacgaataccgcaagaacaaaatgggcaaaccttctttcgtcaaagtgatgcaagggattaatctcctgaaaaaacatggagtagaatggaacgctatggctgttgtgaacgatttcaatgccgaatatccattagacttttataatttcttcaaagaaatagattgccattatatccagttcgccccgattgttgaacgcattgtttcacatcaggacggtcgtcatcttgcctctctggcagaaggcaaagaaggagtattggctgatttctccataagtccggaacaatggggtaactttctctgtacaatttttgatgaatgggtaaaagaagatgtgggcaaattcttcatacagatattcgattctacattggctaactggatgggtgagcaaccgggcgtatgtacaatggcgaagcattgcggacatgccggcgttatggaattcaacggagacgtatactcttgtgaccacttcgtattcccggaatataaattgggaaatatctatagccagactttggtggaaatgatgcatagtgaacgacagcataacttcgggacaatgaaataccaatcactcccaacacaatgcaaggagtgcgactttctatttgcctgcaacggagaatgtccaaagaaccgcttcagtcggacagcggacggcgaacccggtctgaactatttgtgcaaaggatattaccaatactttcagcatgtagctccctatatggatttcatgaaaaaagaattaatgaatcaacaggctcctgccaacatcatgaaagcactaaaagacggaagtttaaaaatagaatattaacatcataatttataattgttatcataaagtaatgaacagactaagactttatttattagcgctgacagcgctgctggtatgtaccgtaaaagcggacgaaggtatgtggttattgcaactaatgcaacagcaacattccatagatatgatgaagaagcaaggattaaaactggaagcccaggatttatataatcccaatggtgtctctttgaaagatgcagtcggtatattcggaggaggatgtacgggagaaatcatttcaccggaaggcttgatcctaactaaccatcactgcggttattcttctatccagcaacacagtagtgtagaacacgattatctgacagatggtttttgggctacatccagaaatcaggaacttcctactccgggattaaagttcaccttcatcgaacgtatcgaagatataacagatattgtgaatgctaaaatcgccgccaaagagattacagaatctcagtcattcaccggtgctttccttgaaggactggctaaagaactctatgaaaaaagtgacctgaaagataagaaaggaattgtaccgcaagcccttcctttctacgcaggaaacaaattctacctgttctacaagaaaatatatccggatgtacgtatggttgccgctcctccttcttctgtaggtaaattcggtggcgaaacagacaactggatgtggccccgtcataccggtgacttctccatgttccgtatctatgcagatgccaacggagagccggctgaatacagcgcaagcaatactccgctgaaaacgaagaaacatctgtcaatctccatcaaaggtttaaaagaaggagactatgcaatgatcatgggattccccggaagaaccagccgttatctgactgtgtcagaagtaaaagaacgaatggaatcaaccaatgaaccgcgtatccgcattcgtggtgcacgcctggctgttttgaaagaagtgatgaacgccagcgataaaatccgtattcagtatgcaaacaaatatgcaggctccagtaactactggaaaaactctatcggaatgaacaaagcgatcattgacaatgacgtattgggcactaaagcagaacaggaagctaaatttgctgaatttgcaaaggcacaaaacaataccgaatatgccaatgttgtgaaaaagatcgatgatctggtagcacaaacagcccctctcaattatcaactgacttgcctgactgaagttttcttcggagctatcgaatttggtaactcaatgttaactaaaacacgggaagctttggttgataaaaacgactctctgatcaaagttcgtctggaaggtctgaaagaaaacttcaaaagcatccataacaaagactatgatcatgaagtagaccgcaaagtagctaaagtactgcttcctctctatgcagaaatgattccggcaaaccaacgccctgctatctataaagtgattgaacagaaatataaaggagactacaataagttcgtagacgacatgtacgacaagtctatttttgctaatcaggctaactttgataaattcctcaaaaagccgacagtaaaagctattgatgaggatctggctttgcaatatgcccaatccaaatacgatcaatacggtaatctccttgatcagctaaaagagctggacaaagaacttgctctgctccacaaaacttacatccgcggtttaggtgaaatgaaattgcctgttccttcatatccggacgcaaacttcaccattcgcctgacctatggtaacgtaaaaccatatgatccgaaagatggtgtacactataactattacacaacaacaaaaggtattcttgaaaaagaaaatccagaagaccgcgaatttgtggtaccggccaagttgaaagaacttatagaaaagaaagactacggtcgttatgcattacctaacggtgatatgcctgtctgcttcctgtcaaccaatgacattaccggtggtaactccggtagtccggtattgaacgaaaacggagaattgatcggctgtgcattcgatggcaactgggaatctctgagtggtgatataaactttgataacaacctgcaacgctgtatcaatcttgatatccgctacgtcctgtttatccttgagaaattaggaaactgcggccatctgattaatgaaatgactatcgtagaataaatgagaaaacaaattatatttgctattttttcactggcaactcttagcatccacgccgatgaaggtatgtggatgctaactgacctgaaagcacaaaatgcagttgccatgcgggaactcggtctggagattcctgttgaagaggtatacaatgccaatggcttctctctgaaagatgctgttgtacacttcggtggcggatgtaccggagaagtcatttcttctgaaggactggtactcaccaatcatcattgtggttacggagctatccaacaacatagtaacgtagagcatgattacctgacagaaggattctgggctatgaaccgtgatgcagagcttcccacaccgggattgaccgtcacttttattgaccgtatccttgatgtaactagttacgtaaccgatcagttgaagaaagatgaagatccgaacggtactaattatctgtcgccaagctacctaagcaaagtagcagaacgcttcgccaaagatgaaaatatagaagtcactcctgcaaccaaacttgaacttaaagctttttacggaggaaataaatattatatgtttgtaaagaccgtatacagcgatatccgcatggtaggtgctcctccctcttctatcggtaaattcggagccgacacagacaactggatgtggccccgccataccggagatttttccctcttccgtatctatgctgataaaaatgggaaacctgccgcatattctaaagacaatgttcctttgcaggtaaaaaaacatttgaaaatcagcattgccggagtacaggaaggtgacttcacctttgttatgggattcccgggacgcaactggcgatatatgatttctgacgaagtggaagagcgtatgcagactaccaactttatgcgtcaacatgtacgtggggcccgtcagaaagttctgatggagcagatgctgaaagatcctgccgtacgaatccattatgcaagtaagtatgcatcttcagccaattactggaaaaatgcaattggtatgaacgaaggattagtacgtctcaaagtactggataccaaacgtaagcaacaagaagaacttttggcccgtggccgcgaaaaaggtgatgattcttatcagaaggcatttgatgaaatacgttctatcgttgctcatcgacgggatgcactctatcaccagcaagcccttaacgaagcacttgtcacagcacttgactttatgcgcctcccttctacaacagaaatggtcactgcccttaagtcaaaaaacaaagaacaaataaaaacagctaccgaaaatctgaaacaagccggtgaaaaatactttgcctccattcccttcccggaagtagagcgaatggttgccaaaaccatgctgcaaacttatgccaattacattccggaggaacaacgaatcaatattttcgagatcataaactcacgtttcaaaggaaatatagattcatttgtagatgcttgttttgaatattcgatttttggtaatcccaaaaactttgaaaagtttattaaaaagccaagcttatataagataggtcatgactggatggtacttttcaaatactccatcacagatggaatattgaaaactgccattgctatgaaagaggccaatcagaactacgacgctgctcataaggtatgggtaaaaggaatgatggacatgagacaggaaaaaggaatgcctatctatccggacgccaactcaaccttacgactgacttacggacaggtacttccttacgaacctgccgacggagtagtttatgatgctcatactacactcaaaggagttatggagaaagaagatccaggaaactgggaatttgtagttccgcagaagttgaaggaactatataaagccagagactatggacgctatggtaaagacggtgaaatgcctgtctgctttattgttaatactgataatacaggaggaaactccggcagtccggtattcaatagcaaaggacaactagtgggcacagctttcgaccgcaactatgaaggtctgaccggagacatcgctttccgcccctcctcacaacgtgccgcctgtgtagatatccgctataccttatttattatcgataaatatgcaggagcctcccacattattgatgaactgagtattgaataaatggataatgaaaagtccctatgtagggtgacatttccattatccattttccattaaataaactcttctaccatatacatctcatctatcatttcattcattgtttcctgcaaattcaacacagcttcttcaggagactctccgtaagcattacattgcatattcacagtcaaccaggcataatatccgccatctgacgcccgctcaagtacataatctgttttattcagtttcatatcggtaaataattagtaaatgttggtattgaagtaattgctgattgtggagcagccagtttttccagttccagaataatacgtcgttcaccactacgtacccaacgaacgaatgtacgattaggagaatacgttccggcaaaacggagtaaaggcttcaaatcaaaagaatcactaataatccctgctcctgccctcattgcatcatgggcattacaatcctgctcaatatgtgccggaaccatcaatacaggttttcccagatacattgcttcacagatagattcgaacccagcagtggtagcataagcacgacaaccggccatcccattaagaaacttcacatcatctatctgatagaaacttagtgtttcgtcaatcctggtcacctcatctgcatctgctttgtcccagaaaaacctcaaaggaacttccggatatatcgtatgaaactcctccacactatctgcaaaaccggaatttaccatatatccatgaatataatttccttcttccggttgaatagcagttacttcctgccgaattaaaggaggaactaccaccacttgttctaccctgtccggttccatatcattgaaagataaagcaagtttcttcgaagatcttacagctgtcatcttggtgaagaaacgcagcatccgtaattgaaaagagtttttatccggaaattcaaaattctgatgtaaaaacaagtattggtgtccgacgcagacatatggaacggagggacgaaagagtgtgtaggtaagtcctgtcaaaagctcgtagaagttgatcactacttccgcccctgtatccttaatccgctggttaatatagcacatactgcgaaaatattccggaatacgcagtaaattataaataaaacttttctttagattcgctcgtttattatctgccgcaggcaagaaattaggactgataaaacgtttgaccggtgcctgtatattccggttaaaaaatccgggcaagatacgtgatgaactctcaccgactaatacttccactacttcatgtccattacgcaacaacatttcttcaagggtaatagcttgtgtcaagtgtcccctaccctcgccttgtacaataaataaaaatttcatgaggctatcattattagtttatttcttatttatttgtttttcgttatgcaaagttcccttttccagattacaataagatgactctacaattactattttatgaacaaaaacagctttttcccgttatattaataaaatagaaattatatttgcagtcttcaaagactgatatttaaatttaagaaaggaaagattatggaaaagtttgaagatttaatacagtcaccgatacccgttttagttgatttctttgcagaatggtgtggaccctgtaaagcaatgaaacccgttttagaagaattgaaaacaatggtaggagataaagcccgtattgtgaagatagatgttgaccaacatgaagatttggctactaaatatcgcatacaggcagtgccgacttttattttattcaaaaatggagaagccgtatggagacattccggagttatccacagtagtgaattaaaaggaatcatcgaacaaaattacatataaaaggaaaatagcgaatgaagaaagtattagcaatggtagcttttgtcatgctgagcgttatcgtatacgccttcaatgacaaaccggatgccaatcaaggtaaaaaagaggtaacaggtaacggtgaagtcgtcgtaatggacaaagaaatgtttctgaaagacgtcttcgattatgaaaaatcaaaagagtggaaatacaaaggtgacaaacctgccatcatcgacttatatgcagactggtgtggtccttgtcgccagacagccccaatcatgaaagaattggcaaaggaatatgcagggaaaataacaatctacaaagtcaatgtagacaaacagaaagaacttgctgccttgttcaacgcaacaagcattccattgtttgtattcattcctatgaaaggagatccgcagcttttccgtggagcggctgacaaagcaacttacaagaaagctatcgatgaatttctactgaaataaagagccctaattatagtgacactatccggtcaggataatgacattataatataaaaatggtgacactatccggtgtggatagtgtcaccatttttatatgcagaataaagatcatttaaagtatcccacgggatgattcatcataggaatctgactatctttcagtttcaatactttcttcagctgagcggcatccatcgaagcacgtggcactgtagccagtttagccgcagaacagaaaatagaaatattctgagaaacaataccggcatccatggctcccattagttgattctgtatcttctgagcatcaccaaaacgggaaacatcactgattaatactaaagataccggagccgtttttacaaaagcctggccacccgctaccgctccacggtaatctccttcagcaatcagatttaactgatgattctttgcgtcatacaagtaacttccttccgataatatcacatatacgtctacatcctgcttattcatagcggaaggagccgttcgttttccagcatccgaacgattgattccgttggccgcccataataagtctgacaaatcagcaagagttaacgctttcgaagcatactcacgcgtagattgacgttcagacaatgccttcatcaccgtaccagtacgatttaaattaggttttggtaacttaacaaccttatcagcagcaaaagcagccgctgaaagcattaaacaaacgaacaatagttgtacctttctcataattgtggtatttataaagttgataggcaaatataaacaaaaaaggtctgcattcactatagaacacagaccttttaaaagttatttataaggctttattatttcttatctccgaaataacggttgtaaagtccttcaaaacctttaccatgacgagcttcgtccttgcacatttcgtgtacagtatcgtgaatagcgtccagattcaaagctttagcacgagtagcgatacgttttttgtcttcgcatgcaccttgttcagcatctttacgcttttgcaggttagtttttgtatcccaaacacagtcacccagcaattctgcaaatttagaagcatgttcagcttcttcccaagcatagcgtttgaaagcttcagctacttcaggataaccttcacggtcagcctgacggctcatagccaaatacatacctacttcagtacattcacccataaagtgattattcagatccttgatcatttcttcgtcacaaccttttgcaacaccaatcacgtgttcgtcagcaaaagacaatgcaccaccttctacttcaacaacttctacgaatttgctggcaggagctttacacaaaggacatttctcaggagctgcgtcaccttcataaacgtaaccgcatacagtacatctaaattttttcattttcttctcaattttaaattaattagtcaatacgtgtttctttatcttttcttaagcaattcttgcatatacctttataataataatgaacttccgtcacttgatgcccatccatttccagactttcaactttcttcacggcttccggagattttaagtcgtaaatatgtccgcaatacctgcataagaaatgagagtgaacagaagtatccgcatcaaaatttgtattcttctcatcaatcgtgagcatcaatgcagctccctgttccgaaaacaatctcaaagtgttgtataccgtcgttttcgaaagtgtcggcatagaaggagataacgctgtatagatatcatcagccgagggatgaatgggatgattcatcaaatattccatgatcgctatgcgctgcatggaaggctttatattatgctctaacaatcgttcgtatggtttcataagttctccctcttttcaaagttgtattcattacaattataaatctgatgcaaatatagaaagtcccaatatcatttccaaataaattcaatctttttttgcagagaagtattacaaaatccattcaaacgaaaaggccaccttttgaaagatgacctttttgcgttaatatacctcgcttctgccttagtctttgtccaccttggcttcttctatgatcgatgcaggtactttttcacaacgaacatatttactcacatcgttgtcatcgtcttttgcagtccagatcatggaacccgattccaacaaatcggttacgatataatcattattccaatcaccattaccgaaatcatattctccgctgataatatatcctaaataaggatcattttcaaggctgaaatgaccagtgatatggcgcgcgtacatactgtcgaacttctggtacatttcaaaagtcaattctttacggttaaaggttatgtagcaatatgtaccttctgacataggctgtccattccattcagaaagttgccatgttccgttcaggttagcagcagtaaccggcaatgtagggatctctgccttctcatcttcatcacaagatatgaaacaaagcaggaaggcgaataaagccattaatttaagaatattcttcatgtcttctttttatttttatcgttacttaatacagtttactttaatactcaatgtccggtcagcctgttgtccgcttactccttctattataacaggaaagataaacgaatcgcccttttccacaggaatcagggaagcatctatcgtgattattatatcggcttcactgcccggactgattacttccggttctgtgcgaaaagtaacaaaacagggaaggttcagaactgtcaaacgcaatgattgctccccgctgttaccgcaaagtattcgttccgaagcacgctttcctgacatcacctcccgaaattccatccggttttgttttagcctcagtttgcccatcgcataaggatagcgtccccattcatctgctccgggcaatacattacccgtcaatgtgaggcgtgccacaggcatccggtccgacagagacagataaacgaaagcattcgtatctatcgtccccgggtggtttttcggattataggtcaatgcaataacactcgcttcaccgggaggtatttctccggtacgaacatccgccactgcacatccgcagttagtccttacacgagtcagatttatcgttttattacttatattagtacatgtgaaacgataggtctttggagcatcatcctccgtcattgttccaacattcaacacagtactgtcgaagcgcagaatttgttccccatgcttcattagcggcggatttatcagcgtatctgttttttcctgcggaatgaaacgaatccccttggcttcaaccgcccggaatgatccgatgaccacacagagtaaaaataaccgtatccaagtaattggtttcattgaatattaaaattacatccaaccgttatcattagcctttttacggacggtaacggcaatggactgttcgcttccgttgcttactttcactgtaatacgagctgtaccggtttttataccagatacggtcataagcgtattacttacgctcactgcagcggtagccgggtcgctcgatgtgcaagtataagtcagtgtttcaccatttacaaagtagtaagccaaattaagagtcgatgttgtactttctgccacatagacatttggcactaccatatccgaaccactcccttcaatactgttaagcaaacttccggcatttactaagcctgtacccatcttgccgacatacttcgacagttctacttttgtaggagaagcaccggcagaaagatgattgcgataataagttttcacttttccaccagtataccagccgtccaatggttttgcagaattcttcagcagttcaatgaactcagttgctttaaaatgacggcgttgttttacagcataggacaagcctaatgccgctactcccgatacatgcggacaagccatagatgtaccatccataaaaccataagtagcagtaccgttctgtatccaagtagaaagaatagaaccggagtatataccttctgcccaagcttcaggatcttctttacctaccggattatagtactccgtatcaccacccggagcagaaactgtcgcttccacaccgtagttagtataagaagccggggtaaaatcggcagccaccgcactcactgctatacatttggaataagcagcggggaatgccggcattcctgcatattcgttaccggatgcaaaaatagccaaaccaccatcaatcactccattgggagaaccggcgttattgataaaataatctaatgcttctttttccaatggataaatactctcccactctttttccgttcccggccctggagtatatccttcgatcatattagctaaagaagagttgtatccccagctacactgcaaaataacagcgccattatcggcagcatatttgatggctctggcctcagcatccaagctgacaccgtagtctccggaaaacacttggcatgacataatcttcacacccgaatttttcgtcccatcaccaccggcaataccacaaacaccgataccattattattcatagcagcaatagtaccggcgacgtgtgttccgtgtcccgtatcgcttgtttccatccatgagataacacctgtattacttacgaaattgtaaccatatttatcatccttatatccgttaccatcggcatcggcatcagcataaagttcttctccttcattaatccagatattaccaaccagatcaggatgtgtattcattacaccttcatccagtacagcgactataatagacggatcgcccttacatttctgccaggcttccgtacaaccgacatcacaccctgcttccgaaccattacctaaatcattttgattatcaaattcattctctccagtattattataatgccattgataagacaatcctggatcggagaacgagcttcttgctgatacagcacgtgtagcagccttttgccgcaaagcgctctcgttgatataactccgatatccttcggttttgtaagcacgtttaatacggctattgccttgtacttttgatatttcacctaatttaccaagacggctggccgcttccttcaggtccgtattttcattaaacttcactcgataccacaaatgtagtccggcactacgggtgcgttcttcatttttagcatcgaccggaaatatacgttcaaactggtatgcacccaaaatagccaatacttcatcagtagatggaatcccggaacgggtcatggctcctccacttcttgtcgcaaccttgagggcttggtcaagaatttcggtcattgcaggatcgaatttaatcagcaattcaccggaagtgacatcagtcggaaactgaacttccgtcccccctgcaggggtagacggttgttcaataaattcttgttccgagcatgaagccagcagcagggcaaacagtgctgtatataagatttttttcttcattgttcctttttaaaaagttattcttgttaatgatatttattccacagttatcttagtctgttgtccccgataatacaaattttctgtaatatagcggataggctacacctttaacaacctgacttgcttccgggtctttatccccatagtagtaagaataatcgtaattcacaacatccacattgctaaatccaactgcctttccttctgaatttatacctccttcttgctgattgaataccatagtttccggataccaatatacaaagtaaggatggaacagaagccagttcggtattgcaccagtcaagaagttcaaattaatatgaactgtacgggcaaatggtagtacacgtggaatatcctgtcctgttaccggagactgcttctgataagtaacctgattgtcacccgtcagcaaccattgacaagtatcctttgatatcttatcaaggaataatgatggtgtagcagtcaattcctctttagtaaagaaatcatcatgttgataagttaatggttttctggcagcagccaatgcacttttaacttctgcgtcagtaggtaattctccctcaaggaagttataagacaggaacagtgcattcagtttatcccaagtcagcaatttcaggaatgctgctctttccggctgtccttgtgaaatattaacatgcaacccaacatccttaccattatattgattgtttccatcaatctgagttaagtctttcagtgtttctgtagcacgacatccggtcaatgataatgatcttaaatgtgggaaattttcttcgtttaccacatctgtaatcacagataacttctggaaattattacttgacaagtcaagacttaccatctttttacccagtttaacaaaattcttagggagatcattcataccgaaagagaacatcttcaaatctttcagatattccaattcacagatttcttcacctaaatggatcgtacgtatctgtctgttggcattactcatgacagcaaatgattccagatatttcagatgacgaatttccttcggcaatgtttcaccgtcttgcagatcgatcatagcaaaatgtacagaacgtacacgccccacagcttcttccggaagttctccatcttttatttccttatccgtagcttcccaaagtgtcacgaaatcccagttcatcatactttcactggtatcaaagctcatcatactctggagtttgttattaatggtgataatagctaatgagtcacctgcacgattgtcttcgattctcatggcagcttcctgtgtaacagtcagcacaactgcatctattttattaccattgtcgtccaccagttgatcatccgaatttaccggaatcagatgaatctttgccacacgagtatatggagccacgttcattccccatcgaaaatcaactttcaaagtacggggacgtgctcctctgtctaaattcacttccaggtctttatctttcggcaatgtcacccagttgctacgttctccttccacttcctttttctcttcatcggtcatggttgcttcttctgcaaaagaataatccacgcttccgattttgaaattcacattcgtggaaatagtagactcgaaatgacgatctttataaacatccgaactagggattttcacttccggttctctcactaagatttgcttaccgaaaccaaactgtgtaactgtaaccaatcgaggttcccgaccgtccatagtgaaacgtacctgcgccgtacgcgcaacatttgtcagtgtagagtctatagcaagatcacatactgccgagcccagcccatttgccggtgaaacggcaatccaaggttgtgacacacgtgccacccattgatcattggacgaaacggcaatcttctcagttcctccttcggcaccgatagtaatttcttccttatctatcgtaatgccatcgattcccacttcatcatcatccttgcacgaggatacgaaccccgcacaaagaatcagtcctaatgttattttactaaaatatttcattaatagaatcttttatattatcgttcaatacctaaagcatcacaaccacgaatatcctgcgtagtatcatagaacagcgcatacatacctgcctcaatataaggacatactttggtcacatcaatagagatattcggattgtctgcgatatccaatatataaagctgcggtgtcagagtttcatctactttacggatgtcatttgaaccgatttgcaactggatcaagctcggacaggtagtgatacctgtcggccattggcgcaagatacggttaccttccgcatcacgttggtgacgaataccaaaagcctttaattgactactgttcaacggctgtgtcgggaacgtagagaaacagttgtaactaacatccatattactcaaataaggcaaggttgtcgcccggaagtcatcagacaagcttgttaatttattgaagcgcaaatctataatggtcagcatgtacgtattcttatagtttccttctttgggtttcagcgaattttccggaatcgatgtcatcagattattactcaagtcaatagtcgatatcggtgaacctgatgcaaacagttctgtagggaatttcgttattttattatacgataaagtcactgtactggcattgatacccttgaattgggccatcggacaatcgatattgcttccttccgaacctatttcattatacgagaaatcgacagaacccataacatataccgatttagcattaaaaatattcggtatatatttcaacttattatgagaaaagcccaagccttctacctgatcggtaaatgcacaaaagttatccgggatttcttcaatctggttataatccagcttaaggtctgtcagtttaacatttgtaccgaaagcttccaattgttttacattattgtgtacacaatctaataagccaagttttaccattttctgtaaggatgcagattcggggaatctttccagattgttataacccatatataagatttgaatttttggccctgtatcttcatcgtcagccagcctttgccagtcagcagtcagttgatccccactgatacctttattacaagctatatttaataactgtaactccggcaaatcatatataaattccggtatttgtgtcagatttggacaattatataattccagatccgtcagttttgtcagattactccaacttaactcttcatccgcatactgcttagcatattctgaatcggcatcttcccaatcggcagcgatattatcataagtaaacggcgaattggcaaaatagattgtctgtaaattagtcaatcgctgaatagcctttgaaataaatgttattcgattagtaaggatacctatttgagtatcctttaatgaaatgcggttattcttctttatcggttgcaggtcaggatgtctgttaataccgtcttgcaaaagttccgacatattcagacgcggatcgcgatcaagaaatgttcttttgtaatgcatacgtattctttgcttctgttcctcgctcatatctggggtcagttcatcttcaccaaagagtctgccgctcaatatttcactatgcgtaccaaaagaaagagtttttagttcagttaactgtccgatagcatcaggcactctgcctttagcaccaaagccagcaagtgaaagccctataacacgtccattgttatcgagatcaactccaggctgatccccccacatatccagttctttattaaagttccagtttgaactgctgacagtattattcacagtaccgccattgtacttccagttctttccgtccaaggcttcccaaataattttcagcgctttgtagtccttaatgtattctgcagtctctttcaattggataggcacattagcatcttctgtcaattcattgtctttcactgtaaaaggttctcctcttacggactgtgtttccaataccggtcgcgtaccaccactttgtgtataggtggtatatgccactacttgaaaagtaccggcaggaagccatacggcagaatcacatgttgccacacctatgtccatatacttgtcattagcattatcagggttctggttttccttagagccttcttcataagtaactttcatccctttcatctctgttgtgacacgagtaaaggtgttcattacagtaacatcgacatagcgaatattgctaaataaatattcaccgaccgcacgtgtgctaagaccttctttcgttagcttaaaagtaacagttccacgtgctacagcatctacagccaacgctttttcctgaagtccttgaccgacaacggtaaattcgctgtcatctccaccaggtcctgccaacagaacctcatcaagtttatcatacaggtagtaaccgataatcttataagtaccggccaataactgcaatttatcactacgcagaccatattccgcattgttcgcattgtatgcgttcaagggtacagtctgtgaaacggtcgttccgttgtgcgtcatcacaacctttatcttctgtgcactagacaacgtttccagtttgtctgttgcacgggtggttgttcctttctcaaaagaggtgctcttatagagcttgaactgcacatagccgtattggctttgcagtacctcgtcaccgtcatcagagcaaccagttaccaccatcgttagtaagctgacgatgaggggtaagaagaatattgagtataatttatgtagattcatttaatatactatctaaattaattaattggcaggggtaatcaccaaagccttcttaaagagcatatctgttcccttaaaaacaatgattaaatcttccttaaaaacgtcaggtacagtgacccccaaaatcatatttccagtctcatccattgatgcctcaagagttacagtaacatcctcatcatcagcattaattgcataagcttcacctatccattcactttcggataataacggattaaccgcataatattcgcctgcattagcagatattgaataaacatcatcaataaaatagtttccttggaggagttctaaaatagaagtatttgttgttttagtaggtgaaacttcttcccatccggctttttttataatgaagctctgattaccgggttcttctttcacttctttctgagtaaagccaattaaaagatttctctgttcatacttataagctatctctccattttcaacaatagtttcttccaaattatctttgatactttcatactcagcctgtgagaacgcaagaacataaccagttctagattcaggctctccccaactaacattaggagtatattcatcaactgtgagatttattttacctttttcaccttcacaatgcatccatatcatatcagggtctattgttgaaatattcttatttcccagcatatcttcccattcctccatatatacaaatacatatttatcacttaaagttttaatagtgaatggcattcttttgtgtaaagtaatatcaccagtactaccacccgtacttttttgtgtaaatgtctttccatccattgaaacaacccaattggtaggataagttgacggaagcgtcaattccataaccccaggtgtcatgccatcataagaaactttaaaagaatagaatgctttaccttcttcgtcagagaatgtaatcacgtttttatcgcttgcttcaaccggatatttttcacgattctcatcttttattatcttcaagccaccagtcacttcttgattaactgcacctacaagagagccgccttccagttctacccaacccggcaggtttgtagcggcaaaacggaaattagctttaacgctaaatttagagaagtcctgatagcccactttaagttctttgaccacctcgcctgcttcatcatatacttccaattcatatcccttagccgaacgagttacctctccaatcacaatagtctgaccacccattgtcaattccaatttagccacactaatgttatccactttctgattgtcatcagtagctaagattgttacagtttgtgtaccggctgttccggacacaacaaattcttccatatcattggactgaaacttacaccaaatggcggaagatgccaaactccaattcgtattagccgtaaaagtaaactcttttgtctcacctgcattgcaaacaatgttctgcttttccggaaatatcggagccactgcatcgtcatcatcgtccgaacacgctgccagacagaaagtcatgagtaagccaatgaagaaccaactcttgcacgacatcttcatacaagaatctcctagtggttttaaactaaactttttcatatccatttatattcttattttttaatatccttgttcttttaatttttctgcttccgcttcacttatccattctatgacattggcaaatgttcctactacaccatataatgagccatctctattattcacactcattgtgacatattggaagacaaagttctcattagtactataaaaagaagtataagcggtaggttgattaagccgcaatttgtcgtcaccgtgaatggtgttgaaagcctcacctgtcgttccacaaatttgctcttccatttcgacgatcggttgcaggatatcatcccgattgaaggtgatttccatatcgtagccgtcaaagtagaggtcatgtataacaactgtattttctttaccctctaccacatcagaagttaccaaacgcaagtctacattcttcggatagtaatccgatgataaataggtagaagtcaccttgcaatatcctgtaaagtttttgatatcaaacggacaaaccttctgcatcacaacttttgcctcagttccatacatactccattgctcagtttcaggaattacgagccgcaaagcaaagcccagcgagtcgctaataccaatattcttataaataccttccacctccacgttagtgctcatttcgcccgctttaatggtaacggtattcgacaaaattctgtaatgcttaccttccacggcattgctttctttgtctatcacttcgacagccagcgtgcggtcgtagtcaacagacttagtagcagagacaggaacattaaatatctcattcgtttcttgcacggcataagtataaagcgtgtcagaaaacataagataactggatccgttgtataacaccttgtcctgatcgcatccggaaagagctatcagagcagcaatggctgccatacatcctattaataatttcttcattatcgtatgcttttaatcttatttgttactttcattcggttggacttgtgagcccggagcgtccaattcgtgctgcggtataggccacacgaacaaaggatcgtcagcttctactttcaagctactaccatttgccaatgactggtcttgtggtttacgctcgaaacctttgtgccagcgtttcaaatcatgaagacggaaaccttccatataaagttctttcacgcgttctgcctcaataacatccattgcattggaagccgtcaaagaagtagaaccaccataactggaataacgtgctgtacgaagagtagtgatatcttttccggcacgaccataatcaggcttctcctgttgtacataagcctcagcacgtatcagatactgttccgacaaacgaagtactttcggcatacagacgtgaagtatcttagtttccaggaatgcttcgttaccaaaatactttatcagcaaaggccaagaaagatggtgactatagccagtagtatatgattggaaaaaagtagatacacgtaagtcgttattatcatatgagttgagaacccatgttgccggcacataatcaggacgataattactgtagtcgtaattaaagaaaatctgtcccaagcgacctccataagaatttacggtaaaaccaactttccaaataatttcagtagagaggtcattcgtccacatatacttgtaataactcactccggaagaaatattctgagtacagctagacaagacaaagtaatcactgtctattactttactagaatacttaatagcttcatcccactttctcatatagagagctacgcgtgcacgcaaagcatatacagtgtattcattgaaataagtagcgttattgaacaaagcaccatcagtagccggattgtaatcctcatccaatgccagcaattcagctgcacgatcgagatcactaaggataaactgataagaatctttcagtgaagcacgcttcatttcttcgtctcctgcataatgctcggtcaggataacacccaactgattggctgcgtcttcatcactttcataagccttacagaaaagttttaccaattccgaataagcaagcgcacgggcaaaataggcttcaccacaacattggtctattttatccaaatcgttatcattagtagttttatttcttactccatccacacggtcgagcagaaagttacaacgattgattacattatataatgcagcataaacaccttcaatatttgtattggttgccaaaatgtctttccaacgccaaatatctccataagtattcgtatttccgtttactccatacacaaagtcagtctgcaaatcgggtaataacgtaagacttccggagtacaaggcactacttttaaaagtatcataaatacctataactgccagatttacatcatctaccgtctggatagacttatcgaaagggattgcatcctcaggcatcttatccaaacaggaagtgcaggaaaatgccacggcagccaacaagatatataatttaaatttcttaatcatctttctttaatatactatttagaatgaaacttcaacacccaaagtaaattggcgtgatgccgggtattgtgctctataaatattgcttgcaacttccgggtcaagtccggtaaaaccagtccaagtcagcaaattctgtccttgcaggtaaacgcgtgctgctgtgaagaaattacttttcttcaacaacgattgcggaagtgaataagccaatgtcagattcttcaaacgaaggaatgaagtattttcaagaaagcggtcgtcaagttgtgccaccacatcgtagcggggaatatccgtaatatcaccgggctttttccaacgatcatacaacagtcgcttagactggttatatgcgctatacagtccgttactttcttcaaagaagcggtcattattcatcacgtagcgtttcgccatccagctgaactgcgccgacaatgaaagccctttccacacgagggtagttccaaaaccacctgcccatggagaatcgaaagtcttgccaatcataactttatcttcctgacgaaattcagttgttaactctccgtcggctgtgtaccacaaagcgtccccattagcggggttcacacctgcataacgattcaggaagaactcagttgtaggatgtccgaccatatactttaagccagtcgtagaatttacatactcttctaccccattgtaaagttccaacaacttattcttattataagagaaattagcactaagattccaagtgaaatcctttgtatggatgacattaccatctactgccacttcaacaccccggttcatcatagcaccgatattctcccaacgatacccctcaccagttatggcataagatgtgggtacatacatcaatatattagtagtcttcttatgataaaaatcaacgtttacattaacacgattaaagagccccaaagtaaaaccaacattgttagcccaagtctgctcccagcctaatttttcatttccactctgtaaaggaaagatacccgcttcatcgttatagttggcattcccggaaacaagtgcaagatgatcgtagtcagggatactcgagttacccgaagtaccggtactcaactttatctgcgcattagtcaaccattccacatctttcaggaaagcctcgttctttatgttccacataaagcccaatgaccagaaagctccccaacgatgatctttaccaaaacgggaagaagcatccatacgcccggcaacttccgcataatacaaatccttatagttgtactcgccacggaagaaaagcgataaataagaatagctactattgacatcttgccatgaagaggcccgcgtaccggaagttacatttgtcaaccggtctattgtctgccctctcgtaacaacctgaaacccagttgaacgataatctataccttcttgtcccaacaagaaattgaatgaatgttcgtcattcaatgcccatcggtaatttgccgtaagagtttcactcagactcaaaatatccgccgaactacgtccggcacttcctgatttattattaattatataactaggaaaagattgcataaatgacgtagaatgagaataatcagcaccaaactgagcccggacagtcaagttcttaacaggagtaatatctgcaaaaacagttgacaacaacttatattttttatgttctacagggttatttgccatccactcaatagggttctgtcctgtccctttccaagttccgtcattttcagaagccaaagagccatcagcattataaggattccagtaaggcaacataaagcgtgaaccggaaataggagtataaagtgccatatccccttcttcagcctgcgctatttcctcataagccatcatcgtattggtacctattttcaaccagttgctggcttttacctccgcattggcacgcatgttataacgacggaaagttgaactttgggcaataccgtcctgatcgtaaaatcctcctgagacatagtagttcaaacgatcggtagcacggttaacagacagttcataactctgcaatggagcgcgatcattaaatactttatccagccaattaatatctgtacgagaaagcaaattataatccttacctgtgtccaagccaatttccttttcaaattggatacgctccggtgtattcatcatcatccagttatcatccgacgccaattgtgagaatccccactgtccacgcaatgttacttttgctttatccattgccaacccacgtttggaagtgattacaaccacaccattcgctgcacgggcaccataaatagaggttgaagaagcgtctttcaatacagagatggactctatatctcccggactgatcgtattaaagtcagcactggaaataggcacaccatccaaaataaacaacggtgccgtacccgaattaattgaattcgtacctcgaatctggaaaacagccgccttactaggttctcccgagttagagattacagataatcccggtgtctgtccctgcagtgactgatcaaaacctgcagcaggcacattttctaatttttccgctttaacagtggatacggcaccagcaatcgtcccttttttacgagttccatacgctactaccactacctcatctattaaagcagcatctgaaaccagacgaacattcagtgttccggttttggcactaaccgcatgtgcctgtgattgcataccgatataagagaacagcaaagtagcacttgccgtacccttaatctcaagagtgtaattaccatcaatgtcggtaattacaccatttgtagtacccttctctaaaatagacacaccaaccatcggctcattatcttctgccgaaacaacatgtccttttaccttatatccactctgtgcaaaaagcataagaggaatattcagtagagcaaagagtacaaacaagagaattgattttctcatctttgatacttgaatttaaattaatgaattgatttattttttacagatttatctacaaaacgaaaacttagcatattacgcttcacgcatgaaacagcaatatacttctccccttggagcgactttgaaaagtatacttttatcatcgttccaggacagactattaaatagtctatacaatatatagaatagggaaattagcttggctggtttttaatattacgccatatgtctaaataaatgtcttgtgtcgctgcaatactaataaagtgtatgtccatctctctaaaattatagatattaataagtgcttatcgtttgtttaggtgtaaattgcctataaaattctttaatttggctacaaatataattataatagttaaatagaaaaaacaaaaagtctcattttttataccaaatttcctcaaatgtctttttattgcataattaacaaaatattaataaacaaatagatatatcccatataaaccgtcaaaaataagaccatcttactttccatttgacattcttattagttgcttatgcaatagtcattaaaacgacataagacacctcattttgaggattcagagtcaaaagggcaaaaatccaaaactatttcctatttttgtacccactatatataaaaaggtacaagatgaactacggattcgtaaaagtagctgcagccgtgccacacgttaaagtggccgactgtaaattcaatgtagagagaatagaaagccaaatcgcaatagctgaaggtaagggtgtgcaaatcatagtattcccggaaatgagtattaccggatatacttgcggtgacttattcggacagcagattttgctggaagaagcagagatggggctaatgcagatactcaataatacccgccaactggacatcatctctattgtcggcatgccggtagtagtcaattcaaccgtgatcaatgccgccgtagtgattcaaaaaggaaaagtactaggtgttgctgccaaaacttacctccccaattataaggagttctacgaacagcgctggtttacttctgcccttcaactgacagaagataccgtacgcctatgcggacaaatcgttcccataggtgccaacctactgtttgaaacttccgatacgacttttgggatcgaaatttgcgaagacctttgggctaccatacctcccagttcctcattggctttacaaggagcagaaattattttcaatatgtctgccgataatgaaggaatcggaaagcatcattatctctgttctcttatcagccaacaatcagcacgttgcattgcaggatacgtattttcttcctgtggtttcggggagtctactacggatgtagtatttgcgggaaacggattgatttacgaaaacggctcattactggcacgtagcaaacgtttctgcatggaggagcaactgatcattagcgaaatcgatgtggaacgcatacgggcagaacgtagaatcaacaccacttttgctgccagccagggaaatccaggagataaaaaagcaatctccatcgcaacggagtttattaatagcaaagagcttactttgacccgagacttcaattcacatccttttgtcccccaaggagcagaactggatgagcattgtgaagaagtattctctatccaaatagccggcttggcacaacgactggttcataccaaagctaaaacagctgtagtcggtatttccggaggattggattcaacattggcattattagtctgcgtgaagaccttcgacaaactcggtttaccccgcaaagatattctgggagttacaatgccaggctttggaacgactgaccgtacttataacaatgccattgatttaatgaaatcattgggcatttctatccgggaaatcagtattcaagatgcctgtatccagcatttcaaagatatcgatcatgatatcaatgtacatgatgtcacctatgagaactctcaggcacgcgaacgcacacagatattaatggatatcgctaaccaaacttggggaatggtagtgggtacgggtgacttgtcagaacttgcactcggatgggctacgtacaatggagatcacatgtctatgtacggtgtcaatggaagtattcccaaaacacttgtgaagtatctagtgcaatgggtagcggaaaatgatatggatgaggacgctaaagcgactttactggatattgtagatactcctatcagtcccgaattaattccagcagacgaaaacggggaaatcaaacagaagaccgaagacttggtagggccttatgaactgcatgactttttcctctattacttcctgcgttttggtttccgcccttccaagatttactatctggctaatatagctttcaaggatgtatatgacaaagaaacaataaagaaatggttatctactttcttccgacgtttctttaatcagcagttcaagcgctcctgtctgcccgatggtccgaaggtaggtagtatttccatcagtcccagaggtgactggcgaatgccaagtgatgcaagttcaactatctggctcaaagaaatagaagatttataatctctttgatctttcttctgtgacatttttgtatttatcttaagtattatacggggtaaaacaaaaatgtcacataactgtatatcaatcatttagttcacaaaacgccccatattcaagagaagtttacaaaaaaacatgcgattgtttttgactttaggggaagataaactgcattttctttataacagtaagttcttcagccaattagctacaaatgcgaataattagccaaatacacttaaacaaccattcagctacacttgtgtatcctcttgattacacaagtgtagtttattagttactcaagtctaacagattaaatcatttagaagaataaagtaatagatcaggagaaaataccagttcatgcagaagaaaacattaatccttccgcatgagttatatagaacatacggtcaattgcactattgtaatacttctcttttaatacgttctatatcagccttctcaatagtgcgaatgatatttttataaatacgatgaaaaccgaaacctccttcggtcatttcctgaatagctttttgctttgacactccttgaaatacaatacgatacatagcacatactgcgcctgtcctatcagaaccgtgatgacaatgaaagacgattggccctttgcggttcttgataatgcgcaatgcattgatcaattgatcttcactgactgaatgcgctttcatttttagccgataaagcttaatctttgttcctgccgcctcatcatcgtcactatgcctgttgcgaagattcagcacttcacggataccgtatttctccaaagccttaaagtcagcatccgatggctgctccgaacgatatacacctgagtctatctggtacaaattagtcagtttactatcgggaacagttatcttttcagcgtttatgttttgaccataaaccgaaaaagacatcactatcccgataaataaaccaagccaaattcgtttgttattgattatcatatagcaatcctatgagattatataatatgatgaggcaaattatagtactcctttactcgaaggaagctcaaaatgatagatatctcttttcaatgccattttcagagcacgtgctagcgctttaaagataccttctatcttgtgatgctcattctgtccttcagccttgatgttcagattcatttttgcagcatcactcaatgatttaaagaaatgcaggaacatctccgtcggcatctctcctattttttcacgattgaactctgcatcccatactaaccaaggacgacctccgaaatcaaggcaaacctgacaaaggcaatcatccataggcaaagcataaccataacgttcgattccacgcttactgcccaaagcctgataaatacattctcccaaagcgatggcagtatcctcaatggtgtgatgttcatccacttccaggtcgccttttacccgaatggccagatccattccggaatgcttgcctatttgttcaagcatatgatcgaagaagccaagaccggtagaaatatcacagcttccatttccatcgagattgagagacacataaatatcagtctccttcgttgtacggcgaacttctgctttccgctcaccggcaaaaagaaattctgccacctgatcccagtctgttgttgcaagtgcgcaaacatcttccagacctttctctttcaaatcatccgttgcttcttgcagataaatagcacggcaaccaagattctttgccagctccacatcagtaggacgatcaccgattacaaagctttccgcaagatcatattccggattatcaatatacttcgtcaacattcctgtacgcggtttgcgagtcggcgcattatcttccggaaaactacggtcgatcagaatatcatcaaaggtaatgccttctccggccaatgttttcagcatcaagttgtgagcaggccagaaagtgtcttccggaaacgaagatgtccccagcccgtcctgattggtaaccatcacaaattcaaaatcaagcttgctacggataaagcccaaattacggaagactctcggataaaattccagcttttccagtgaatcaagctgataatcaatgggaggttcaatgaccaatgtcccgtccctatctataaacaatattttcttcttcatatactatccttgatattttttgagggcagcaagtaacgtattattctccactctggtacccaccgtcacacgcagacagttgcaacaaagcgaaatggaatgacggttgcgcactatgatcccttcacctaccaaataattgtaaatcttcaccgcatccgttactttcgccaagaagaagttggaatcggacgggtacattcggactgtacaaggtaatttcgcaaattcttcttctagatagtcgcgttcttccttcaatgtttttatccagcgttctatttcataatatttatgcagcatagcaatagcctgctgctgtgtcagctgattcacattataaggatacttgattttactcaagattccgataattgcttcggatgcaaaagccatacccaagcggatagcggcacatccccaagctttggagaaagtctgaaaaacaaccagattcggatatttatccagctcttcgaggaaagaaggtgcttcggagaaatcattatacgcttcatccaatatgaccaatccttcaaattcgcggagtattttttctatttcagaacgcagcaggtcgtttcccgtcgggttattaggtgaacacaggaaaatgagtttcgtacgctcatctgcagctgcaagaagcttttctgctgagaactggaagttttcgtccaacaaaactttccggtactccacattattcacatcggcacaaacctgatacataccgtaagtcggatcaatagcaactacgttatctttttccggttcgcagaatgcacgaaacaccagatcaatcgcctcatcactgccgtttcctaaaaagatatgctggggagaaacctttttaattttagacaacagagttttcagttcccactgcatggggtccggatagcggttgtgaggcaggttataaggattctcattcgcatccagaaaaacggaagccacagcgcctttatattcatcacgagccgaagaataaggctttagtttccatatattcggccgggtaagttcttgtaatgttttcatttcaatgtatttaatcgtactgtaactgcattcttatgagcatccagaagttcgttggctgccatttcttcaatagccggcccgataactttcatgccttgaggaagaatttcctgaaacgtgattttccggataaagctgtccaggctcacgccgctgtatgctttcgcataaccattagtcggcagcgtatggttggttccggaagcataatcccctgcactttccggcgtcaatgagccaaggaagacggaaccggcatttattacacgttcagcaacttccagataattttcagtctctacaatcagatgttcgggtgcgtatgcattcgtcaactctaacgcttcatccatgtccttcaccaaaatcagtttactgttttccagagatttcgcagcaatttcccgtcgaggaagctttgccagttggcggtttacttcttccattacttctgcctgaagcttttcagaggttgttatcaacatcgcctgactgtccactccgtgttctgcctgcgacagtaaatctgccgcaacaaacaccggattagcagatgcatcagccagcacttccacttcggaaggacctgccggcatgtcgatggctacatcccgaagacttaccaactgcttggcagccgtcacatattgatttccagggccaaagattttgtagactttaggaacactctcggttccatatgccatagcagcgatagcttgcactcctcccgctttgaatatcttactgacacctgccagttgagcggcaaagagaatagccggatgaatatttccgtttttatcgggaggggtacaaagcacaatttccctgcatcctgcaatttttgcgggaacagccaacatcaataccgtagagaaaagcggagccgttccaccgggaatataaagccccaccttttcgatacctaccgccttttgccagcaagttactccttccattgtttctaccttcttgccaacgaagcgttgggaagagtggaaagtttcaatattccgtttagccagcgtaatggcagatttcaactcgtcgctgatcagtccttcggctttctgtatttcttcggaagtcacagtgagagcagacaaagtcaccttatcaaaagccgcctcatattccaaaacagctttatcaccttccgctcttaccttatttataatagtacgaactgtatcgaacaagctctccgtattcaaagccggacgcttcagaagttctgcccattgttctttggagggatatttgattagtttcatcattcaaacttattagactatcattttttcaatcggcaacaccaaaataccttcagcacccagtcccttcaatttgccaatgatttcccaaaaacgcttttcatctagtacagtatgaacagagcaccagccttcttgtgccaatggcataatagtagggctcttcatgccaggtaacacagcaattatttcttccagtttatccttcggagcattcatcagcacgtatttcttgtcttcggcagtctttactgcattcattcggaacaaaagttcttccagtacttctttcttctcatcgctcatgtttttgttgccaatcaacagcgcttcggatttcatcactacctccacttccttcaagcggttgcttaccaaagtagatcctgaacttacgatatcaaagatagcatctgccagtccaatgcccggagatacttctaccgaaccggtaatgacatgtatctctgcatttactccgttcttcttcaggaagtttctcaaaatgaccggataagaagtagctattttcttcccattgaaccatgacaatcccggatattcaatgtctttcggcattgccaaagacaaacgacatttgctgaatcccaatcgtttgatgatttcagcatcttcctctttttccataaattcattctcaccgacaattcccaaatcagctacaccggtagctactgtttgcgggatatcatcgtcacgaagaaataaaacttcgataggaaaattggaagactgcaccaacaaagtacgcttcgttgtactgattttaatatccgactctcctaaaagtgccattgtctcttcgaagagacgtcctttggcttgtactgcgattcttaacatgattttatttattattttatgatttacaattcgaacaattcagaaataaaaaaaggcttaccgtattcggtaagccttcgttatctttatagagttatacacactatcaatcacgcccaccgagttattcgttaggaaaatgatgatgatgatgtgcaactgtatatttcatatttcttttatttaatgcgacaaaagtaaagcatttgtttgatacttccaaacatttatcacaaaaagttcagtttttatttcaaattaaaggcaatatctcttctggctctacatcacacttatcaaagtgcatttcatctttcgacttttcgtgcgagaacgtaaagtacgtacaaaccgcttcggtacatacttcgccatccttattatataacttagcttcaataattacaatatttcgcttgacttccttaatagaagcacgcaacacaatatgggaatcagtagtactgaccggcttgcggtaacgagtctccatttttgaagttactcccgttgtctgtaatttacgaagtatcacccaagcgcaaatttcatccatgagaacagcctgaataccaccgtgcaaggtattgatccatccctgatattcaggacggggtttccagatacttaccacttcgtcgccatcttcataaaactccatctttattccggcttcattattaggggcgcaaccaaagcaattgtacccttccagacctttccagggatttattattttcttcataatctatgacttctatttaagtttcacttcccaaatataagcaaaatataaaaaagaagaacaattttccacgatttactttcggatgcaacgaatggcgtaagctttatccaacccggtgtttccctctgctatttcgtttttatcacttctcaacaagaatattttctcatccgcatctgtccctgcttcattcaaagtccaataagaaagatattttccttcataggcagactgaaacttgccggcatacattcctaccggatatccatcaaaccccgtgagattggtagcagttcctactattgcaccggcaccggtacttattgctttccatgtcccggttttcaacaaagaggcatcattgctcaaataagttttcagcatattccaatcattccaatcaggcatattccaccccacaggaagcagcttattactgacaattgttccaaaactataaaaataataactcttatctgtttgagacaatagataacctgtcgctccggcattcataatctccagtttcggaatttcttctccatctatatataatgatgttttcagattacttcccatccaatactgcgtaccaattttcactatcgggtaattgtgaatactactcccacgcacatcacgcattatatctttcatggccaatacgggcaacatttcttcaggcatagacaatgctatttgtccgtcaggcaaaatatacaccttacttcgggcagcctgatttccaggagtatatttcaatgaatgttctttcaaatcccacgctacagttccaccgtgcactttatctgcatgtccgaccaattgtactaccgttcccttggataagtcaaccgcatggttatctttcatcggataaacgacaattgcctgtgaagaaaaatcaggcgtcactagatattctttacatatttctgctacctgctgcccagcactcaacactttatacaccttcgaatcgtcaaataccaattttgacacatccacataattatggaagacttcggacccggactgccctgtatttccatcttcccaactattgatttctccttcgactttacttatcaaaacatcttcggtcgggatgaaggaaatcgccagctcactctgcttaccactctgcaactgcaatgaagagggcaatgggctggtatatatcttacctccaacatccaatacgatatattgatagcccaaagtggtttcctgcggaataaggatcacttcttttccgctcaaccgatctccctgtatctcccattttccggcaggagtaatgcttttctcattagaaaaagcggaataagtttctttttggaaatcataaatcgccttagtataaaaaccacaaacagaaagttttgggtcagcatccagtataccctgcaattcttcaccttcctttcctaccaaagcgatttttaatttgaaaaatttgtgatcatagtgcagggcgatggctcctttaggagctgattgcagattttgagaagcaaccagaaaatcagagcagaaatagccggcagaaagattttgatctgtttctaccgccaccgacatcgtactttctcccatattcactccctcttcctgataaggataataactgatcaaacgtaatgttacctcatcatcaggataataaatcggctcactggactcaaaaactttttcggaagtacgaaagaaacgcaaattatccgcataacgttcttccttcatggtggaggaccctacaagggcaaatactcccacttcatcattctcttcaaagccattgccagcaacacgtgtatatgtcacttcatgaatatcagcagtaaatttcaatggaatatctccattgctgactgcagccttctctcccggaatatgatttacacatgctaatacaaaaaaagaagaaaaaaggcacacagcgattcctttttccattctaaacaaaatattcatgtcctctttatttaaatataaataataagaaatctttgattgggcagaaagaaggacataagaggaagtattcactttcagttatgagattccacacaacacgtctgttgcgactggagaatcatcaactccaacatttcattctgaaatgccaaaagcaaaagtataaatcataaatcaaccaatacttcattttcttaaataatatttatatttattcataagtatcaaattagtagcactttataaatcagggatatttcaaaaccaaataggcttacacattattatattagtaatctaacattttcaaaaagaatagcctatttctaccccggcaatatgtttaccttttggagactcatactgataacaataaaaaacatctaacgcccatcgtttagccaaagctatctctactccaggccgataacgcatacgatctgctctccaaaaaggagcatcatccaaactttgataaatttcaattgaaaagtagggggaaacgattcctttttcgggcgcataagctaattttaagcgggaacgaaggcgagcttttgaatcaccacggtcaaaagtttgctgaaacctttctctcaaaacaattttcaaccactgatattgaaaacttgcagttgctccaaagttataacggtgtctgaatttccattccgaatctcccaaattccggaaatgagtttcatatccggcttccagtttcaaaaatgaataagcccgatactcgcctccaatggccaatcccaaacggtccattctacttacgtcatcctttgtccgaaactccagattgcttaaaagtgaaaatcggggatcgatcttatagttcactttgaatttagtccatgtagtgaaatcatcgctttgcgcaaatacagtggaagtcattccagccaatagcacaaacagcagtattttagtaattgcaaatattctactcatcgattaccgggttaaaagtacaaagataataaatctcccgcaaagaaaaattatgatactgaaataattctgaaatatcaaggctcattcctttaaaagaaacaccccgttggttttaaaggaacaggtcgttggttttaaaccaagagcccgttcctttaaaagaaaaagtccctattttatactccactgataatcaatgatttatttttgcttcgcattccacacccataaagcgaaaaataccgacaatatagccgatccgatccaaaaccaattgatataagtaaagtcgtaaacctctaccccactccggatcgttttatgtccttcaatcaaaactccgctcatgacatcttgcagcccagctccgatataactggcaattccaacaactcccaaagcagctcccgaagcattgcgaggagcaatatcaacagccatcagcccacctaagaaacaaatcagtactccgatgcccagtccaaagaggatcattgccacagcatcgagccaaaagtgtacccctggcactaataagaacaaagataatgctaaaacattcgtcagtccgaaaatcaaagccggaacattacgccggccaccaaacagtttatcagaaattacaccggaaaacatggtgccgataataccacaaacagaactaatggaaataatgaaactggcatccaaagtggaatatcctttctgtgcttccagataaaaaactccccaactgtttaccgcatatcggctgatatacataaatgcacttgataaagcaaggatccagatagcaggcattgtcagaacctgccgttgagctttattaaaatctgtcgtttcggaagcactcatcgttttcttttctttcggaacattgaccggaggaaagcccttgctttcgggactgtcatgaaaaaaacgccatacaattaatgcccccagcaatcctaccatacccgccccaaagaaaccataacgccagccgcaaacactaacaatagatgctacaattataaatgtcagtgcttcaccaatattatgactagcggaccaaaagccataataagagccacgttctttatccgtgaaccaacgggaaagtccgactacacacgaagcagcccccatagactgaaaccagccgctgactccccaaagaacagcaaacaaaataaatgaatgggagaaaccgagacaaagattaatcaatgcggtaacaagcaggccggtagtcataaaacgatttatattacttcgatctgccagaaatccattcgtaaatttacccaccgcatacgtaaagaacagcaccgaaccgattattccgagttccgtttcagaaaagattccctcgtctacaatcggtttctttactacattcaagctcaaccggcagacataatacataccgtacccgaaagttgccgaaagaaaggtagaccattgcagatatttcaaccgacgcttgccggatgaagacataacgtcttcgttacaaggccccggtgaagagaccttgtaaaaatttataagatgtttcagcatgaaggaatatctttagtcgtgcagtttctttttacgcaaatattcgagtaataatgccgggcggtctgtttgaatcagtttagccccctgattcaaaatccatccccagctttcatccggttggtgtagttctaccgcgcgatcgtcatcgtgacctccacaaagttcaggccacaaagaattaatgaaaagcttggcaccactatcacgtactttcctgatcaagcgaagcatttcttcattatcatcattaaataccagttcataagcagccggtttcatgtgtgactgataatcattgattatcttttccgctccttctttgtgcagattcacaataggcataaaaataaccttatcaagtacatcaccattttctgctttcactcgttcataggggagtcctgctttaattacgcaatggtcaattgttcctgttttttcaagtacagcataagcttcctgaaaataatcgtaacctttatcgatattcaccattatcttccctttgcaaagtaacataacttcttcgagagtaggaatctgatgtctggttttacagcctgctccatttttaagtcgcattgctttcagttctgccagtgtataatcctcagcgtttccttttcctgtcattgtacggttaattgtcttatcatgcatgacgaccaagtgaccatctttggtcttcttcaaatctatttctaccatatccactcccatatcaatgcaattccgtattccttgcaatgaattttcgggagcatttcgccaatcggcacgatgagaaacgaccaacactctatcggaataatttcctaacaggttttctctgatttccgcaatccgattttgggcaacagccagttgcaccaggcatacaagcaatataaagttataaattcgtttcataaattcaaatattaaaattattagttcagcttaccgttcttccagaccatcttttctccccacataggcacataggtctggtcacagttaatcttggacgcccgttctagtgccatgtccaatgaccatctggatgcatcaacacctgcatgagccatttccaaaatatgggataacagaacataatccggctgtacctgtcccgctccggtacctaaaatattattctcagtcagcgcattaggagcatagcggggaatcaagacattaacatgtggcgcaatgtttgtatattgttccgttttaaaattggaatcaccgacatgcataaagacgaaatttccagtatcgtccccacagtctatctggaaaatagttacgaaatttgataatccggaattattatgatcggtaatacaagtacggattttaaatttacctatttcataatctttatccccctttgccgtgtagggataagtggtgtctttcaaataattggataataccggcttatccaaatcaaacattgcctgaatcaaatctgtattataatgatcagaatgcttatgcgtcacacaaaggaagtcgatatagggtgcaagttccttcgcccaacgatgagaaatatcaatagcaaaacatccggaaggagtcttaactatatatcccatgttataaagcaaccagatttctgctgtgccattctttactttggagtttttaattccgtccatcacccggtcaaaagcactccggtaatagtataagatcggttcactcttctccatactcatacttgcctgatcaaaaccattcagaaaactgataaaatagtcatccaaacatttatcggcatatccctgaatagtgctcaaagcatcggcacgttcagtatttacaattgatggagaagttccccataactgttgggtagtggcatctacctttgctgccagttccgtaagaattccttcgtacccggtcttcttatcattattatcatcgtcactacaacttgcaagtcctattgccagcaggcaaaacaggaaatattgtattcttcttatattattcatattatttcagtgttttatagtcatcagttattttatcgaaggtctctgcaatccgttcaagagcaggtctcacattattattttcgtgatccttcgtcgcttcatacatgaaaacgcctttatatccggtcttctccaaatcttgcatcaactttccccattttatatttccctgtgtaggaagccagtggcattcgttcaccaaatcaaaatctgaagcatgtatagtgccgatacggctacctactattgccacaaagtgctctgtcgtgcctttggtatagtgatttgtatcaaagcacacttttacgtccgggatatctccgacaatcctcataagttcctccggagtatttcccaaacaggttctgggcagattctctatacaaagttgagcgccaatcctatcagcatatttcttcaaataagcaatagactccgaagcattggcaatccgttgcgcccgaatactatcggctatcggttccgaacttggatgcaaaaccaggcaagtcggttggaacatggcacacaattctatcatctctgccataaaatctacattttccttccttaaccgatcatccagaactgagatatccagcgttcgggagaaaggaagatgaatagaccagacttcaatatccgcactgtctatcttcgctttcatttcctttatacgtggaatcacttcatcgacaggaactcccctataacattgattaaaggctacttcgacatacttcacaccagtcgcttttgcatgaaggaagtcggcagcagcaggtgctttccacactgctgtcgtagtacctacttcatatttctgtgcatatccacaaacagacatcaccataaatgcgataaaaatcaattttctcatcaccgtttatttttgtcggtttgtaccttgaatatctccaccccgtatactccaggaatctgtttccaacgttttattaatgtcaaacgcttttatagaacctatattgctcgctccaatagtaccacaataaagacgcttgtccggaccaatcgaaacggatgccattacctgttgacccacagattcttcataaacagtacttccatctgccgtattaagtccgaaaattttattatttgactgcgttccgatataaagaacaccatctgtactcaacgcagcaccactgtagttcaggttattatttaccttcttcacccatacttttgaaccgtcagcgtctacagcgtaaactgtttgcgaacctttctctgtaaaataaacaacacctttcttatctacgatagggaaataagcatcaccgcctgttgtcggataggtccattttttggttccgttcgtgatatcaacagcaacaagtccagcctttgacttcaaagttgcgtaaagcgtgttgccattcaaagcaaaagttccctgctctgtcacattaacaccactgagtttccaaagttcttccttatttgcgctgaaagcataaatagcttcactggtacctgcatagatatgtccgtttctatcaatagccaccgcacttcctgttgttccatcaagagattgttgccatttaatcgcaccattcgcaacatcgagtgcatataacgtacttttattagtcaaacaatagagtacaccatcagcagacaaagcagggaacgcacctatcggtccgtctaattgcaatgaccatttctgagtaccattcggatttatggcatacacattcttgatagaagcatctctcacgcactgatagatagtaccgtcagaccccactaatgcaccgccgccataagttattttatcaatggcaaatacccatttgaattcgccgctgactacatctaaggcaaacaaatgcccggcaggcgttgaagtcggaatatacatcgtctttccatccggggagaatacaggattggacgtcttgacatatcctgttaatccgttaaaatttagattcagactatcccatttatatccgacaacattaatttccacacttcctgactccgtcgtattattcgtatatgttactgtaatagtaactgtataagttccagtagcagcaaaagcatgcgatggagtcgtttcagcagaagcagtaccatcaccaaaatcccagctgacggatttaacattgccaccagtaaaatacatatcgttataagcaaagacagcagactcccagacaaccaattccgtattgactgctaccggataaataattcccggagtagccaccgcttccgccgaaacagaattccccatcggataaatgcaaacaacatcaaacttatactcctgatcattagtcaacccttcaaccatatattcttccaatgttgtgtcatccaatttgataacctgattgccgggacttacggtaatctgataattcgtaaaccgttcgctggcaggcttcgtccatctcagccggactttcttgtctcccgctgacgcagtcagaccagtcaccggatatcttgcattctttggcgtacaagaagtagatcgcttactcgccaatcctccggtatagcgaggttgtacggagaatgtataagcaacatcattgacaagatcactgacagttgcaccggaagcctcagcctccacagtcatttgccctccttccgctcccgaagagcccgaagtccagctaataagatattcatcaggacgggcgtccggatatgcttcccaggaaagtgccacattcatatctccggccgttgccgtaagcgtctttaattcatataaatcaaaacttgcttttggcagttcttcgtcacaagctgcacaaactgccgtaatgacaaacaacaagctatatattatttttttcatcgtctgaattctttaagtttaaccatattaataccccggattctgccacaacaactcggtattgttgattctttccaattccgttttaggaataggatacagaaactggaaatcctgaattgtatgtccctccgctttcatagcttccttggcacctcccatgcgaacaaggtcaaaccaacggtgtccctcataaggaaattcctgttggcgttccagcataatggctttacggaaactatcctgatctgccagttccgtaatctgaaccggagataatccggcacgggtatgtaccgcattcaaagcaaccattgcatcagaagtctgagagttgctatagctgatttcgttcagtgcttcggcatacattaacagtacatcggcataacgaagaataatctgatcgttaccgacggtattgtatgtcgcacttttcaaatccttgaatttattcattacgcaaactttatcttctactttcacataagtgatcaggtctttgcgtttatcaccgtctttatagcactccttcaaagcctttgtctggttagtatcatctgtcaggttgataattgaaaaccaataaccatgtccttcaccctcaacgtccttattaaagcgcactgcgaaaatgatttcatcgttcattttattatcgacatcaaatactttatccggtgtaggcatcaaagaatatctgcctatcagttgcgaaagtacattgcgtgcctctgtccacttatggaaagtcagataaatctttcccagcaatgccattgcagcaccggaggtcgcacgtcccgtatcagtacccgtataagaagaaggcagcatattctcattgataacctgattcaaatcgccggtaagaaaatcaaagacctgctgctctgagcttcttccgattttaagagcttcagccaccgtcaccactttatcagtcatcggaattccaccccacaagcgatacatattaaaataagtaagagcacgcacgaaaagcgcttcccctttatattgtttcttcaacgtagcatcaaagtcagctgcgtctattttgtccaataccaaattacagcgatatactccgttattaaaattcgcccaggcggattccaatattccattagaggctttatccgcaaactgatctatatcataacggtcttgtgttccggcagtaggagcactcaacgacaggttgtcactccgatattcgcagcattccgtgaagtaggaaacctgtccctgcaatttagaataacagccgatcactgctacattaaaatcgtctgctgtcttgtatactttatctgtaggcacactgctacttggctccaagtcgaaaaagctatctgtacaggccactgatacaaaagcagttgccaagaataggatttgtctatatattttcatacaccgtatatttttaaggatgactaaagtgttatatttaatccaaacaagaaggttttcgccagcggatatgttccgtaatcttcacccggcgaaagtgaattgctcggacgtgcatttacttccggattgtatccaccgtagttggtagatgtccaaaggttctgtccggagacatagactctcaacttctccacaaagaaacgacgtgtcagattctgaggcaaagtatatcctaacgttacattctgcaatctcaaataagaaccatcttccagatgccaggttgaagtacggccattataacctttcgatttgcggttggcacggttcacctgaccatttccggggttatccgcacttttccagcgattcagggcaatcgtggtaccattggtgtttccttccaaattatcaatatagcgacgattcagattcagaatctcattaccgtaaactccctggaagttaaagtcaagatcaatgcctttataccatactttaccaccaaatccataggtgaagtcgggcatatagttacctactatcgtacggtctttgtccaagtccatcacaccgtctccatccacatctacaaaacggaagtctcccggctgagtattgctgaaatgaggatatttcttcaattcttcttcgttggaaaagataccgtcctgcaccagcaaatagtaacatccgatcggttcgcctacttttgtgatataataagcatgatctacgcttccggtagagataatgggagcatttcccggaccaagagcttttacttcattggtattcgtagcatagttggcattaaaagaatacccaaagtctttggtgaaatttttctgagatgtcaaggctatttcccaaccacggttatttacttttccaatattcatcagggcagtgctgtatccggtcagatgaggaacaggaacattcagcaacatattggaggtattggtattatagtaatcaactgttatccccaataatcctttgaacatttgcaggtccacaccgacattgaccattgcattcttttcccagcttaaatcatcattcttaattgtattaggtttatagccttgcaccagttgtccgttacccgtacccagtatataattatcaagagccatcaatgatagatgatcgtagttgcctatctgaaagttacctgtaacaccataactggttctgattttcaagtcatctacaaaggagagaaatttcgccttcgtgaagaaatcctccccgctaactctccatgccaatgatgcggacgggaaatatccccagcggttattttttccgaaacgggaagaaccatccgcacgaatagctccggaagccatatatttacctttataactatattgcacacgagccagataggaagcaatcgaccattgggtcttatcagacgccccctttataactgttccaccggagatcgtctgtatataatcattcggaaaatcggtagctgtcacattatctcctttataagtttctttttgtgcagattgcaccagaaccgcattaatcgaatgatcttcattaatcactgtattataattaatcttattctcaatcagccaattaaaataaaaaccggaggagctgtatgcagtagggttcgacttgatatcataatatttctggcccagtaagggtagttctgacgaacgatactgatcattatgagaaccataataatcaccaccgaaagaaatattataagtaagtcccttgaaaagttccagttcggcaaagactttccctacaattgccatacggtctactacgtccgattgcagattggccattgccacagggtttaataccgcattgtgctgatagtcattgccaattctccaatagccatttccctgatagttataactaccgtcggaattatataccggccacacaggaggcatcatcaaggccgactgaacaataccattcgatccggaagcatccacccgattggaagtcgaataagaaggagagaaattaagaccgaatttcagtcttttatattttccgtccagattcatacgcatgctatatttcttgaaatcagaattgatgataataccttctttatcataataattggcagaaataaaataaccaacggtctttcctctgccggagatagaaacattatggctggttgtagccgcactacggaaaattgcatcctgccagtctgtgtccgttaatccctgatcgccgttcagataaggaaaaagttctgcaggaatccgttcccatgaattcggacgcataccattagggtcattgggtgaaccaccgggattagcatccagataagaattatcatgcccgtctttggcaaactccgcaaactgataagcattcaacatcggaagttttttcgaaacactctggataccataatatccatcatattgtactttcattttttccgactgcccttgtttggtagtgataataattacaccatttgatccgcggctaccataaatcgcagcagacgaagcatctttaagtacctctaccgactcgacatcattattattcagattggcaaagccacgctccacaggtacaccgtcaatgatatagagaggatcactccccgcattgactgtactgataccacgaacacggatactgacacttccttccgggtcaccgctcggctgagtcacttgcactcccggcatctttccagctaatgcctgacgaaagtcggaagcagaaacctccgcaatctgctcggctttcacggaagagatggaagtagacacatcccgtttccgctgtacaccatatcctaccactactacttcatcgatcatcttgctgtcttcggtcaacgtaatcttagccgtattcttatcttttgcagaaaggctgacggtcttatagccaatataggaaattgtcaatgtagccgattccggtacattcatcaacgaatatcgtccgtccatatcggtaatcgtaccactgccctctcctttgatctggacactggcaccaataactggctctcccttatcatctacgaccactccctgaacggtacgtgtacgttgagcgctttcttctttaagcggctgtttactgacagcaattgtattatcggtcctattgaaataaagttttgactgagtagttatcactcccagaatttgtttaagcgtagcgttttttacatcaaaagaaacatgcggagcgttatttaccgtttcctgatcgtagataaatttaaagttggtctgttcactgattttattgaaaacattttctaccggctcgttttgtacacggagcgtaatgttgttctctttcaatgtctgagcagcagtcggagcaactaaaaggaaggtgaatagtaaaaaagctaaaaacgagcagctatttctactttttcctttacaaataagaagattattcataaatttgtgcgttttagtaattgactaaagttattaaaaacaagcaacgtgcgatacgttattcatttgggtcgaagcgaatgaatatccgtccgggttgcggatagaagcattccttaggagtgcttctatctttttagggagtttctatgagggtgatgctttcattctgtccttattaacgggttaaacattgatctattttttaattctcattttttataaagaagtatattcctgccttctttcttataattgatatcactgataaattcgatggatttaagtacggactccagactcttattgtcatgttcaccggtaatcagattatcaaattcctgtccggaagcaaaggttatctgacaattataaacacgttccagttcttttgccacatcccggatcggagtactgttaaaacgcaggcttcccttgatccagactgctaccccacgttcttccttcttcttactatattcaccggaaacggtatttatcagaacttgttcttttgcagtcaatcgcatcattgcttccggcagatcaacctgtactttgccactctctacacttaccgatacgatttcatccgtagagtaagattttacatcaaaccgggttcccaaaacacgaacatccagtcgcttcgtctgtacaataaacggcatatcttcattatgggcaaccctgaaatatccttctccttccagttccactttccggatatccccttgaaaagaatcaggataacgtacttgtgaacaagagttcaacactaatatagttccgtccggtaattccacccgtttcttctctccaaaagaggttgagatttcagcgaaagttatctgctgctcactcatataccggaaatagctgatacttcctgtcacgatggctattacagccgccacactggctgcaatcgtcattacccgacggaaccaggtacgtttcttatgttcaatatgtttcagcaactggcgagcctcctttttatacttctcacgctccaagtcagtaacaggttgctggctgacggattcctcccagacttcggcagacaactcatccaatatatctttatggtcagcatctctcatactttccagtaactgcgatgcttcctcccggatgtacatatcatccagatagcgacgtaatttgtttttttctgtcttcgtatctttcatcatatattcaaataagggtgctgatttctcaccttcgtattagtaatacacaaaggcaggaaacagctagggtatgattaacatttattataaattcagacaaagtagaatcagcaatatgtcagcagaagtacccgaatatttagtcaagtaggcacgaatcactttcaacgaaacagaaatatgctcctgtacggtattgacagagactcccagcgcttcggcaatttctttatgggacatctgtaaatcgcggctcatattaaagacttcacgctgacggggagtcaattgttccagtgcgcggctaacgacatccttcaaatcatcgaacaatattttattattcgtttcattggccgaatcaaccgcatgagaaaggatatgctctttcaacttatcttcattcgccatatcccgtatctgattaagaatacgattgcgtacaatcgtatataaataggaggagaaagacgcatccggattgataaaacgcctgctttgccatacaaccgtaaacgcgtcctgaaaaatatcttcggcaaactcacgagatttgacgaacttcatcgcaaaatacagcaagcgattcttataggcggcatagagttcgcaaaaggcatcctcatcgccgtctatcagacggagaactaactcccgttcgtccataagcgtgtctgttgcgtacatattttctttacttttgggcacaaaggtattgttatgatgttacaaacgtatgtattttttctgaaataaaaaaataaccttctttcttattgagtttccggccgagaactttgtgtactctttaattgttgtcctattataaaagtgcgaacaaagcacacaacaaagttctataaaaaagaaaggaagattatgaaaaaagtaatcgacagagcttcatcaagaggctattttaatcatggctggctcaaaacccaccacacattcagttttgctaactattacaatccggaaagaatccatttcggagccttgcgagtgctgaatgatgacagtgtagacccgtcgatgggatttgatactcatccacataaaaatatggaagtaatttccattccgttgaaagggtatctgagacatggcgacagtgtacaaaatacgaaaacgattactcccggtgatatccaagtgatgagtacgggcagtggtatctatcatagtgagtataacgacagcaaggaagaacaattggaattcctgcaaatatgggtattcccccgaatcgagaatacgaaacccgaatataacaatttcgatatacgtccgctgctgaaaccgaacgagttatctctgttcatttcaccgaacggcaagacaccggcctccatcaaacaggatgcctggttctctatgggagacttcgatacggaaagaaccatcgaatattgtatgcatcaggaaggtaacggagcttatctgtttgtgatagaaggagagatcagcgtggccgatgaacatctggccaaacgtgacggcatcggaatatgggataccaaaagcttctctatccgtgctactaaagggaccaaacttctggtaatggaagtacccatgtaaaaaacattatttctagttttattctattctatttaaatgaagcggtcccactctacagagtgagaccgcttctcattgatagttatatcttcggattatttttccttccgataattctccagtccagtttgcaggaattcaatatatttgggaatgtcttcatcgtaagcataagacttattcaaaggacttccctgattatccagcaatacatagaaaggctgtgcattagcaccaaacttcacacgttgcagatagctccacttatcaccgactgtacgcaaagtacgttccttaccgttctctacgattttcacaggttcggtcaacggagttttattatccacatacagagtaatcagcacataatcattattaatcagatcactcactttcgggtccgtccatacagcggcttccatcttacgacagttcacgcatccatagcctgtaaagtcaagcatcactggtttgccattcagacgtgcatactccatacccagatcgtagtcatcgaatttcgcatgtacttcattcttatacagattaaagtcttgcgtatgcataggaggcgcaaaagcacttacggcttttaacggagctccccacaaaccgggaaccatatatacggcaaacgccagagaaataagtgccataaagaaacgagtcactcccaccttattgtcatcatcgtcatgcggaaacttgattttaccaagcaaatagaaacccagcaatgcaaagatgacaatccacagagcgaggaaggtttcacggtcgagtaatctccagccataagccagatcggcaaccgacaggaatttaagcgcaaatgccagttccagaaatcctaacgtcactttgatcacattcatccatccgcccgacttcggcatagacttcagccatgacgggaacagagcaaagagtgtgaacggcaatgccaatgcaatggcaaaacccaacataccgatagccggggccaccacgcttcctgtagtagaaacctgtaccagcaggaatccgataatcggacctgtacaagagaaagataccagtgaaagtgtaaatgccatcaggaagatactcagcagaccggtagtcgattccgctttactatctaccgcattgccccactttgacggtaatctaatctcaaacgctccaaaaaatgaagcggcaaagattaccagcatcaggaagaaaaggatattaaagacagcattcgtcgataaagcattgagcgcactggcaccaaatatcagtgtaatagccaatcctaatgccacataaataacgacaatggaagcaccataagtccacgcatcacgaatacctttcttcttatctttgctacgtttcagaaagaaactgactgtcatcgggataataggccacacacaaggagtgaacaaagccagcaatccacccaggaaacctgtcacgaaaatataaatccaggacatatctccctgagtatgttcctcgcccagtgcctgcaattcactgattaccggacgccaaaggtcaccggaagctactgctggttgaatatcggcatttgcatccgtagcagaagcaggaaccagttccatcatcgcagcagagtctttggacgcagcaggagcagttacctcttccgcctcttttgtctccggcttatcaactttggctacaggagtagccgtagttccggcctttgcttcacccgaaaacttaaaaggaacttctgtcggaggcagacaactctcatcgtcgcaggctccatattccagataaccttctatcgcataagctccaccagtcagcttcactttctgcacgaatttggcagtattctcgaaatagcgcactttcatttcgaacagtttgtcgaaagtagctatttccttgccgacaggcttcaatttaccaaccagttctacaccggacttcttctccacattaaatgtggcagaaataggtcctccgtctccaagatcggtagaataaacatgccaccctttgtcaatggcagctgtaaacacgatctccgcttctgtatcagaaagagagttcagttctgttttaaactttaccggatctttaatctgcgcctgcaatgtataggctacaaagcttaaaagcagaaaagaaattaattttctcattttcattattgggggttataattcataatccacgcatgcacgactgtcctttgcttcagctataatctttccggctgccacatgatcagggtgtgttgcatagaacttcacatcctccagcgtgtcaaattcgctatagagagctatatgccaagcctctcccggattcatattcagtccgacttcaatcttacggatcactgaaatcttagcggggagcgcttcgatagcttccttaaatttattcatcactacgagtttctccgcttcgggaacttcgtcttttaacttaaataatacaatgtgtttcaccattacgttgttattttaatgaattgtttctatatttgtcttgtcaatgcattacattactaatgcaaaattactctatttggttcaaataacactataaagagatgttaataataggaatagcaggtggaacgggctccggaaaaaccaccgtcgtacgaaaaataatagaaagcctccccgttggagaagtagtactattacctcaggattcatactacaaagacagtagtcacgtgccggttgaagaacgtcagaatatcaactttgaccatccggatgcttttgaatggagcttgctttccaaacatgtgatgatgctgaaagaaggaaaaagcatcgagcagccgacctattcttatctgacttgtacccgccaaccggaaaccatccacatcgagcctcgtgaagtcgtcattattgaaggtatccttgccttgtgcgacaagaagctacgcaatatgatggatctaaagatatttgtagatgccgatcccgatgaacgcctgatacgtgtcatccaaagggatgtcatcgaaagaggacggacagcggaagctgtcatggaacgctatacccgtgttctgaaaccgatgcacctgcaattcatagaaccctgcaaacgctatgcggaccttatcgttccagaaggcggcagcaatgcagtagctatcgatatattaacaatgtatatcaagaaacatttgaaaaatgaagaatgaaagataaagagttcagaatgagtgccaagacactgatcctccccttgtttcttatacttttgtgctgtgtattcggatgccggaacaaacatcataccgaaaagaatgaaacagcacacgatcttccacagattaaagacagtggagaactggttgtgctgacactctatagctctacttcatatttcatttatcgcggacaggaaatgggattccaatacgaactcagtgaacagttcgctaaaagtctgggactgaaactcagaatcgaggtagccagaaatgtccgtgaattgattcagaaattacagtcaggcgaaggagatatgatcgcctacaacctgccgattaccaaagaatggaaagacagccttttgtattgcggagaagacataatcacccatcaggttatcgtccagcaaggaaatggaaagcataaaccattgaaagatgtaacggaacttatcggcaaagatatatatgtcaaaccaggcaaatattacgatcgcctcgtgaatctgaacaacgaactgggaggtggtatccatattcataagataacgggagatagcgttaccgcggaagacttaatcacccaggtagcacaaggtaagattccctataccgtagccgataatgatttagccaaactgaataaaacttactatcccaatctgaatatcgatctttctatcagttttgaccagcgttcttcatgggctgtacgaaaagacagtcccgaactggcagccgccgccacaaactggcataaagaaaatatgacctctcctgcctatacggcaagtatgaagcgttacttcgagaatagtaaaatgatgccacactcccccatcctttcacttaaagaaggaaaaatatcacattacgacgatttattcaagaaatacgcccaagagatcggatgggactggcgaatgctggcatccctcgcctatacagaatcaaactttgacacaacagccgtatcttgggcaggagccaaaggattgatgcaattgatgcctgccactgcacgcgcaatgggcgtacccgcaggtaaagaacaaaacccggaagaaagtataaaagcagccgttaaatacattgccgccacagaccgaagtttcaatatgatccctgacaaacaggaacggctcaacttcatactggcttcttacaatgccggcctaggacatatctacgacgccatggcattagcaaaaaaatacggaaagaataacctcgtatggaaagacaacgtcgaaaacttcatcctgctcaaaagcaatgaggaatacttcaccgatcctgtttgtaaaaatggatatttccgtggcatagaaacgttcaacttcgtacgtgatattcagtcccggttcgaatcgtacaaaaaaaagataaaataagtaataagtatcaggtaataggtaataaccgtagcttatcaatagtgtatccgcacggcttattacctattacttattacctattacttatttactacttgtttctgcccgtcaaaaggctaaccaccacaatagccagtatagacaatggtaatgcaaagagaatagggtcaattaccggaaacggatatgtctcaatcaatacatccttgccaaacaggaatttacatattcccattgcggcagcttctttctgatgaaggaatattagtgcaaaagcactgcctaaagttcctacccagagacttgccataactccctgtttcgtcgctttcttccagtacaatgcacaaaagtaggcaggaagaaatgcagcagcacagatacccatgaaaatagaagttccgcgggcgataatatcgtgaggcagcatatagcaaataatatagctgaccaaaatagagaaaagtactcccaaacgaatcacatttgtcaatttgccacgagaacggggtttataagtaccataaatgtcagaaccaaccgatgctcccattgtgtggaactgagaactaagcgtagacatacttgcagaaaggatacagagcataaacaaagcggcaaaccagtccggcatagctttattgatgaaataaggaatgattttatcaatatcctgtatcacttccgtagcaacggctccttctgtcttcaagaagaaaagattgcttaatgcaccggcatgatagatagctcctaccgttataatcaggaaaaaacaaccgataaatacgccacgattcaactgtttgctactttctaccgtcataaaacgtaccaccaactgaggctgtgcaaggcaaccgattcctactcccaaaataagagaggtaaccaatgagtaccactgcggagaacctgtcacaggcattgcggtccatccctgatgccccaatgccttgaacttttccggaaccagaggggctatatttgtcaattccttgtttgcttccgtaaaacccatgccaagcacctgatacaaagagaacaacaggaacaacatacagccaaacatgataactgcctgtaaagcatccgtatacatcacccccttcattcctcctgcaatcacatacgcagcaatgactaacgtaaatatcagcagagatatattaaaatcaatctgaaaaatctgttcaataaatacagcgccccctttcatcaccacagcagcgtacagcggcatgcctataaatatgacggctgcaatgaacacctgtatattacgggaacgaaaatgacggcctaataactgcggaaaagtgctgacattcagttttgctcccatgcgccgcgtacgcaagccgaagaatatgaaggcgataactaccccgacaaacatattgaggaaacacagccactgaatacccataccgaaagcagccgctactccgccaaaaccaactatagcagacgcagagataaacgtagcaccataagaaagcgccatcactatcggattcatctgacgtccgccaaccagataatcactggtattcgtagtcttcttatatcctaaaaaaccgaggtaggccaatgacagcagataagctatcacaatcaagccaagagtaaatgtattcatcgcgtttcgtctttatcgtcgtccttattccaatatttcagcccaaaccaggcagcaaaaatcacacatatcactgagaggatatatggcaagactataaaagggtcatctattccaaacatttgcgtatcagattttaatcaattaagccacaaatgtaaggaatttattgaaaagacaaaacttttgtttactaatactgattataatgtatctttttctcgtcatatttctgtttcggctgctcttttgttgcaggatagccgaaaggaatgacacaaagaggaagaatattctcgggcaggtgggtatatttgcgaacgacttccatacgatcttcatacggataagcagctgtccatacagcacccagccccatactttcagcagccagcaaaatattctgtgctgcagcagaacagtctaaataccaataaaaagaacggacagaatcaccacagacaataatcgcattacgggcttgtgtcaacattttggcataaggaagagccgccgccatcgaatccagtttcgcacggtcggaaacaaccacaaactcccagggacgaacatcctttcccgatggagcagacattccagcacgaagcattaaatcaattttctctttctctacacctttattcaagtaagtacgcacactcttacgctcaaagatattatccaaagcggcatttccggtgccggttgttcctttttcctcttttgaggaagaacacgagatcatagcagtcattgccatgaacatacacaagaaagaaaaaatctttttcattgtgacaagtctttaaaataggtttaacttatttttctgggcttcttccaacgatactgtttcacggcgtaatagtccgctcttctcacgaagtgcctgatattctgcatctaactcattaatcagttcggctttcatctgcgaattcaacagccgggaggcaacactggcattctgagaagcatctttcagatgtacaaccggtgcatgatacacaggcgcgatcttcagtgccgtatgcatctttgaagtagtggccccgccaatcagcagcggaatatccagtccggctttctccagttcgacagccacatgagccatctcttccagagaaggtgtgatcagaccactcaaaccgatcatatccactttttcttcaatggcacgctgaacaatggtttctgccggaaccatcactcccaagtcaactatatcataaccgttgcacgccattacgacggcaactatattttttccgatgtcgtgcacatccccttttacggtggcaagcagaacttttccggcagaagatgatccttccactttttctgattcaatgatcggttgcagtatagctacggctttcttcatagtacgggcagtcttcacgacctgaggcaggaacatttttcctgcgccaaaaagctcgccgacataattcattccatccatcaacggaccttcaattacatctacagctttatcatataaaggtaaagcttccgctaaatcctgttccagataatcaccgattcctttcatcaaagcatatttcaaacgctcttgtacggattcttctctccatgcatcctgcttcacagctacctgaccggaagtaccgcccatcgtttctttcaatgcttccgccagttctatcagacgctcggcagcatcgggacgacgattcaatacaacgtcctctatcttttccagcgtatctgcaggaatatcactgtagagtacggaagttcccggattgacgattcccatatccatcccttgctggatggcatgataaaggaataccgcatgcattgcttcacgaatataattattgccacggaaagagaaagaaagattactcactccgccgctgacgtgtgcaccgggaagattcttcctgatccatccggtagcttctataaagtctacggcgtaattgttatgctcttcgattcctgtagccaccgcaagcacattcgggtcgaaaataatatcatgaggattgaatccaactttatcaaccagcagacgatatgcacgttcgcacacttctatcttgcgggcagcagtatccgcctgtcctttttcatcaaaagccatcacgacagttgccgctccatattgcttgatgatccgggcatgctccagaaatacttcctccccttccttcagagagatcgagtttacgattgattttccttgcaggcatttcaatccggcttcgatcacttcccatttggaagagtcgatcataacaggtacacgggctatttccggttcggacatgatgagattcagaaaagtagtcatctcagtccgggcatccagcagaccatcatccatattaacgtcaataaccaaagctccgtcttctacttgctgacgagctatggaaagggcttcatcatatttcttttcattaaccagacgaagaaacttgcgtgagcctgctacgttgcaacgctcacctatattcacaaagttgatttccggtttcacttccagcagttcgagtccggaaagccacatacaatccggtttgggtgccggaacatgaggtttggcacctgctatcagtgcctgatattctgcaatgtaggcatctgtcgtaccacaacaaccaccgataatattaaccaatccttcctgaatatactccttcacttcatgagccatatctgcgggagtctgatcatatttccccagactattcggaaggcccgcattaggataagcactgatataataaggtgcacgcgaagccaactgttcaagaaaaggcttcaactgacgggcaccaaaggagcaattcaatccgactgaaaatatattggcatgctgcacagaagcaaggaaagcttccaaagtctgtccggacaatgtacgtccaccgatatcggataccgtcacagacaacataacagggacttctattcctgtcaccttcatagcctgtccggctgcaaagatggcagctttcgcattcagcgtatcaaatatggtttcgataagaatggcatccaccccaccttccagcatggcttccatttgctgctggtaagaggcagccagttcgtcataagacaaggcacgaaacgccggattgttcacatccgggctcatagaacaggttttattagtaggtccaacggagcctgcaacaaaacgcggtttatccggactctttgccgtatattcgtccgccagttcacgtgccagtctggtagcggcaagattgatttcgcgcacatattcttctacatgataatccgccattgagacagttgtagaactgaatgtattggtctcgataatatccgcacctgcttccaggtatttacgatggatatcttgaatgacatcggggcgagtcagacacaacaaatcattattccccttcaactgaccgggaatatgcgcaaaacgttcaccacgaaaatcttcttctttaagattatattgttggatcattgtgcccattgcgccatccagaatcagaatacgctcggatacaatctgagaaattgtctttttcattcttaccttattacattaacacctaattgtcactctgcctatcttagacctatcacgatcttatcttactattacgctataaagccatcttatcgcttaaacattcgggccatgtctctgcggtcatctttttctttaattgattcccgtttatcgtactgttttttacctttcgccaaagcaacgaccagtttcgccaaacctttttcgttgataaacaaacgcacaggaacggtagtaaaaccggggtctttcattccccgttgaattttctccaattctttcttattaagcaacaactttctgtctctacgagctgtatgattattgtacgaaccatagaagtactcggcgatatgc

SEQ ID NO: 4538 - DNA, 93110 bp, Unknown
  gut microbiota DNA sequence
aaatgggtcatcctctcctggagcttctccaccttcagctggtcccgctttaatattatccaatcgataacttaacgcttcagaagagctagtacttgtatatttaaatccaacaaatcctgttttaccagcttgagcactcaaatctgctgtcaatgatacccatgtattatctgttgttggcatccctgctacatttatcgcagtagaaaccatcttaccatccactaattgaaggaaataaacttccaatttagaattagcagaagcagttgcataattgtatacagcgcaatcgaaagatacttttttatccttaacttgatccacctcaaaggcaggagttgcaaaccaacattcaaacttttcaccagtaccaccataagaagtagcttgaatatatttatcggttttacctgtcgtggtattattaaatgtctttccttgccagcgtctaccaccttctacagcaacattataccaaccttccagttcataatcactatttgctaccaaatcttcaaaatcagcagagaaagtattatttttctttgaatcatccaagcctaacggattatctttatcaccaggttccgggtcaccaccatctccaatatctttaccatcaagaaccgcagcagtaggactcttaagaccagcaactccaaaatatttcgtcaactgtcccttaattacaacggctttacccaagtttccaccattgtcaaccaaatttaatgcagcacgaacatcggtttgagacactagctgtactgggatacatttcttataatctgtttcatccgcatcagcagcaatcaatatatttgcggcatttgtaaaaggaggtgcaaatacagcatcagtcgaaatactcttatcattaatgcaacctacaatatatcccatcacccaagcttctgagttatcctgtttcgtcatagcacttgctatgtcatatggattctctttcgtaccatctccagtcaaggcaggtccttcgccgtttcctcctccattgatatcataaggagcaggaacatcactacaactaaatgtgactaacgttattatagtcaagaataaagcatttagaatctttttcataatagttgaatatttattttattagttatttctttgaatatcactatatgttctagctacaatttgccatgtactattataacggctcagaatacctatcacattaattttacctgtcggcatcacttcggttgagaaattagcataagtgctggtacggaacgtcaatgttgaattatcatccaacaccaatgtacggtttactccattaccaccatccttcaaatcttcaggagcaaaagtagcagtaccatccgcttctttaattgtaacatccttgaacatcacaagtacaggcgccaagtctttatcataagctttcagctgagcgccggtaagttccatcggaataagctcgtcataccacaattgaggtttattgattactctgacatgatccaaccatacagccaggtccatacgtccaatggctcctttgtaggtagtacctatctgagcttgcattccgtatccacccacattcaagttttcacagtcaatcaccactttctgtccaacagggcaattagcataaatgccagtagagttaatacctaccacaatagctcctgtttcatcagccacaatcagctgtttgtagatatttccactttcgtcgtcacctactactataccggaaatccgagtttcttcagtaactgtctgaaactgatttgccgaaattactgaactgtatttttccttcagattagcaatcgaaatagtccgttgctcttttatagtgttattaccataagcgttccctgtcacaggcgtatcaaagtcgtccatacatgacgaaacgcctaatgtcagcaacaacgcggcagataaaataaatgttatctttttcatatcatttccttgtattaatttgcccatttatttagaatctatatccaatgttcaagaaagcattgcaagcaggagcataatagtacttagagttcttagagaaaacatatgtacgtgcttctccgtcatcatagctatcatcacggttctgctcatatccgccagtacgcaagttcgtattattaagaatattgttcacactgaggttaatgctcaggctctttccattcttcaaacgaatatatttaccaatagaagcgtcaagcatgaaaccaccattcaattcttcctgctccggtacattgtagcctaccggattaccattagcatctacagcgccatcagaatactttcctaatacactacctaaacgacggtaagtagagaagtccagataaacacggtgataataatttcctgttacgttaaagaaccaacctttcacgctgtagtccagtccgaggctatatacagacaacggtgttccgttatcacgaagtcctttacaataaacgcggtcaatattagattcactttcactttcataagtacgaacagccgtaggattattcatataacgggcatcagaccacgtaccgatagctgtcaatgacagattggacatgagtttaaaagttgcagcagcttccacaccccaattttccttatcaattccgctcatagaaaggtaagtgaaacgagcttcattatcattgtagaaagcatccatttcaacctgatcattaaaacgagtataatatccagtgacacgtcctgaaacaataggagtattgaaacgataagtcaattcaccgttataaatcttctctgttctcaaaccatgtgcaaaatcgttcttgatacgaggagcgatgaatgagttatatgccaacggagcacggttctcataaccggcgttcaggatcaatgaatgattaccgttaatagaatatgtaaatccagctttcactgcaccttccaggaatttagctgtgccactgcttcccaaagatttcttaggagcacgaccattacgcatctttccatcacggctaatttgcgctgatccgatcttacctgatacgaaataattgaaatgtccatcgttatcaccctgataacgcgcccatacattttgtttatttacaaagatattatagtcataaccgaacttatcaccttcaccgatacgtctgttaggattgtccaagtcattctgaatcacataagagttataaccataatcacggacagagaacttatcaacatctgtatataaatcaccacccaacaaatccttcatcttcttatagtgcatacctttagtagtattcacagctaaaccgaccacatagctattatgctggtcaatcgtatgattgaagatcgaactgaaattgaaagctaactggtcattatgacgttcttcctgataatacaaggtctcttttcccaatgcattggcctgctgattggcaaagtacatctgatcccaatcaatttgacgagtagacttactggttttccagcgctctgttacttcattgaacagattcaactcatcttcactcggcactgtcgacttatcatatacattaaagatagaactaggcagcttcttataataatccggacgaggatcggcagcattgcccgaccatccaagtgcacttgttccataattactatatttgaatcctgcgcttgtcttcagcttcatttctttattgatatcaaaatcccaagatgcgatagcagaaggctcgaaagagcgtacaacacgtgagttacgcttttcaccattctgataaccccagtttggattgtaatagtgactattagccagataataagcttcttctgtagaggcaccttgctgtcctctttctgtaggagccccccatgtagctatagacaagctatgtttgtcattaaagactttctctgctgccagaaaataagagaacgcattatagaatgtaccttcaataacaccttcgttagcccaacgatatccgagagaacctgtaaatgcccagccattcttcaataaacctgtagaataggtatacatacctctcagaatatagttacgattacagccggagagacttaattttgatcctgctgcatattgactggcacgcatattgatattagtagctccaccgatagggccaaaggtgaaattattaatttcaaaagcaccgataccttctttattacgtgtcgcatcgttcaatcctccaatcattccatagctgaaacgaccggtttctacatcattgaacagaacaccattaatatacgtatcgctgtactgcgaattatagcccctgacgcgaaaacgcatcgggctaaacaagtagccgacattagaaaggtacacatcattgttggaagagacaaaagcagatgcactttgagctgcatcatcatcttcattcaattgcgattcagtgaatgtgaaagaagcattatcttcacgtgcattcttttcggccttctgctgagcaaaaatagctggcgaaagacaaaacaatgcaatcactattcctaatctttgtttcataatttaaattattattagtgttaatttgtagcacgaaaattcacagttatattacagcgagagtacaaaacaacaaaaaaaaagggatattacaagaaaaaacaaagaaaaaataggtgataatacttgtttttccgttttctttttagatatttgtcaaaccaatgtaatattcagaaacctaatttatagataaataatgaaaaagtttttaacggtatggggcctgttactgtttatttcgataacaagctattcacaggagaaaaagtatgctctttacagcgtagcgttttataaccttgagaatctgttcgatacaattcatgacgcgggcaaaaacgactttgaatatttaccaaatggtaaaaataagtggaactccatgaaatatgaagcgaagctaaaaaacatgtctgaaatattaagtcagctatcgacagacaaattaccattaggaccaactattatcggtatgtcggaagttgaaaacagaagagtattggaagatctactcaaacaacctgctttatccgacagaggatacgaaattgttcattatgaaggtccggaccggcgtggtgtggactgtgcatttttctacaatccgaaattctttcacctcactgccagcaaactcgctccatatatttatgagaataatgatactacctataaaacccgtggtttccttattgccagcggtacacttgccggtgaaaaggtgcactttatcgtaaatcactggccttcacgtgcagccgcatcacccgctcgggaaagagcaggagaacaagtccgagccttaaaagattctttattaaatgaggattcaaatgcaaaggtcatcatcatgggagacatgaatgacgatccaatggacaaaagtatggctgttgcattaggagcaaaacgcaaaactcaagatacaaaggaacatgatttgtataatccctggtgggacactttaaagaagggtaacggtactttaatgtatgatggtaaatggaatctgtttgatcagatcgtatttacaggaaatttattaggtaatgacagaagtacactgaaatattacagaaacgaaatctttagaagagattatatgttccaaaaagaaggaaagtacaaaggatatcccaaaagaacacatgccggaggtgtatggcttaacggatatagcgaccacttgccaaccattatttatttaatcaaagagattaaagactaacgaacagttaacttatgaaacataaattcatccaaaccttactattagtagtactccctaccctgtttgcagcgtgtggtagcgacaacaatgatccaacagataatattggcggattaagtgttagtacagaccttaaaaacaatgaagtttccgcaaagggaggcagtttctttctacaaataaagacagacggtaagtggactgcatctagtcaggatagttggtgcacaataaataacaaagagggaaacgggaatgcctctaccatctgttctgtgtctgccaatgatggagataaacgtcatactgttattaccgtaacatctaatggaaagagtgaaaatgtaacgatcactcaaaaaggtggaaatggtgaagagcctgatccggatcctaatccatcgggatatgcaggaaggattgagattccaaagctaaaaggaggagatatgaatatctttcatacttggactactaaagtaaatggcaaagaaaccgttacttatagctatgaatatgattgcacgaaaaagcatgtacgttgggtagcattcacttttgataatgtgacatccggagatggagctaaacgcagagatccatataaaacggatcccaatattccctcaaaatatcaaacaagtcgtgaagactactataacccatacaatagaggacatatggtagcctcttctgatagactgtatagtcaagaagcaaatgatcagacattctattattccaatatcagtccacaacttataagtggattcaatgagggaggaagtacttgggatgcaatagaaaaccaaatacaaaaatggggaaaagtttttaacgcccaagacacgacttatattgtaaaaggaacctctatagactatgcaatactcgagacaggtaaatatggcgtacaaatccctaaatattacttttctacaatcttatcttataaaaatgggcaatataaagcgataggattttatatagagcatacatttgataaatcaaaagatataaaaaaatgtgctaaatctattgatgaactagaaagtataacgggaattgatttttatcacaatctacctgatgatatcgaagccaatatagaaaagaattataaagaaagtgactggacctggtaagaaataacattcatctttaagattccctatctgtaaatattggacaaaacagatagggctctttaatatttaataagtgaatcacaaatattgcaaataactcttccggtctttctatatcaaaattataaagtagaggcataccattgtattcaattaatccattatttccataatccagatactattgtatctaaataacaattacttttctcaaaagacaaagcgtaatgcgttgttttatgtagcaaccgtttatgatttcaaataaaatagaagaacagaagcaacacaagatttaccccgatcaccgtcccgaatcctcccaaaatccagggacgtaacttactacctttccctgcaaaaaacaaagcataaaacatattcaccagaatattactgataatagcctgcatactgcaagccacaacaaccagtacagctacgctccctgtattctgcaaaaggttcaagataaaaggagtaatgtcactaagtccggatacaaaagaaagcagattcaatccgcctgtacccgcataaaccaaagtatagtgcgtcagcactgtaaacacaacgaagagagtggcaaaaatcagagcaactttaaattcgagcgggttactgctgtcctcatcttccgactcatcggtcatatccttggagcgtcgatgacgggaatggataaaccacgcaacaacggcagctaccacagacataatcaaaagataaggatagatagatgtaaatatctccctgctaaagatcagaatcaatatcataaaacgcagaaacatcatgctgaccgcaagcagcatagcagctacatattcgttcgcctcctgctcggaagcctttctacttttacgggccaataccgaaattgtggcagtactactatataatccaccgataatgccggaaaccaatactcccgattcatgaaacacatagcgtttcagcaagtaagacaaatacgagataccggagacgacaaccgttgccagccaaatagaataaggagtgagattaatatccggaatcaggttcttgtgcggtaacataggcaatatgataccactgatagccaagaactttgccagcgtaatcatctcatcgttcttcatccgctgggcaaactccgtaaaagtgtgtttaagctccgtcaataaaagcaccgtcacaatcaccatcacataaaaccaggaaggctgggtagaaacaataggagccagacaataagtaatcagtgcaataataatggtcgttacaccaaaaacatggaattgagactgcttgacgtaatagttcaagcccagcaataaaccgagcacagcaccaccacccataaacagacgcatatccgtaggatcgagtatatagagcaaatagcctagaataccaatgaaagtaaatgtacggtcagtcccgaagagagttgtttccccttcacgcttcagactgatccgtcgttgtgacagtccgataagtaaagaaaataaagtaaccagaacgaaagttatcagttctctcggtagataattgtacaactgttccatatactgctcttttagtactaggaacaaatatacagcttatttgttaacattcaccacgttttatacggttttttcatcaggtgagagttatagtagcgtacatccccggtcacttcttcgccaataaacccgggcttgacaaacgcctcatcttccgtgcccagctctacttcagccacaataagtccttcattctcaccgtagaactcgtctacttcgaagacatgattgccactacgtaccagataacgggtcttatcaatcattcccggttcgcaaagtttcatcagttcttccgcttcggacaagggaagttccttttcccactcatagcgactggtacccgattcgttggaagcacctttgatagtgagataacctttatcgtcacgaatacgaacccgcaccgtccgaccacgggcgctgcaaatatatccctgcataatccggctctgcgcaaaagcaaaggatttaaaatcaccggaaactaaaaatttacgttctatttcttgtgccatagcacaaagataattaaaaatcaaaatctcgtcataaactcaataacgattttatcacgctccgattctttaggaactccggacttctgatagaaatacttctcaaagttgagacggagatcggcaataaaagctttggaaaggctcagcgtgataccgcctgtcacacgatgacgggcatagtcgtttatcttcaaaacacctgtctcactgtccgccagcccattactgtggtcagtcatcatatcataacgggccagaaaagaaatcttattgaatacttttttcaacggcaaatcataattcacaaagctattgaccgcatgaacgtccttaaacgcttcgtgtccatacattttatataaatactccgcttcgatatgaaaacgattattctgatagtagatgccggcatcatacatattaatacgggtatgttccggctttatcatttgagtgctcaaagtgagattccaatttttattaggcagcaactgtgcttttatcgaataattcaaggtcttatgccattccttctgattagtcagaccggagccgttaaacaatccaccttcaaggacaaaaggaagaccttctttttgtgtataacaaccggtgaagccgacatcacgcacattgcccacctgcttggctataaacgaacgattggcaaaatactgctgatggggagaacgatgggcatcgatcgtgaaaggtacacgcatctgaccaatcgtaaaattcaggtccttgacaggaaacacacgggcatacgcatcaagcatcttgatggacccctcatcggacaaatcgatctccgctttataggctacaatcggatgtacatttcccgaaacactgaagcgggcattccgcacttcaaaacggctttcgttggtttctgtctggaactcatattttccccggatcgttccatgaatttcaggcaaataatctttcagttccatgatctgcttatccagctgtttgccatccccggcatcttctttagcctgtccgcaggctgctgtcgccatcaaaagcagggcgacggttgttgtaattctactcattcagttgtttgctacttaattcgcggcaaaggtacaatgagcaggatacggagagattacaaaagagatacggtgaaattacagaaaggttacaatactgttacacggataacaaaggggttacaaaaaaaaattcaccacggactaccctcgtcagcatggatattcaccgtcgacaatcaacgtgtccccgtccatgcaaaactgtgtaacctgtggtgaatcaatcagccgaaaaaggaatatgcgatcagcataatcagcgccaaaataatgagtgaaacaaatactatcttgactacccgctgggcctgctcctcctctttcttactatgtgctacttttctcttacttttacccataatgttagctttaaagttcaacgctaacaaagtaaaaacaaatcttttaactttccaaaaataacactcgctaatttttgtttttatgattcctgcgatgaaaattccatcagataggctttgatgaattcctcgattttaccatccatcactccgtttacatccgaagtctgatagttggtacgatggtctttcacgcgacggtcatcgaatacatagctgcgaatctgcgatccccattcgattttcttcttaccggcttccactttcgcttgttctgccatgcggtgctgcaattctttatcgtataagatagagcgcaactggcgcattgcattctcacggttcttcggctggtcacgagtttcggtattctcgataaggatttcctcttcttctcccgtataagggtctttgtactgatagcgcagacggacgccggattccaccttattaacgttctgaccaccggcaccaccgcttcggaatgtatcccatgaaatgcaggcaggcagaatattcacttcgatactgtcgtccaccaacggagtgacgaacacggaagcaaacgatgtcatgcgcttgccttgcgcattgtacggagaaacacgcaccagacggtgaacaccgttctctcctttcagataaccataagcgaaatctccctcaatattgatggtacaggttttgattcctgcctcatccccttcctgaaggttggcgatagtagccttgtaaccgttcgtttcagcatagcgcagatacatacgcatcaacatagatgcccagtcctgactttccgtaccacccgcaccggagttgattttcaacacacaggccatctggtcggcttcatcacgcagcatattcttgagttcgagtgcttctaccgcttcactggctttcgcataagccgtgtccacatctccctcagtcactaattcttctttataaaaatcgaacgacagttccagttcgtctgccagcgtcttgacttcattatagccgtcaatccacttttgcaaatctttcaccagtttcatctgggcttccgctttcttctggtcatcccagaatcccggcgcctgcgttcttagttgctcttcttcgacttgaattttcttcccgtcgatgtcaaagatacctcctcagcgcatcagtgcgctctttcacgtctttaagttgttcaatagtaatcatgtgatttacaattttatcatttacaatttacaaatttctcttttcggtgcaaaggtaagaaaaattccgctacctttgtttctgtcactaaaatgttgtcacaatatgaacaaactcctgaaactttcatgcttatcgctcttccttgcattagtgatgagcagttgtagctcacaaaagaagtatagctacgagacagtgcccaatgacccgctgaaagcccgcatctacacactggacaacggattaaaagtttacctcactgtaaacaaggaaactccccgcattcagacattcatcgccgtgcgggtgggcggaaagaacgacccggcagaaacgaccggactggcacactactttgaacacctgatgtttaaaggtaccgacaagtatggcacacaggattatgctgccgaaaaaccactattggaccaaattgaacagcaatttgagatataccgccagacgacggacgaagcagagcgtaaagcgatctaccacaccatcgacagcctctcttacgaagcatccaaatacgccattcccaacgaatatgacaagctgatggctgctatcggttcttccggcagcaacgcctacacatggtatgaccagactgtctatcaggaagatatcccctccaatcagatagagaactgggcaaagattcaggcagaccgcttcgagaataatgtcatccgcggtttccatacggaactggaagctgtatacgaagaaaaaaacatgtctctgacccgggacaacagcaaagtgcaggaggcgatcttctcctctctcttccccaagcatccttatggaacacaaaccgtattgggtacacaggagaatctgaagaacccttccatcaccaatatcaagaattactataaacaatggtacgttcccaataatatggcgatctgtatgtccggagatttagacccagatgaaaccattgccttgatagataaatacttcggaggcttgaagccgaatccggaacttcccaaactgaatctgccgaaagaagatccgatcaccgcacctgtagttaaagaggtattaggtcctgatgcggaaagcgttgcactggcatggagattccccggattggccagcaaggatttcgaggttctgcaagttgtttcgcaagtattatacaatggaaaggcaggactcatcgaccttgatctgaaccagcagcagaaggtgctgaacagctacggttacccgatgggactggcagattactcagccttcatattgggcggacttcccaaacagggacaaacgctggaagaagtcaaagacctcttgctgaacgaaataaagaaacttcgtgccggagagttcgatgagaagatgctgcaagccaatatcaacaacttcaagctctacgagctccaaagcatggaaagcaatgaaggacgtgccgacatattcgtcaactcattcattaacggaacaaactggaaggacgaagtaaccgccatcgaccgcatggctaaactgaccaaagaggatatcgtggcctttgccgataaatatctgaaggaggataattatgccgttgtctacaagaaacaaggcaaggacccgaacgagaagaagatgacaaaaccggagattactcccatcgtatccaaccgggatgtggcaagtccattccttacctccatacaggagaatgcagtaaggcccatcgaacctgtattcctcgacttcaagaaagatatgagccagctgacagcgaaatccgacattccggtactctataagcagaatactaccaacgatctcttccaactgatctacgtattcgatatgggtaacaacaacgacaaggcattgggaacggctttcgactaccttgaatatctgggcacttccgacatgacaccggaagaactgaagagcgagttctatcgtctggcgtgtactttctacgtttctccgggcaacgaacgcacctacgtggttctttccggtctgaatgagaatatgccggctgccatgcaactattcgaaaagttactggcagacgcacaagtaaataaggaagcttacaacaatctggtcggagatatactgaaagcccgtgcagatgccaaactgaatcaaggacagaacttctcccgcctgatgaattatgcgatgtacggtccgaagtctcccgccaccaatttactgacggaagcagaactcgccagcatgaatccacagaaactggttgaccggattcataatcagaacaactacaaacatcgtatcctgtattatggtcctagcagcagcaaagacctgctggctaccatcgaccaatatcaccaggtaccggctactctgaaagatattcctgcaggaaacgagttttcttatcttgaaacaccggcgaccaaagtactggtagctccttatgaagccaaacagatctatatggcgcaaatttccaatcttgataagaaatacgatccggctatagaacctacccgcgaattatataacgaatatttcggcggaggcatgaactccatcgtcttccaggaaatgcgtgaaacacgcggactggcttattccgcatgggcgggtataatgccgccaagctatctgaagtatccatatacgatacgtacccagattgcaactcaaaatgacaagatgattgatgccgtcaatacgttcaacgatattatcaacaatatgccagaatccgaagcagccttcaaattggcaaaagaaggattaatcaaccgcatgcgtaccgaccgcatcatcaaaagcgatattatctggacttatatcaatgcacaggatttgggacaaagcgtagatccgcgcatcaaactctataatgacgtgcagactatgacattgaaagatatcgttgatttccaaaaggaatgggtgaaaggacgcacgtatgtgtattgcatcttgggagacaagaaagacctcgatatgaataagctgaaagcagtaggccctatcgaggaactcactcaggaacaaatcttcggttactaaagtatagtgttctctataaaatagcagatacatagccaattgatacacaaagaacaaacggtgaacagcttgccaaatatgcagcttgttcaccgtttatcgtttatcatcaggccagaccgagaaaagccttattcttcgtacatcttctcaatcagttctttgtagttttcagaaaccactgagcgtttcaacttcaatgtattagtcaattctccacgctccatgctgaaaggttcaggaagtaatgtgaagcgtttgatctgttcataatgcgcaaattgctgttgcaaggtctctattcgtgcacggaacagaccgacaatctttggatgctgcaacagttcggccatatctttatattcgattcctttctccttcgcatagtccttgacaaacccgtacaccggaacaatcaaggcagaaacgaacttgcgctgatctgcgataatagcgatctggtcaatataacggtctatcaccagtttggtttccaatgcttgcggagcaatatatttaccattcgatgtcttaaacaaatccttaatgcgctctgtcaggaataactgcccattcttgaaataaccggcatcgcctgtatggaaccagccgtcagcatcgatagcagcggcagtagcctccgcttttttataatatcctttggttatactttttccacgaagcaggatttcattgtcttcacctatcttcacttccagtcccggcaataccacacctaccgaaccgatatcataacctaccggcaaagtacatgataccgtagccgtagattctgtcagtccatagccgaccaccatgttgattcctaccgaatgaacaaattcattgatttcatcgggcacggctgcaccggctgtcgggaagaaatttccattctcaataccgatcgtcttcttcagcaaagaataaatggtcttctcgtagaacttatatttcagttgattcatcaccggaggggtctttcccaaccggagataatccagattatggattctgccgactttgatggcatccagcatcagcgccttcttcaatcctgtcgtttcattgatcttctcctgtacaccggcatataccttttcccagaaacggggtacgctgcacatcagtgtcgggcgaatttctttaatggttgtctggatatctgccggacgaaggttgatgcagatctgtactcctttatgaatacaaagatagcaccatgccttctcgaatacgtgtgtcaacggaaggaagttcatagaaacgtccttgtcggtcattgtcgtcagacgctcgtcatgcgtatggaactgctccagatagcacgaatgatgcaacattactcccttcggctctcccgtcgtaccggaagtataaaggatgttagccaaatcatcgtaagaagcacgtgcggtacgttcttccaccacctcattatgcggcaatccttcgcccattgccataaactcatcaaaatagatggaagagacatcacgcgggtcttttactaccgaacggtcgaaaataatcagttgttgtaacgaggaacaaaagccgaagatgctgaatgcagaatcatactgatactgttcgcctacaaaaagataacggatttgcgcatcgttgataatgtattgtgcctgtgcgggtgaactcgttgcatagaacggaatagtaaccccacgattggcaaatgcgccgaaatcgacatagaaccattcaggtttattctgtgaaaaaataccgatattctcttgttcctccactcctagcgcaacgaaagcattagcagcctgtcgtacagttccggagaattgattccaggtaatcggaatccattgtgctgtctcatagtcgcggtacctcaatgctaccctgtcgccatacttttcagcctgacggtggaccaagacagataaatgatgataagtcatactctttgtattgataaatatggtacaaaggtattagttttatttgaaactattgcgcaaaacgagtatctttgtgcaaatattaagctctaaattaacaagtttgtatatgaaatacgatattccaaccatgacagccgaagctgtaagcctgttgaaatcactaatcagcattccgtccatcagtcgggaagagacgcaagccgctgatttcctgcaaaattatatcgaagccgaagggatgcagaccggacgcaagggaaacaatgtttggtgcctcagtcctatgttcgaccttaaaaagccgacaatcctgctcaattctcatatcgacacggtaaaacccgtaaatggctggcgcaaagaccctttcacaccccgcgaggaaaacggtaaattatacggattgggcagtaacgacgccggagccagtgttgtttcgctcttacaggtgttcctgcaactatgtcgcacttctcaaaattacaatctcatctatctggcttcctgcgaagaagaagtttcgggtaaggagggaattgaaagtgtattaccggggttaccccctgtttcattcgctatcgtaggcgaacctacggagatgcaacctgccattgccgaaaaggggttgatggtactggatgtaactgctacgggaaaagccggacatgccgcacgcgatgaaggagataatgccatttataaggtattgaacgatatcgcctggttccgtgattatcgtttcgagaaagaatcacctttactcgggccggtaaaaatgagcgttacggtaatcaatgcgggcactcagcacaatgtagttcccgataaatgtacatttgttgttgatatccgaagcaacgaactttactccaacgaagatttatttgcagagatcagaaagcatatagcctgcgatgcgaaagcccgctcgttccgcctcaactcttcacgaattgatgagaaacatccgttcgtacagaaagcggtgaagatgggacgcatacctttcggttccccgactttgtcagatcaggcattgatgtcctttgcgtcggtaaagatcggtccgggacgctcttcacgttcacatacagccgaagagtatattatgctgaaagagatagaagaggctatcgggatttatttagatttgttagacggactaaagctttagtccgtctttaccactcatcaagtagaaaatcggctatatgccgatgcttaaccccttcaatattatcttgccatagatcatccatactaaccacatatttaggataatgatcatcaattgccagtaaaggggcaaactcacgatcgatggttgcttgcaagccaagttgataagtaacctgcacatatattttctcttcacgcctaatggctacaaaatcaacttctttttcatcctgtttacctacatatacttcgtatccgcggcgtttcaactccatgcaaactaaattttcgagcattccacctattaagcggtcccgatatcccatcacagaataaattaatgaaagatcacttacaaaatacttttcattggtttgcagaatctctttgcccttgatgtcataacgtggtatacgttgaatgacaaaagcgctatctaaagcattgagataattataaatcgtattgatatctactttccgttgctgacttttgaaatagtcggcaatatttttcgcatttagtttattcccaatattatcaaaaacaaacttcaccactctttcaagcatttctacgttacgaatgctatgcctctgcacggtatcacgaagaatgacagaagaataaatatcatacactattttgtagatagcattataatcatagtttgccgtatgaatagccggaaatcctcccatacgaagatatttcagaaactccgttttacggtcggatacagaaattgtcagcgggagatcatgaaataatagatattctctaaaggataaagtcataatgtgaaaggcaacgtatcttcctgccaaataagtcgaaaactcggaagatagtaaacgtgaattagaacctgtcacataaatatctacatccaagtcaaccaaaaaggcattcactgccttttcccaatctgtaacttcctgaatctcatccaagagaatataatattttcccgaggctttcgtagcttcccgaatatgagcgtataacgccttcgcctccttcatgtctatccactcgaaactttcaaagttcatataaataatataatcctcagatactcctcttcgtaaaagttcctcacgaattaaacgcaacacgaccgacttgccacagcgacgaataccagtgataactttcacaaatggcttatcaataaaaggagtgatttgctccatataaagttcacgattaatcatacaactgaagtttttagggttatagacacaaatataaataattaatcggaagtttttaggggtatacccctaaaaacttccgatttcaagtatgttttatggttatagacagaaacgacaatggcatttatgaaaaaaggggcacctcctgtatctttatctaagataagaaatttagccaccatcataataacggtggctaaatcaaagaaaaacaaccagtttcaatggtctattcaatccatcccggatttacaaagagcatagagaaaaaagtttacccgattcatattatatatcaaatcagacatttccatgcgatccactattgctcattttgttaagatactgtttccatatcaaaaaggcaattatgcctaacagattaaataacaaaaccaaaatgacccataaatatttatatggtttagtaagttgatgacttttcaacacgaccaatatcccaatcaacaaaatcagaacataaacaatttcaaaaaacattggaggcataatcataatttttattctcaataatcattaatatgcagaaactgtaacacttccctttcccgcactcttatcgtatgtccctgaagaattaataacataagaaaggttaaagccaacaacctgagttatagttgccttaattttccccgtactattaaatgatatagcatttcctgatacatagccactcgcataagattgagaatacgtataaactgataatcctgttatatctgtcattactgttacatttttgttatcttcgatcaaagttacactaaaccatgtaagattccaaatccaatcactgaatgaataaatttcactacgtgttttagcaagcggcacactaggtttctgctctttagtagaataaaacatacagccattttcttctttatccttatacatctttaattcaacagggtgttctctaagttgttttatatcacgaaacaattcttcaatttcttctaatgacatctcattttcagttttttctgaaggattaatctcaaagaaatcgacgtttacatcatatttttcagctaatgatgcaatctttgttttaacttcttccttcttaacttctgaattagcatcaaactcttcatttgtacatgcaattattactaccatagtaacaactaaataaaataaacctttcatattcataatgtttttatttaaaataataaatcaactatatcatattgctccgaatataccttctaaaagacattaagattctaattattccttttccaacaacctgataaaataggcacctactacagtacgccccgtaaatcctactatagttttcccatccgtatttatcaaatcagccattggtgtgcgatctgtagtctcattcataaacttatgaagcggcaacataagcttacggaattgcatacggtcagcactcaacgaagcagtccatactgtccaatccactttcgtataactatgtctgctatccaacggacatccaaactcattcatcttagtaagatagaaatccgtctctttctgaataactctcttcgggaaaagattcaagccaagcagcctgtcccacaccagattatacttcatcccccaactatccggttggtcaaaagccagtcggtaatggtcacccgcataagcagccatttcccattctttagccatctcaccggcagcattcatatacttctccgcttcttctttcttattcagcatttctgccagacgtgcatacgctgcaatacccaaaacacctttggcggataaattagcatgatgagggcagttccctgcaaaattatctgtagtaagctgatcaccggtatccgtgccgttttccaataaatactcagcccattgagtcaatgtcttccaatgcttttctgcatacgaagcattcttttccattttagcaatagcagcagtcattatcaatccgtttcctgcttcttctacaggcatatcaccacctatcgtctgcccgtttacgataggatatcctcctaaatcatgcggaggaaatggctttccccatttcccgctttcactataataaaagaacggattaagcatcgcttttaccaaatcgggattgtagcgaagatatagtggtgaagccggataatattcatccaccggacctacctgcggagtaaaataaagcaattctccatccgaatcttcagacatctggaaagcggatacagactgacgataagccaaagcacagagttcagcatattcttttcctccggcaaggtaagcatccgccatcaattgacggtcaaaagcataacattttgccatcacttctttataatctttctctgcatctgcatacaaatcttctatgcttgattttccgtctttattccaataaggtcttaagtcctcgccgaaataagccattgtatacagtccgtcaaaggctgcagtgagatgttgcgggaaatcgctgttcatatccagcttctgtgcaaatgcagcatagcgtttctcggcagactttctcatttgtttcagatctccctctttcataaagtatgccctcatttcggctgcatccccctgtgcacaggtcacgtcatcctttgttcccagatagaaatatccccatgaccgtccatctttctctttatccacccataatttctgattttcctgtccggtcttcatcagagccagtccatccttttcatatatttgtgtagattgtccggcacgaaatgccttgtgcgggtctatttcaaaataaacagcaacatcatgttctttgccatccaatgctttagcctgataagagatataattgaccggacgggcaagtgtctccagatcgtccaacagataaggagcggtaaagctaagtttcagttctacatctccacattcgaaggtataatgtgtttgggttgcttgcacatcgacagacgtttgttcagcttccctcaattctgcatatagtccgaagtcaaccaatgcacctcccatacgattctcacaatgagcggcaatcacggctttcccatctttcatagtttctgcaatagaatccgggatatttactctgagatcacttttccactcatatcccgtgctgaccagttgcattccattcacatacaattgaaatacatcatcatgggaatagcgtaaatacagttgcttgtttttcaccaacgccgggtcgaatgtcagttcgcgcctcacccatatattaggtgagaaccagggagtatgcacatttcgttgatcatccgtgccgaaggccgcctgtccttctgtccatgttgtatcgtcaaactctttggcttcccaattttcctgaggttgctccatagtatatcttcccgtccactctttttcataagagatgggggctaccttttccaccggcatagtcggttcctcggcaaagagtccgaagtctaccaatcctcctcccacacgattctcacaatgagcggcaatcaacgcttttccacttttcattgtttgcagaattgagtccgggacttccactttaaagtttgctccccagtcatatccggtattcaccaattgcttcccattgatgtacaattgaaatacatcgtcatgagaatagcgcaaataaatctttttatgctccagaagatacggatcaacttcaacctctcttcgtacccaaatattagaagaagtccattgtgttcttgcttcccacatgccaggcgtgccaaatgccccttctgacaattgccagtacttgtcatcaaaatccggttgctcccatccttcatcaggaactaatgaagtgaactttccttcccacttttcatggtcaagcgccatcggagcgatagcttgcatcggcagttctttactacccataaaacggtacatagcaccgtctacccgtaagaagccaacaaaaggaagttgtgtgctgccgccaaaagtcatattctgtttgttcagttcatccgtcatagaccaaagtttcacatgcggatgcaaagttaataacggataagcaggcgcacgaaggtcacttttagtagtttcatcagagtaaggagtacttttgcaagctgccaatactgctattagcagataaatgaatgttttattcattagtgttttataaattctcattcggttactatatttatttctattatcacacaataaacaatccgtagattcctaaatgcacaagcgaagtgattgacaacaaccgtattaattccatattcattctagttttatagacatattcattttttgtatttctctttccatttctcttttcatcatcctaatagtagttgtcttaattttcatcggtttgctaataacggcctcagccatagcaagcgatcgttctttttcaccattcgttttgtataaatggaatagtttataaagaggtagaaagcgcgaagggcacatcatagatgcactattataatatttttccgccagttcaggtttgttaagctgctggtaattttccccaattattaactctaaatcataatctgcccaatattgacgacattttaaagccacttctagactttcggtatattgcttcatttcttgaagaacagcagcataattatagagaaaatagggattactcacaaacatcttttctaatctctcataggttggaagagtttcattatatgacttacataacgctagcgtagaagcttttccccagtctaattctgcttgaatacgttcgaacaatttactactcccgaaaagagaatatgtaagtatgaacatacaagctattttctttattaggatattagaaaataaaggtttgatatattcactagttattatgaatatgcttaaaaatgtcacaacccaaacgaaaggatatgcaaatggataagaaaagaacgagaatattcctattgaagacaaagaataaaaggctatttgcttttctacacttggattcttcctatagcaatatataattattaccatcaataacaacaatactaataaaccaataatcccaaaatttaaaagaagtccaagatattcattaaatggttgtttcacattatctgccaacatagaaaaacggctttgtccgcattgcttaaagaaatttgcctgataatccatatagtgcgcttcgaaactacccaacccatgacctatccaaggagcatcttttaccatatttataccacattgccaaatcagcagtctaccatcggctgagtttttcttcatccaatagcaaccaaacaacaataatatcagactgctacataataatagatacttccaaattcttttctgtttaagcttttgaaacaaaaatatcgcaattactattgcaacactaataattccagctcttgaatatgatagtacaattgctattacaacaataatccctaaaaaacatactagataccgtatttgcttattttcatttaataattggaatacaacaaaaaagggtaaactgacacaaagacaagcagaaaatcccgtaggattttcaaaactccccattatcttataaaaagtattaaaggtggttatattaaaacattgagacagaccatatattgcttgtaaactagaaacaataacaatactcatcccagccaatcgtgtatcaaattttacagattttcctaataacattctaattgaacaatatattgttataattaaaacaaataagatcgtatataaccatttagaaacaatatagggatcggttatctgggtagaatacataaaaacactaccaatgcaaagaagagcaaagccgatttgagtaatactcacttttgacatataaaaactcattattacttaggaataaataaaaagttgattataaaccacaaaacattaagtatttattcctaagttttcatctacttattttaacacataacatgtcttctaagcacatccaagacatttaatagaaccacaagaaaggctaaaatgctaggaagatattctttcaagccttttttctttttaggaactttacttactgtataaagaaaaagaaagacccacattaacacataaacacctgaaatataccagtcatttatcaaataattatagtttctattaattgtcatgagcaatacagatagtatagctaaaactataaagatattataatacctcatttagcgatctatagcatttgacaaacaatcataataactacgatcagcaagagttgttgcatagtcatagccagcagaagcaccaatagcacaaagacatacaccaagcccccccgttgcacaagaacaaaggagcatagatgatagataaatagcagaagcataagcgtagtcttcatcatatctacgcttacattccgctttagtaacacctcctgcactttcacccggactttttagcaatagatgttgcatagtattctgcgaattatcagagaatctaataaaaacattcattttttcggactcatctaacaacttaaaacttttattagctaatagttcctgtcgtgcattctctaccattaaagcctctttttcaatgtcaaccttactcacaagttctatcatataatcatcattatttaagttattcataagttcatcaaattcttctggagtcaaagttgaagtatatgattttaacttctcagcaagtaacatacagttcattccgtaatctaataattcatcagattcggctatagaattgacaattgttgcacgattatccattgattctaggttagctctcatttctaatgatgagttgggattagcaacaaaatcgtcattctccgaactacaactttgtgcaactaacgccacaaatagaatcaatactgatacgcttaaaaaaaggcttttctttctcgaaatcataattttaaaatttaatcattaataattatttacttattaaacttgttcatctttactaaatcatatatcgctagcttaataaatgacaattagcaaaataaatcaagtttttattaaaatcatatctgaatttacttccaaatttgttcagctgctgtatacacaaatattcgttcctgtattcctcgtgtattgttacataataaaagtaaagcattcactggaattttgatataaatcagcgagtccgctttagacctttggtctccaagagatttccaattattcctccttgcacaatagaataactcataatcatcacccgaacgaatatagttatcataactccgaggcgtataaacaattcttcctatctgcttaggagttccaagatcaagacctgaccaaccaccggaaggttcgatataatcaaaagaagttgtgacatccccatcaaatacatttgtatactcatgcgaaccatctttttgaaaacatccgggagtacctataactttaccttttaaagaagcggtatcattaggagtataaaaagccgcctccgcaatattacagtgtgaatctttgggacctatatatctgacatagcgatacgattttgaagaatacgattgaacaacagtctgtagtcttttcggtttctcgtttatcaagtacaagacttctttttcacgaaaatcaggatcattgcttccttcaaatgttccgcctatcatacgattcaaaaacatctcatctgcccgcaaagtatattttgcaaacaaagtaacatcctgtacactatccgaaggagtgaaaaaatgaaactcattggaaacatttatttcaaaaggatcggtccaaaaacgaagtcgtcctcgctcgtaagtggcaacccgcatgacgggtcctttttgtatatccgtaaagacaatgtttttaccatcgaactctgtccatgcaacaggctcccaatccatccgtttgctggcacatagataagcaattcttgaacgtggcttacctttatatagagcgtcctttggtatgtggagttctttcttgaaatctttggtataagggaaagtaatatctacgatatgcggatctttgaaaagaggaacaatagcagtatccaatttcagcatttcttcctgcatagcacgattcagactaaaggtattgcgatagacctttatcttgggcattccacacattgcgtcttttcgtacttcactcacaccgttaggaaattcatgataataaagtatgccatacttatctgaaaatgctacccattgatggctatcattctcatcaccgcgaatcggcatgaaatcaattgaacacggaatacccaacgcacgacaaacataaacgacaaagtctgaaagttcccggcaactacctgctttcagttgcgcaacttccggtcccacatgaggaaggctggcaggaacggcagtagtaaataccactcctcctttacgaattgaatcgagcaaacaacgggctgccacaatcgggtcttctttatcaagtactccggatgcacgtaaagaatcgagcaaaggattatacttctgataaatagattcacgccagctagtcaaggtctcgtcaccaatacgataaggaagaagatattcacaaaaatctgcaaacgaaacatgtttcccccatggttgttcctgccacaccttaaatgaccattcaatattattacataaataagcagaatcaacagtttcaatatctctataggattgcaaagaatctaaatacaatgccccatacatgtgacaaacagagtcagccactacttggggagaaatccccaatccacgtgtttcctgtagtaaagtatagtaagtaagatatcggtccaactgcttgcccttataataggtgtaataaggcatgttctctatcaaaaaacaagcggccttatatttcaaactatccgccggatcagttttataatgagataagaccttttccagttccacacggttctctcctgcctgctgaagagcggtttcaaggaatgaaaccattggagtgcatttttctttttcagcacatgaaaagaaaaagagactaccaattgctacgagcaaaaagacagataccaactttgtgaatattttcataattatcagaaaaatagagataaatgatttcgtgttatttttctgcaaatttacaagttcttttgccatagaaaaagagggcgttacactcctacagcatgtagaatgtgccacaggaggattacagcgaggatatttttttattttccctaatattgtaacaaccgaaataccccaaactttccttctctgaccacatattatccttttttgaatgaatattatcctttaaagtgataccaacattcagccctttcagatttgacatcctaatagtatagatcaaacgctgtacatctttagttcaatcgtagtacatcgtctactccaacgttgtacatcttttactcaactgatgtacaagaatcagacaacttaagtacttctcattatcaagtcttgtacttatcagtaagtagttaagcttaattttttatttcggataataacgactggactaaaccttaacaacgaatgtgttacaccaataagctatcatatagcgcctgtgagctttctaggagcgattctccttcatattttacactaaattgtaacatcacaaacatgaccaaattgacactagaccaaatattttccttttattgaatgattattatccctaaaataagtctatttttcgttactttgcatacacatttaaataaaacagaatatgatcacaaaaaagaaaaaatacactttgtattatgtaatggcattagcctgcggactggtagcttccttttttatttatagttgtagcgcagacggatattactctgacgaaatagaaaaaaacgaggtaactaatacacgtgcactttcatcaagaatgataaataatggaagcactcttattgattccatcgccagttcagatgaattttgggaattcgaaatgagctccgagcttttagcagataagtttcatgagtacacttcaactttaagtgaagaagaatatgacaaacttatggaaaatctgaatgatgatgactacgtggaagacttcatgaggaaagccaatctagaaaatgaactacagcaactggcaaaagctaaagaaaacctgattaaacatacaagatttttaagattaagcgcagatgaacggacacaactctttatactatatgcagaaagtaacgaacttacaaaagtaaaactcctgaaaacacgcgaagaaggaggaagtactagtagctgtgaagaacaaaaacaagcggcatataagcaggcaaaagctgattatgacaatgctatcgctaactgtcaaaatggttcaatgccatctggctgcttaatacaagcagctgcaaaatatgatagagccaaagatatagcaaacaaggaatacaaagaatgtatagctaataaatgaaaatagttaaatatataatcttatataatataatgtgggggattagcatcactatgtgttactttcaccgctttattgatgatataaattattctcttcaagacttccttattactttctttgaacttctagcatggattgtgctcataatcggagccatcgacacattccctcaaaacaaatattcgaataaacgcgtatggttctactacgccattatgggaggatttatatcagcaatccattcttttataggactaataaacatactagagattacctaatgtaactcctgcaaaaaggtttccatgtcctcatcttctatacctaagctcgcacggacacgagacctcatggcacggcaagcaccatcgctaatatcaaaaatagacaaaatctctttcttagttttcctcatcctaataagtacacaatatacaatatgacgtggaggtatttttatttgcttatttttcaaccaaacaaaaaaatcaggatcaatcgcacggcacccttcaattaatgtaaggttctcactggcggttaattgatatatagattgattttctaaaagtctgcgtacaaatacaacaccttcaagcacaggtggaggagaagacagcagttcctgaagccgtttctcttgaagaattgttttttgccgttcaatttccaatgaacgatagaatgagatagacaacttaactatccctgctattgccaaaccgacaatgaccagcacaggtaaagtataagcagatattacaggagccaattcaacgtgaacctccttaggcataacaacataaatctgatttgcaacaatcaacaaaaaggcagcaatgcattgccaatcagttatctcggagggtaatccagatgttcctttctcacgaagtgtccataggagtgcgcccacaaagagaatcagccacgcaaaaagataaaaagatgacgagaatgcatcaacatacattcctgggaaaaacatctgaaacagataagcagccaacaatacaaggcaacagagcaaaccacctgccaacctactctttataaagtcagcgaattgtattgttactcttttattcatcgtatcttattttaaacactgcaaagataaaacattcccattatacaaatccattaacaggctattttatttgagcatgaatatgaataaaacaatgatttacctatgtcggaaacaaccaatatagaagagcaagaaaaataatgtataccaatattcttatctctttgtatattttattatgacggagaggataatctaatatcactaaaacaatgaaccaaatagctatcattttcgttggaagctgtttattcaaaggatcaccaaaaagtaaaaagaagcctgccaacaccaatataatattgattatcaaaacaactgcatatctcatattattatacatttaaggaaatacaaaatagaatacacagagaagcactgtggctataatgttccttatcaccccataaattttattatgacgaaaaaggaagtcaagcagcaacgttacaagataccaagctattacaacttgcgtcaaatcatattgccgttccaaagggtccatgaatactatatatatatcaatggacatcaacacaatggttataatccaaaccattgtgttttttatagttatattcattttcaatgatagataaatctgtccaatcaataatagactttcttgttttctctggaaagtaccaaataatcgtccacttttacatcaaaataagacttagctttaccgtcatcattggaaggcaactcctctttatcagtcagcgcctctattatatcgatttccttcacgttctttttcaatttggggaacaacaggctgacatatatgtatttacgattgcaacctttaataatcatcaacttatccataggtgcgccaccatcgtatcctctcaccatgtattcatcaccggttttcttatctactattttaaatcccgggctatagtacatccattgccagtcgaaatagatgggttgcaggaacgttactttagtatcatctttccttctttcaatagaatgcaataaaggctttgtacccatgccatgctcataggttctatcggcaacgatctctatgctatctttaggagctgtataagccgcatcaaataacttttgatcgcgtgtcttggcctgttcggcagcgtcatcccttaccaactctcttgatttctgaagcttcggcatcatttcctgcaccatttccattgacagctgttgtatcatcggcattgattcagttgcaacggcagttgcagtctccccaagttttcttcccgcaggagattcataaaaagcaaccacttttttcagttcatccaatgtcatgtgttgctggtaaataggagcatatacttccatgactttatcttcaatcttccgtgtccattttgaagcaaaatctttccaataagcctcatcttgttggaaaggcccatttttcatactcgccatcaattgagacattatagcttcagaggatgccgaactgccggaaagcgtcatgatcttttttagtaaagttttgtactcgtcggtctggtctgaattctgagccgaagccggtaaaatagaagtaagcgatgtggctacgcagatcaccattaagaaaaggatttttttcatcatataatagttttgttgatgaagtcaagttaacttcattgtgttatacattcttacaaatatactctaattattattagaatacaaacaaataacggacataattataaactgcggcaattattgtctgatttaccggaatttctttattgcattccccaagtaataaatagggtgtctgtattgaaatcagacttttttagattaaaacaataggacgattgttacaattcaatggataataccttttttttgcaatgataatagtttgaatatcaatcataaaccacaaaatcaagtgtaacattcccttttttcacacttaaaagattcgtacctttgcaaaaagagtatgaagtcctaaaaaagaacatgacatccatttaattttaaataaatatcacttatgaatcgattaagacatttaatgtcattatgtatttttatatcactaatggcatgcgaacaaaatgaagactgggttgtaaatgaaccgatgcaatcatttgaagaaaatccagagtacgctcctctcaatactattcctgattgggttagtgaaaaagtgacacctaaagaatacgaactatggagaaccatgagttcaaggtatgaaataaattattcctttttaaaaaaggatatttcagaaaaaaggaaaaaagaaatctatgattgcatcaacaacatctgtgaaagaatagaaaaagggcagattaataaatatgaaggattcctaaatatagcagatgaagatggcaccaccctatcagactcacaatattttggcagaatagcaacaagatcaccagaaggaggagctgaatataagacaaatggatgtacattgtatacacatagcttaggtccctatataaaagctgctgttacttacaaaaaatccgatgatgatgttacaattacgtcatcgagtgtttatacgggatcaccatatttaggaaatgacccgagtttttctggtgcttccagtgtttcttacgataaggataagaaattaatagccgcatcgtgtagcggaactttatcattcaaagatggatccagaaaggttgaggtaactgtacaaaagacaggattcatgatcccatgatcaatttgaatatacacaagattaatcttggtacagttagtactcttttgtgattttctattcagatcttgaaaaaagttatagaacaattaaaaataatagtcaccatgaacaacattctaagtaccaatcatacgtccatctataaattattattcgtcctattttttgcagggatttgtaatctgccatttaaatgcaatgctcaggaatactccaaattggacgaagtaccacagtgggtcaaagaaaaagttaatcatgaggaatataaattatgggaagtcatgagttctgtttttcaaattgactactcttttctcaaaaaagatatctctcaagaaagaaaaaaagaaatacttcacctcttgcaaaacactgtgtcaagaatccaaaatggttcatacaatatcgaaaaaggctctttattttgtgtagctgatgaatttaaaattgactccttgacaaattggaacaccgaaatcttagaatgcaggaaaaaaagcggtattatttattccagcagggacggctatgatgcgcattataaactaactgtgatttatggatatgacaaaatgaataaaaaagtatatccgataaaaaatgaattagagtgtattagttactctggaatagagattacatgcaacgacctgccaattgtaaaatataacgaagtcgaaggaaagctgcaaggaacctgctacggaaatcttttcttcaaagacgaaaaaggtgcgactcacagtgaagatttcaccaaatatttcgtcttagagccttgaaacagcaactaatataaataaatgaaaagcattccagtttcttctattctatattttctgttgagtttgggagtcttattcgtaaatgcaaacacatttacagattcccaaattttccctaaatggatttttatgttcgcaggattaggagtaattggatgtcttttttcattttatcttttcctgggaaaaaggtttgtttgcaatgcaaaatgttgttactacacggttattatatcttgttttcttcaagccggatacggtatattacaatttttcaatatactgtcttcacattccatcacctacaatgttgtcggtagctttgataatcctgccggttttgcaggaagtttatgcgcagggttaccatttaccttctattttttacaatattcaaacaaaaaggttcaatgggccagttggtgtgcattgtttgttattgtcttaggagtattgctatcagaatctcgcgccgggtcaattagtatatttaccgtattagtaatttactttattcaccaaaacaagaataagttccactataaaaaacatatcggtagcttcttactctgtctatcctttctgctgattagcatatttgtcatttctgtaacagtctatcatctaaaaaaagattcggcagatggtagattattaatatggcgttgcacatgggaaatgataaaacatgagccttttacaggatatggagtcggaggattcagcgcacactatatggattatcaagcccaatatttcaaggaacatccggatagtcaatttgcaattttagcagacaatattaagagtccttttaatgaatacctttctgtcggagtccagtttggtattctaacttgggtacttttgatagctgctggtattttcttgattctttgtcacaggaagcacccaaccaaagcaggatatgtgtctctgctctctttactttccattgcagttttttcttttttctcttatccattcacttatcccttcatttggattattagtgcattaagtgttagtactttaataggaaaagcctatgaaaataccttgtttcaaaaaacaacaattataaaaagaggaattgcttttttcttattaataggaagtttatttttgcttattgaagtggtgagcagaattaaagcagaactggaatggggaaaagtagcgcatatgtcgctctgtggacgaaccaatgacatgttaccacgataccataatttactacatacttttagaagaaatccttatttcttatataattactctgccgaactttgtgttgccgaaaaatataaagaatgcttagcaataacggctatttgctgtaattattggtcagattacaatttagaattagtacaagcagaggcatatattggcctaaaacaatatgatgcagccaaacatcatttagagaaagctaccttaatgtgtcctgtaaggtttatacctctttataggttacattatgtctacatgaaacagggaaaggcagaaaaggcaaataggctggctcaattaatcatagaaaaacctataaaaaagaattctacaatcattcaaaaaattaaggctgagatgaaacatcatttatcgagaaaaacatgtttgtactaaaagcatacacaacagtgcatttggaaggcgaaaacataaataagaatacgccttttatggtcgaagagattgccaaaactttaaaggcaaacaaataacggacataattataaactgcggcaattattgtctgatttaccgtttctcttcgtccaagcaaccctataatcgcttaattttcacttattgttatcagattttcgtagggacatcttcatcgttccacccgggtagaacgaactgtctacgtctgtgacacgatcagtttacctgggtgcaatgatcagttcacccgggtggaacgatgaagatgtcggtaagataatataagaatgtaagggagatatgctaaggacataagtgtcacaacatacaaatgataggcagagtaaaatcaatacagctgtagtctgtagcagaaagaatgatgagagacaacttaaaaaaggatgagagatacactgtttgggagcatattatgggataaaacgatgagagacaccctgctccgaaggtatctctcattcattattcatctagttatctgatctttacagaaagacagtgagaccgtgagactaaaatatttttttatttcttgggagcgagcagattattccttatctacagaaaatttaaagatacactgactcatgtatttttctcccgggcgaagcacagccgaaggccattccggtttgttcggagtatccggatacttctgagtttcaagacatacggaagcacgctgattatatgtgatacctttctttcctgtcagagaaccatccagaaagttgccggcatatacctgaacacccggttcgttggtatatacatccagtacgatacccgtttggggagattcgagtgaagcacatttacgggaaatatcccctttggcattcaatacccagttatggtcataaccatttccattcttcaattgtacaaaatcgtagtcgttaatgcgtgcccctaccggagtcggagtgcggaaatccatcggagtaccttctaccggaacaatctcgccggttgtcatgaatgtgctgtctaccggagtataataatcggcatccaccatcagcaagtggtctgcattgcttgctgcatcaccatcgagattaaaataagaatggttggtcatatttacgatggtcggcttatccgtttctgcttcatagcggatatcaattgcattatcgtctgtcagtttcatcaggactttacaggtaatgttacccgggaaaccttcttcgccatccgcagcgacataagtcagttccacttcttgcggattcggttgcacagcgtcaaacacacgatactggaatccattgggaccgccatgcaggcaatgaccgtaattattctgaggcaactgatattcaatgctgtccaatgtgaatcgaccttgattgatacggtttgcgtaacgaccgatgctggcaccaaaatcagaaggtttgctgatataatcctgaatagaatcgaaacctaaaactacatcctgcatcttaccgtctttatcggggaccatcacagaaacaatgcgtccaccgaaattcgtcacacaaacttccatgttgttcttgttacgaagggtgtacagatcggttttcttaccacctacttcagtctggaagttagttcttaacaggccggagtcggttggttgctcggctttcggggtacaagcagctacaaaaagggcagaaacagcccataatgctaaattcttcatggttgatataagtattattataaattagttcaacgaacatcttttatttagattgcaaaattggcgaaattctgatagtttggaggcaacattctttccaaataatagcacaaatcagtcatttcgccaatgatgcaatcataaacacttatatctttctaaatcaaaatgatttatcttataacaaattcaagtaaactgattccatcaccagttactcctttgtattcgggaaagccgatattctcaaccgggccgctcccatcggaatcaatgtaatctcttctttagcgcctttcaccgcatcttcttcgggcaatacaccgcaaagtccagtttcgtcaatctgccattcggggataatccggccggtagctttcacttccaaaggcacattggccaccgtgaacgggaagttatcagcaggccaggacttacgaacgactttgaagttcttcaaaggctctttcttatccaataccaacgaatagttccagggactgttagcatagatttcagtagtaggccacttcttcgggtcagcacctttctgccatttggagtcaccgatagccgtttcacgactgtctttttctatatatttctcgtcaatcttcagagataaagtcaacggaccataatccacacttacactgttcttattgacttgccacgtacgcatggacaaagacatcggaagagtcatttctactttatcaccatccgcccattcgcgttcgatacaaaggtatttaccggatacaggtttcacactgatcttctttccgttgacacgcacttcggctccttcagtccatgaaggaatgcggaggtagaacggaaaatcgaccttttcatcggtagaaacggtgaatttgatgccttcttcaaaaggatagttagtctcttcgtgaaggacgatttcttttccattacccacttttaccgtagctttacaagcagcatagatggcggcagcaataccgttgtcgggagttgccaatatcagatgttccgaaaaataaggccagccttgtgcatggttatgctgacagcaacggctgctgaacggattcatggaaaggaacggaccacggttgtcaatacccggatgatggttctttgagtcactgacagtatgattcggacaagtgatgtagcgcaaagccttgaagtccggcatcacagcggcaggataagagttgaaagctacttcttcgcaatgctcagcccacatcgggtcacctgtcatacagagcatgatctcatcggaagccatctgttccaccagtccgcaggtttccactccctgacgaggatcgatatatcccagacgggcattctcgtcggcaccgaacataccgcccggaacctggccaaaagtgcgacggatcaaatgatgtacattataagaggctttgagcatggcggaatctccggtctgcatataataagtggcaggttcgcggaaacactgggcgatgttcacattgtgccagttgggcagggaggttgattttgtccagtcggctgtgttgcggtgaatcttcttggcaaggtccagcaggaaggcatctccggtatggttataaagccaatagatactgatgatgttgtcaccgccacggctgttttcccaatagtcttccagaagtttatcgtcggggacagtcatctgccatttgaagtagttcgtcatcaggtcaataacccgttggtcctgagaatactcataataagattgcagacaccagagcataatcatctgtgcccacaactcacgcttgccgttccgttcgttgacaggaccgaagtatccatcgggctggcaactggcaaatacaccttcaatccatgtttttgtttctgcaatcattttcgggtcattcaggatataggcaaggttgccataacctttcagccagtaaggtacttcttcccagccatgatcaccaccggttgtcagccaggcgttattatctttctccagccaggcactgatttctcccagatgtccggtcagcccgtcacgttgcagttcgaggtacttctttacccagccttccggctggatgctgccgacaggcagcttaataaagttcaacggacggagcggggcccgatagctcacataattcacattcgtcgattctgtgtcggggcggtccatcacccttacagactcactggcagtgcgtgtagtaaaagctgctgtcagtaacccgacagtcagcagcgtacccgcaacacttattttaaaagatcgtttctgtttcattttgaatatttttttggagatactaccgactttttagtcagccttgttttaattcggtttatttataattataaatcaattctccgccttttatcagttcattgtgagatatacggtagtcagcaatctttttcccgttgaaatggatacttttgatcggtgcgtctttcttttttcgtccttctgtctgaatagtaagtacatttccattcgtcaaccgcaacagtaccctgtcgaaaagcggagaggtcagatcatagtattcatctcccacaagcagaggatataaacccattgccccgaacacgtaccaagcgctcatcgtaccgtcgtcttcgtccatttcgggactatacccttcgggggcattcttgaatgctttacccagataaggagtcttaaattccgagttgcctccatatttatggatcatcggttcggtcatcagactgcgtactatctgctgggttttctccggtgccccaagtcggttgaacaggtaaggaacatggatatccggttcgtttccctgattataaaggtgatggtcgaagaaataggtaagttgcaaacgaagagagtcctgccctacccattctatcattttatcaatgtattgtggagccgcccatcggtattgccaacgggttccctgatagagtccgttgttcttcatcacttcaaaagcgggagtcacattcataaattcctttttccatgtttcttcaaaaagagagaccgaacgttgccggtattgttcggaatccgccttttcaccgatgatttccgcaatctttgccattgcccacaagtcatatgccgattccatcttctggtcgggcgaacgcatgggcagccgctccatttcctgcttcataccagcgtatcctttacggaaatcaaggttggtaattcctttccggtaagcgtccagcaagagaattacggcatgttccgtacgtactgtcggggtagactcgaatccggtggaccagtctttctttcccgttgcatacagatgaatcagggaagtcgccatatcccgcatcttcgcaggttcggtcagtaccaacaaaggaaatttagtgcggaaggtatcccataacgaccagttactgtaatatcggaagtcttctgagatatacacttttccatccgtacccagataagctccgtccggagaactgacatccgccggactcaggtaagtacgatacagggaagtatagaaaatgaccctgtcatctttcttgcctcctttgacgtcgatagccgacagttgtttttcccactgatcagcggtccgggatttcacatcttcgaagtccatcttttcccaacgggcacattcccagctcgccagttcggaacttaacgcagacagtccgatacggacttccaccgaacgtacctttttgccaaaggtaaggcaggcagtcgtctctttctgttcttccaactggaaaggatggctggtatttaaggagaaatagagtttgtagcgtccatgtccgcagacgttctttgcctgtacatagccttcgatgcaagtttccgatatacgtttgtaatggcaggtagctacgtcttcaaacgtagaggcgaagtctatccaaagggcagcggaaaggcttcggggaaatttatagcgttccaccgccatagcgttggtcgctgtcaattcagttttgataccattggtaaaagctgtcgagtaatatccgggagttgctttctcgcgggactttttaatatgcaattcctgtgaaggagctaccggacgaatgcgcaggtttcctcctccgccactacatcccactccggagaggcggttgacagagataccggagactttcgtcactgcataatcataaccggcatggctacgcggatcattatccggacacacacaaaccattccgaaaggagcggcagcgcccggagctacctgtccgttatcaccggaagtaccgataaacaagttgacatactttgtattttgtgcaactgacggtgtcatgatagataacacgactaaaagaagggcataccatctgcttcggttgtttttcatgcttctaaaatagtatcatcctgtcactcttcgctacgctctgaatgacaggataggataaactaatgatataatatacttatctttaattcttgtttacagagaacttaaagatacactgactcatatatttctcgcccggacgaagtactgccgaaggccattccggtttgttcggagtatccggatacttctgagtttcgagacatacggaagcacgctggttgtaagtgatacctttctttccggtcaacgaaccatccaggaagtttcctgcatatacctgaatacccggttcgttagtatatacatcgagtacgataccagtcagcggtgattcgagagtagcacacttacgggtaatgtcgcccttagtattcaatacccagttatgatcgtaaccgttaccattcttcaactgtacgaaatcgtagtcattgatacgtgcgcctaccggagtcggagtgcggaagtccatcggagttccttcaaccggagcgatctcgcctgtagtcatgaaggtactgtctaccggagtataatagtcagcatcaattgtcagcagatgcgcctcattacgggctgcgtctccgtcaagattgaagtaagagtggttagtcatattcacaatggtcggcttgtcggtttccgcttcgtaacggatatcgatcgcattatcgtctgtcagcttcatcaacactttacaagtgatatttcccgggaaaccttcttcgccatcttctgccgtgtaagtcaattccagttcttgcggattcggctgaacggcatcaaacacacggtactggaatccttgcggaccgccatgcaggcagtgaccgtaattattctgaggcaactgatactcagtaccgtccaaagtaaatcgaccttggttgatacggttagcataacggccgatgcttgctccaaagtccgaaggcttgctgacataatcctgaatcgaatcgaagccgagcactacatcacgcatttgtccgtccttgtcgggtaccatcactgaaacaatacgaccaccgaagttcgttacacaaacttccatgttgttcttgttgcgcaaggtatacaaatctgttttctttccatccacttccatctggaagttactttgcaataaaccggaatccgttgttttctcggctttcggtgtacaagctgccattaagagggcggcaactgcccatacacataactttttcatggtattctattaattgatactattcaataaatctactttgccttcgttgaccaacttaagaatcagttctccgaaaagcgtattctgccaggcaaaccaggcacgggtgaagttcttcggatcgtctttgtggaaagattcgtgcataaagcctgttccggcatcggtatccatcagcattttgatacaggttttgatttccgcatcatccttgctggtgaaggctttcatcatgatactcatcggccacaccatatcataaccgatatgcggtccgccgataccttcgcctgccttgcctttgaagaagtaaggattgtcttcgctccacacgaatttacgggtattctgatagataggatcgtttacatctacatcacccagataaggcatggcaagcaggctcggtacattggcatcatccatcaggaagtgatttccgaagccgtctacctcaaaagcatagattttaccatatttcgggtggttgtataccgcatatttcttcaatgctgtctctacttcctttgccaggtctttgcattccttagccaaagcagtcttcttatttaccttatcaagtatttcggctgctttgcgcaatgaagatacggcaaagaaattggaaggtaccagatattgaagagtcgtcgcatcatccgaaggacggaagcaggagacgatcagaccaaccggtttcactggtgctccgagtccgtcattattcaatgtatccaatgcacgttctgtcttacgctggaatttatacgggccaactccgtctttgcgctgttgttccttgaatgttttcagcacattggtgatagcctgaatccattcttctgagaaaatgctggcatctccggttgttttccagtagtgataagccagacgcagcgggtagcaaagtgaatcgatttcccatttacgctcgtgcagttccggcttcatatcggtcaggtcactcatccagtgattgtcttcaacggcaccgtcattaaatgcgtttgcatacggatcgatattgatacatttgaactggcggaggataacacctgccagcatctctttcagttcgggatcggagtttgccaactgcacatacggccatacctgcgcacccgaatcacgaagccacattgcgtgaatgtcgcccgtataaacgaatgtgtccggtttgccatccgcgcctttgcggaagtgtacggtagtgtcgatggtattggggaaacagtttgcgaacatccatgccagtttctcgtttttcagaagtttctgcacacggatgatttccttttctaccgcattcgaacggaaaagacgtttggaaacttccggacgattgtctttctgaatagcgtccgtcacacatacatgcattccggacatcgtatttgcagcctgcatctgaccgccacaaaggagcatgcctgccagcatacccgcactgatatattttacttgcttcttcataaattactttttctttttaaattcgttggagaaagaataagggaaatcggtttctttggtaccacgctgctcattgggtttggaatccatcttgaaagtgatggaagcaccgttcataaggtcctcgtgagtcacgtagttctttgtatggtctttgccgttcaaggtcatggaagagatataacgtttgtcgtctccgttatttggagcggagatggttactgtctttccattttcaagatgcagcttcatctgtttgaagtaaggagtaccgagaatatactcatccgtacccggacataccggatagaagcccatagcagagaacacataccacgcagaagtctggccgttgtcctcatcaccacaataaccgtcgggagcaggagtataaagcttatccatcacttcacgaatccagtgctgcgctttccacggctgaccggagtagttgtacatatacagcatatgctggataggctggttaccgtgtgcatagttacccatattcataatctgcatctcacggatttcgtggatgacaccgccataatagctgtcgtcaaagacaggaggcaggataaatacagagtccatcatctggttgaagccgtcttttccgcccatcaggtcgatcaatccctgaggatcatggaatacggaccaggtataatgccagctgtttccttcggtgaaagcgtctccccacttcaacgggttgaacggagactggaatttgccatcctcattcttgccgcgcatcagtttatgttcgggatcatacagattcttatagttcatggctctctttgcaaagatctcaatttcctttttaggcttgttcaaggccttacccagctgatagatacaccagtcattataagcatactccagtgtgcgggctgcattttcattgatgcctacgttgtaaggaacataaccgagcttattgtagtagtcatagcccagacgtccggtagaagaaacctgcggatgtaccgcattagctccgtgctttacagcttcccaaagggtttcgatatcatatcctttcagacctttcaggtaagcatcggcaactactgaagccgaattgttgccaaccatacagcctctgtgtcccgggcttgcccattccggcaggaagccgctttctttgtaggtatttaccaatccttcctgcatcttcatgttcatagacggatacatcaggttcaggaaagggaaaagacaacggaacgtatcccaaaaaccggtatcggtaaacatatagccgggaagtacttcaccattataaggactgtagtgaacgatatctcctttcgcgtctatttcgtagaagcttctggggaaaagtaccgaacgatacaggcaggagtagaaagtacgcaaatggtcgatatcatcatcttccacttcgatgcgtcccaaaacgtcgttccataccttacggccttttgccgcaatctggtctatgttatctttgcccaactctttcaagttcagttccgcctgttcggggctgatgaaagaagaagctacacgtacatttacctgttcgcctttacgggttttaaagccgatcaatgcgccggcatgcttatcgttggcttccagtttattggtatcgatgttaccattggcaacagctgccgtataagtaaaaggcttgtcaaactccagtacgaagtaattcttgaagtttgcaggaacaccgccgctgttcttggtcgtataaccgataatcttgttttccgaagggatgactttcacaaacgaaccgttgtcgaaagcatctacaactacataagagtgatcgttctcagggaaagtgaagcggaatgctgccgctctttctgtcggagcaatctcggttactacatcatggtcggcaaggtatactttgtaatagtaaggagtagccgtttctgctttatgcgagaaccagctggcacgctgatcctgatcgaaaacggctttaccggtaatcggcatgatggagaactgaccgtaatcattgatccaggggctgggctggtgggtttgtttaaaacctctgattttatcggcatcataggtatatgcccagccatcccccatttttccggtctggggaacccaaaagttcattccccagggaagggcgatagcgggataagtgtttccggtagataaggcgtgcttggactgagtacctaccagcggactaacatagtccactggtccggtaatcgttttagcatccatattccacgcactaaataaagtaaaagctaatagagcgagttttttcatggtgttcttgttttatttagttagtttttcttcaagcatctttataaaatagccgccaactacggaacgcgcctggaaacctctctgaatcggattgtccgtaaatacccagtcggacatcggaacgcgggtagtcgtttcatccataaacagatataccggttcaataaacttctcgaaagtagctttgtcctgtgccatggtagctgtccacatgatccagtcagtcttggtataagtttcacggttatccagcggaaggccgtatttattttgcttcgtaagataataagcaatttctgtctcagcaactttttccgggaaaatctgcagtttcagcaatttgtcccataccagattatacttctggctccaggttcccggcttgtcgaatgtcagacggtagtggtcgccgtcatccgccatcttcacccattcggcagccatttctttcgccttcttcgtgtacttttcagcaatgtcttttttgcccagcatatctgccatgtagccgtaagaagcaatacccatgatagccttgatagaaagattggcattgtgcgcaaagtgtccggcaaagtcatccgtacaaagttggttctccggatcaagaccgtactctaccagataatccgtccaggttgtcagagtttcccaatgcttttgtgcgtagtcggcatttccttctacagcagcaatcgctgcagcaaggactaccatattgccagattcttcgattggcatatcacctccgtaagtctggccgttagccagcggatatgtacctacgtcgtgagcagcaaacggtttggtccattttccgctttcactataatagaagatatggttcatggtagctttgaccagttccggattgtaaagtagaagcaacggagctcccggataagtcagatcgactgttccgatggaaccattactgaaattctctttggaaaggaataccaggtcaccattcggagcttgtaccagtttatgggcagctaatgcctgacgataagccagagcgcaaagttcggcatacttgcgtccgccggccgcttcagcctccgccatcagtttcttatcgaaagctgcacaattctgcatttgagtcttatattcctgttctgctttctggaattgtgatacgattgtttcactgcctgtacgattccagtaaggacggaggttttcaccaaagtactggatagagtaaatatcatcgtaaccgatcagcaggtgtccgttcgctttctttgtttcacccagtgagcgtactaaagctagtttgtcataaccattggtggtaggagcttccagtttgttctctgtaaagctttggcgaagtttctttccgtcaccgatagcataagtgctgttctctttttcagcagccaggtagaagtgtccccagtcaatacgtacatcgtcacctttctttttcaggatgtcctgattacggcttccggtgcgcaggaacaacagatcaccgtcagtaaagctgtcggctacggattcctgatgaggcagatcgagtgcccattgaggagcagcttcaaaatagagttcaacttggtgcgcctgtccgtcgttagaaatgacttcataagaaatatagttgacagggcgtgccatcaagtccagattgtccataaacaggggcgcggtaaatgtcaaattcaagtctaccggaccacaagtgaagttataataagtctgcataggttgaacatcggcagaagtctgctgtgcagtctgattgaagtaacggttattatccaattctaccagcaaaccaaaatccagcaagccattcgctccacgattgtgacaataagcggcaatcaggttttctccctttttcagggacgctaccacttcttccgataacttcacctgtacgtgcttcttacaagcgtttccagtgtctacaacctttattccgttgatatagataatcacatcatcatcatgagaatattccagatatacattcttacctgtcaggtcttcctgaatatcagcaacacggcgtacccagataaattcttcaccccactgggtcttggctacatgttcgttctccatggttccgaaggcaccttcaccttctttccaggcagcatcattgaagccgacattttgccatccgtcggcaggttgctgaattgtatattttcctgtccagttaccttgttccgaagttttcaccagaggtctcaactccagttcctccgttcccataaagcggtaagtctgtccgtcgactttagctacaccgattaaagggaaatctttaccgctccaatgtttgaccgaaccgtcgtataagttgtccgtgaaagaccatgcactggtatacgggtctatgctcaccagcggataagccggagcacgcaactcgctcttcacatgctgttccatctgggtctcacagctacaaaatacagaggctgctcccagcaacagcgtcatcagttgttgtttcataatttaattacctgttttatttaatctatttaccattctattgatacattcacaccggcaggatcgttctcgaaactcaacagaagagtttttgatgattcgtcccattccggttgttcctcttttccattcacacgtattttctctggtttacgaggcaagaggactcttgatacattcgttgtattgatcgggcttttggctacaaaagagtaactttgtttactgactttctcatcatagatacgagaagctccgcagagcactttggcttttattttaccggatactttattcagatcataaagatacccctgttcacccggttggatttgtttggaagtcagtaccggcaggtctttgtcgaacaggtcgatatataatccggataacgtcagtggctctttggaaacgctttcgtccatgacagcagcaatggtatatggaccacgttctacaatgaagctgttcttggtttctatctctatcccttgctttttctgataagcggatgcgatcgtttcaaaatatttctgatcgtttccggctttcaaaacaaaatgtttggggtcttcacgcatcacaatcaccgttcctttaccatagcggtaagttccttcacccggattacgagatagattcatcttctcgaacaggtgttccgaaggcgctttatattcatttccatctgtattccaccattccagtaccgtttgataagggtcgatatcttctccacaatagataagtattccgcccttcttcacccaatcagccaaatagttgtgatattccggtttcatgtttgaataagacatgacaagtatgtggagtcctttgaatgtttctttgaaaggggtattttccatgtgtaccagctctaccggaataccacgcttcaacagaggcaaagtttgtccgtagaaactggaaaattgcggatcatcgtaaccgttatgattcggaaaacgttgaaacatcagtgagtttgccatcagtacaccgatgccctgtgtacctgtaatctttttatcggaagtacggatatcattcagtgtattaaccattgtctgcatctgggtggaataagagcggggaatgcgttctttctgatccgttcccgctatccggtacagtccctgatagatacggtccggccagggcattacttcgtaggtatctaccataggatacatcaactgtgctgcaaaagtggcctgataattgattttatagtccagccagtctttcgcacggtcttcgatcgggtctgtcaggaaatacattttccggttcagcggtgcagtcatcgacttcatacacccgtattccagaaacgcattctcgaatacacgttctttctgcacgccgttatagaaattcggttcgcgggcagtccctgtccatacctgggcaatgtagccgtctacacaatccaatgaagccaggctggcttccggacttacaatctgccaggaagtataattaatcaaagaatgcgtcggcacataacatttgatatccagtcctttcgattttccgtattctttggcataagtgaatatcttatccagcgcattatagtacagatgatatttcagtttgttggaaaggtatgtgttttcgggagattcgtgctgagctctccaggggaaattataatatttctgccattcggatttaaaagcttcgctatatccgccacgcatccaaaactccggttcttccagatatatggatgttatcccggcgtcaatcacccgtttgatctgtgtttcctgcatatagcggataaaactttcggtaggtacgatataagggatcagatgaccatgagctatttcatttccattacggtcgcgctgtccttctttcagatgcccgtctactccatcccatttccccagaaagtagtccttgtagtctccccaggcaactccggtcataaattccgtcagataacctttgtctctccatgactgaatgcgttgttcaaaagttactccgggcttatccagtgtaccatataccatcgtggcatcagcacgtacgtctgtttcgggtttccagggttcagaagtctgaaacgtggtctttgcttctttgctttttcctttttgcgcataagtagcatgattgcaggcaagaagcaagccgagagcaatcagtaaatgtttattgttcatgatattcaggtgtattttcatttttatatctggtcgttgccccgtttctcttcggattatttttctgccggaaacagaagcatcaatgccggtataccggaagccgagtagctgtctatctcagcaccggccggtaatgctttctcatattctccgccacatacattacgtgtcttatccctgtttgcccaaccggactcgatattacgtttcaggaacgggatatattgtgtttgtccgcaatcgtataccagcatagctatgtattctgcaaaaatagccgtatagataccttgctcgattcctctttcaaagggcagcaggttatgcttcgcagacatttcattgactgtatagtctgctgcaaggattgcattatccaggtagcgtttttctttagtcgctttgtaaagcaatacggaagcaccgataaaggtagcttgattatatacatgcgctttccaggcaggattaccgttgccatgacgactatcagctatccggcccgtcttcttgtccaacaggttttctactccccattcataaatctctttgcctttagccaaatactgttctcttgtctgatacttgggtgattcttcggttgattcttttctcttcttcggaacattattgtacagtgtaagtgctgctaccacggtagggaaattgatacaagccatctttccgtcccccggtctgttcggcttgggattatggatcggctgccattgccagaacatccctccgttctctttgtcatatgatcctgtatcgcctacttttttagaaccgtaccatacacggctgaagctctcttcagacagtttcagatattcatccacaccaaacagttcgtatgcacgtgccaaagagatcgtccaccacatgatatcatcatagataaaccatccggtattttcattattattatcgaaatcaaagtgacaatattgggctttatttccagcgaatatcttttcgcagagctctttgtaataggctcttttctttttatctttctgagccttcgccagtttataggcgttcattgacatatcccagtaaataggctgacaccagatagcagctgcgccatgaccacggtctaccgcctgttcataggccgaagtcgttttatagatatatttatccgggtcgagcagcgtattattaaatccttcgtatgccgcccacacgtcttcattggtgtaagaccctgtcttctggttcgttttttctgagctatcagccgcccatacagtagtagttgatatcgccagcagtaaagctaccgccaaaagaattttgcttttcatgatagttgataagttttaatatttttcctgttacaaagattgcagaaatagacgaaaaagaacgaaaatctctattcaataaagaacaaatacagaccaaaacacccttttgttatttgcaaacgcagataatgacttaaaaaatccccttgccttgcactatgcaaagcaaggggaagcaccgatataatctaatacactattgaaaaatctgtattaatcactgtgcgatagttgtactttccacccattgatatgttccttccggacctttcagagtagcgacatgacgacctgtaatatcagtgattgtcgttccggtaggttgtgctcccaagacttcaaagtcccaggctgcaaccagattcggatcattcggatctacgtcaacctgccccatagcagataagcgaagatcatcgcgacttctgatacctttccatatacgcatatatttgatataaccggagaagtattcttcacgagtcgttttatctgtattcaaacggcagaaggcagtcataggcattttctcttcaatacaaccattgttaatataagttctccaagcctcacctacacgaatcacctcgccggattgcgaaccattcacaaatacacaggatttagtatgttcctgaggtggatcaaatcccggaacaccattatccgctacagcaaaagcaaagtgtgtccatttatctttgggattgtttacgatggctctcggctcccaccattccggatcttttggaccttcattctgccaatgtgccatagaacctctcagccagtgttcattgccaccattcactttacgatactgaacacgccagccgcttcggggagaattaacaaatgcagcaaggaaggtactattgtcttcccctgacttagaacagaattctttgatatttatccaaagctcaatcgtaaaattctgattattatcatcaccaaatttcacaaaatcctcgctatatccaaagtcgatgtaaccacccttattaccatccacaaataaattccagacaagattatcttccggccatgcggaattttccacttcttgcagtttcttatcagcagccgcaatggcatcatcatatatctcctgcgtcatatctgtgatggcactggttttgattctgtctgccaaactctccaaatcttccgctgcactttccagtgtagccttaccttctaccggatattgtccctgatgatttccccacaatgcttcattagctatcatttctcttaactcatctgcttttgccatcagatcactaatgaacttctgggcttccggagaaaggttatagtatttagagtttttgaactcatctattgcctgatttaccttagctattgtagcctcaaaggtcgcctcatcaaacatctcaccgccctttaccttggtaatcaactggtccagttccgctattgcattattcagtatctccttgctggcttccggaaaagttcccggcgctgttccaaaggtagagtttttcaacaaatatgataaagaagtccgattgtcctctaatatgctaagttgcgtatcagatatatattcattatctttatcatccgaacaagctgtaaaagtccatgtgaggcaaagcgccatcagaagggaaaagagcatactctctccccatttattaattaattgtttcatgtctttcattatttctctctttattattctagaatacgttcccacttataggtacctataattttcgctgtatgacgaccagtcaagtcaataatctcgttatctgttcccgatggtttagatgtaaagtcccatccggctgccaaatccgtttcttttccggttacttctgctgttccttcataagactgctttacataatctgccccttttgccgttttccagatacggattttcttcatatatccggagaatccttcttcatacaaatcatcgctcactctcatgtaacgaccaaatgcagtcatcggttttgagtaatctgaataatgtcctgactgataaactctcgttgtaggagaaactgtttcttctttcttcaactcaccatttaagtataattttgcacgtaatgtagaattgccgtccaaaccttcatcactatatactgctacaaaatgctgccatttattcaaatcatcagaaatctggaatttcggttcccaaagatccctgtcaccattggtcgtattcaatccaccccaagtagtacggtaaacaccattatcatctttacgccagtacatcatccagccattacgccagctactgtctgacatgtatgagcacaggaacaggcaattatcccatctgccgcgctccgtaacctttacccacaactctacggtaaatgattgatgaccttgttctccaaacttaacatattcttcactacgtccgaaatcaatatatgaattgccgcctttaccatcaacaaacagttctgcaggtgttgtttcagcatcttccgtacgaatagtacccttaaacttatcaattgcagattttgcactggcaacgtaacgctgcttttcctgctccgacggaacaggattctgatatttgatcaacagaactgaacgattggcatcatcgatagcatctgtcaggatggcacgactctctgtaggatattgccctttcttttctccatattccgagttcttctgcaaatccttcatcttattaatcagttcttccagctggtcaatatagatatcttcgacctccggtgctgcagtatatgactcgtgagtctcttccgtacaagctattagctgaagagtcattatcatacaaagcagatagtaccatactttcttaatagaatattttgtattcattattcttttcatttataggttatacttatttatcggttggaaacaataacatcagagcagggatacccgaggccgaataactttcaacagcatcaccttctacctgtagcttggtatagtcgcctccgcatatatcacgcgttttgtctctgttagcccagccgtaattaatgttgcgtttcacaaaaggtatatattgcgtctgatcacaatcatataccagcattgcgatatattgtgcaaagaccgcagtataaataccttgctcagcacctgtctcaaaaggcaagaggtcgaatgttcccgaaatcgtattcatcgtataatccgcagccattactgcattatccagatactgtttttcaccagtcgctttataaagcagcaccgaagcgccaatatatgaagcctgattgtatacatgatctttccatgcaggattaccattaccatgtctgctgtccgctacctgtccggtagtaacatcaacgaggttctccactgcccaggcataaatttctttacctttagccaaatactgttccttcgtttgatagctcggatgggagtctgtcgattctgtccttccggtcggtacgttgttgtataatgtcagagctgccaccacagtcggaaagttgatacaggccatcttaccgtggtcagcttcgttaggattcggattcttgataggttgccattgccagaacataccacctcccagccctttttcagggtctgcataagaaccggtatcacctaccttctctgagccataccatacacggccaaagctttcttcagaaaggctcagatattcctcaactccgaatagctcataggcacgtgccaatgtaactgtccaccacataatgtcatcataaataaaccagccggtattctcgttattatcatcaaaatcaaaattcgcataatgagctttattgccggcaaacagatcatcacaaagctgtttaaatttttgttctttctgagtatcaccctcagcctttgcacgcttataagcattcattgccatatcccagtaagtcggctgacaccaaattgcggcagcaccattccaacggtctacagctgccttgtcagcagtgctacttttatatataaacttattctgatctaacagatgttcattaaatgcctcataagctttccatgtatctgcgtttgtatattcaggcacaatctcgtaatccggagtataaggtctagcttctttatcatcattacaagacgacaaacaaaacgcacctgagactaagcataatgcagaaaatatatattgtttcatcatatattgcgatttattaatcaattaattaaaagccttcattttgaaccagatttttatcaatatcaatttcactctgcggaatcggaaagaagtattgacgatcaaaattacgggaagtgatttctgtacgtttgtagaactcatttccatcatagttcacgttcataccatgcactggtttgttaaagaactcattcgtcagtccccaacgacgcacatcaaaatagcgacagttctcaaagcttaactcaatgcgcttctctttctggatcagtttcatgatttcactggtagtggttgctttcggcaaactggcagtaccatatcccggaatacctgcacgttcacggatcagattcatgtatttccaaatatctgcatgacttggatctacatatgctaatgcttcgatataatcaaagtaaatattcgtcaagcggagcaacacacaaaccaagttttgattacggtcacccgaatccatattcttacgtaccagatagcctgtactggtaaagtcattgttaccctgagccttaccacagtttccactataagtgaagtcaactgtataatcgccttctgtacctgagaaccatttagaattactgaaagtgatatcagcatagaaacgcggttcgcggttaacatacatattgcgtgttccagccggtgcataaagagtaccatctgccgatttatagtctgatgaagaagtgccgtcctctttatagcccgaagcctcattgataatcggagtgacaccatcagctgcatagcctgtaacaggtgacataccattggccataaaataggcatcaaccatctcttgtgtagctcccaacaagctgccacctctgtaatcatttgtattacctgacttattgggcatacgatcatactgcatagtacctgccgcattatccatacgataaaaaatcatttctttgttattacccatttctgagaataacgttctgatagcacggcgataagactcataaggattgaatccctcagcatcagggcctgctaccgattttcctgatttatctgtatacatcaattggaaacgattgccataatcagcgaagaatttttgacattcagtaactaccttctgccagtcagccttgatagtggctgcatccggttgactggggaataatctcgtcccatccggatttgccatatcggcataataagtgcactctccattaaacaaccagctggcacgataagtcaatgcttcaattataaatgcctgggctatagccttgtctatacgtcccacacctgttgttttatctgacgaagcatcttccagcagaccagcattctgtgcttctttcaattcggacacaataaaatcaaaacatctgtctacagtgctacgagacaattgcaattcattactgggagtatccaaagcataatcgtcttccaaaacaggcacaggaccatatgtacgaaccagatagaagtaataaatagcacgcagagctttagcttcagctttccattgtgctctttccgatgccgtaagcggagcctgatctacatatttggtaaatacagcagattcatgaatacccgaataccagcttttccaacgatacaataccattgtgttttcggttgcatcaatagagttattattgatcagtttggctttattgcctgatgaagtccattcggtttcatcactcgctccggtccatggtcccggtgtacgatacaagctggtttcatgtacctggcgctgattaaactcatccggcaagaaggtataaacattcgaaagatatttcaatgctccatctctggtcttaaaaatttcttccaaagataatcggtcatcgggcacttgatcaaaataatctgaacaggaagtaagtgttgtcacaaaaaagagtgataacatacccaatagtatatagttatattttttcattgttattggtttttagaatgtgaaattaacgcctacagaataagaggttgtattcggataagaagcaccgttatctgtattcaactccggatcccataatttgaatttgctaagagtaaacaagtttgttcccatcacatagactgccgcatttttcaaacgtactttattcacccagtctttcggtaagttataggagatctgcattgtttttaagcgcaggaaactaaaatcacgaacccaccatgtactcggctggaaattgttaatattactggaagtttcagctccataggacaaacgcgggtaaaaagcattctgattcgggttatcttcagtccagcggtcatcaatattgctatacagattaccggaaccgccaccgccgttaaacggttgaatactgctaccgctcattatacgttctgcatcatgagtaccctgaaacatcatacctaatgaaaggttcttccaacccagcgtgaagccaaaaccgtataccatagtaggtacatcaccacggcagatataagttttatcataagcgtcaatctgaccatcattattaaggtctttatacttgatatcacccgcttttaccgtaccaaactgagaagcaaacggcttcggagtagtagctttatttgcctgggacaaagactcccaacgtgccatatcatcaatttcagcctgtgtaaacaaaccttctgcgatatatcctttttttcctagaatattctgtccatattgattcatccaatcatagcgttgttccggtaattcaccttcaatccatttatccttattataggtaatattaccgcgaatagcaagcgtccagtctttattaaatcttttattgtattctactgtagcatcgaaacctttattttcaacaataccaatatttccataaggagcagatgtattatatcctaagaatgacggaatagagttttcacgttttaacaagatattttcacggcgctctttgaagatatcgaagattattgaaagatcatcattaaacagtttcaagtcaatacctaagtcttgtttgcgtgcttcttcccaaatcaagtccacagccatattcaatgtttcatatcctgaatatttcgtcccgttaggtcccagtttataaccatagtctccattttctttcatctgattcaaatacatgaaacgacggtcggaaacatcactattaccgactttaccgtccgtatagcggatcttcaggaatgatactacctttgacagcggttcccagaacttttcatttgaaatcacccaaccaacaccatacgcagggaaagtaccataacgatttttaggagagaagttctccgcaccattataaccaatattgaactctgcaaaatagcggtctttccatgaataagtagcacgtccggcaatacccatcatacgataagggatggcatcttccagtgttcctttgggataaagaagtttctgttgctgattaaagaggaataatccgcttacacgatgatcgccaaatgcgcggtcgtaatttaaagaagcttccagatatgttttcttattaccactcgtttcctgcttataactcaagacattggtgcccgtatagattctttgcagaatcggctgtccgtccaagtcataaggaacattcgtatccaagaaataataagtagactctgcacgatcctgatgaacatgtatttcattatatacatcgaatgcgtacatagctgtcaatttcaatcccttagtaagcatatccaggtcttgcgtaatgcgtaaattagaataaatctgattcttggtcagattatcatatccacgacgtgtagcttgtgaataagggttgttgaagttgttattggtggaacgccccggaatatatgcctcaccgttaataaagaacattttcggatattctaccggagaaatggacatagcagcattatacaagtctttggaagatatggccggataattaccttcacccagataaccctgagcaccaatttccactttagttgtcggagtcacatcgatactcagattggtagtaaagttatagcggctatacttcatctttgaatcaaaggtattgatgctcttatctgtcactgtcataccagtctcattgaagtagctgaccgaagcgtagtatgaaactttctcactaccaccacgtacattcacgttaacacgacgattgtgtccccaatcattaaatatctcattcagccagtccacattcggatacagatactggtctttacctaagattgtattctggatttgtgaatctgtaaatttagttgccagtccatcatttcttaacgcttcattagccgccttcatataagagacaccatctgtcaaatccaccattttagtgaaacgggtaaatgattcataataatcagcactaattgtcggtttacctattttacccggctttgttttgattatgattacaccattcgcaccacgtacaccataaacagcagttgctgatgcatctttcaaagtagtcaatgattcgatatcttcaggatcaatatcgttgaatgcacgttctactccgtccaccaaaatcaagggagtagccgtattgggagtagcaataccacgaatccagatatctgctgcatcttttccaggctcacctgtacgttgtacagcaactacaccagccagacgaccggccaaggtggtagtcaaactagccgaaggagtttttatatcttccagcttcatactggattgtgcaccgatattactgattttacgttgtgtaccgtaaccgacaatcacagtttcttccagttcgtttacctgttcttccagtacaacatcatagatatttgtagatgagtttattcttacctccgaaggtttaaatccgatataagtaaacttaagaacagcattcttcttgctgacacgcaattcaaataacccatccatattggttattgaaccattggtatctccatccacagtaacattcacaccaataagtggctctcctttggtgtccgttacacgacctgtgatttttcgagcattctgttgttgcgcggcagaaacggcagctgactttcctgagataaaaacttgtctgtcagagattctataagtacaggacgtaccttcaaagagttcagtaaggatttcgtctatcttcttgtctttgctatcaatggataccttacgatccagatttattgcatcatccaaatagaaaaagacaaactggctggttttctctattgtttgaaagacttctctcaacgtcttattgttcacgttcaccgagagagttttgagctgggaataattattgttattagcgaaagaataacttactcccaaaagtaagaagcaaagaaatagcttgagtattttgctctttcttcccttaattgaatttttcatattaacaatgtccaaatttctcataatattattattttataacttaatacttacaggcatatgagccccatctggataatacagcagtattatccactctttataaaaatcgccataaattcttgagatttattttattaattactatatttttctgtgtctattttttcacgacccgataagttttatactgtccatcataggcataagatattggtgctacaaaggttaatccattaattactgtctcaaagttgtctttcaaatcaatttttccggaacattttatcttacttagcgctgagtcaaattcgacatttattccatagtaagtggacagacgtttcaatacaattcccaaatcggcactattgaaacaatagagaccatttacccatgaaatcatttgttccacatctacctgtgaaatattttccttcccttctacagaactgaacatctggttaggagctaaaatagcttttggggtttgcgtcgtctcaacctgcacacccttgagccagcaccacactgcgaattggctcagattcataagctgtcacattgaatttagtacccagcaccctaacgttcatatctttagtacgtacataaaaaggacgttcttcatctctagctacttcaatatagatttctccgtcaacatagatttcgcgtttatccttttcaaattctgtaggataaatgactctggtacctgcattcacccatactttagaaccatcagaaaatgtcagtacagaacgctttccacgtgggataaccaactgattataaaccgccagttcttttttggatatattttcttcgttagctttaattgctacagaatcataggtaattgtagtctctttttctttcagacttacgactttatcttctgccagaatcaacaatgtttcctctgtagccggtaattcggtcttagtctgaactgcaaatgtcgcaatatcaggagccaaaaccgcctgataattctttaataaaaagaaactaccaaccaaaatagctacactggctgcggcagtcaaccctatcagaaaaaagtttttatgtttaatcttatcatttttaatatttgttgtctggatatcagcccacaactctcccagttcctgatccgaaagcaaatcaccttctgaagtagaaatcgtttctatatattctcttgccgcaaaataatcatctatattagaaggagtagatttctcaaaacgatcccaaaactcttgtatctcttctgttggatatttaacagaagaaataaaaaaatcattttgaaggaattcttcaaaagtatatctagaaaaatcagtatgtttcagttctgaattaatcatttttattgtctttacattaggataacagttctactttgattttatactcacttttctcaaactattttcgatatttttttgatgggcaggaaaaagctgaatattcttctctcctattctcgcttgaatagattccgtacacgccccaaagcccgctggatagagttagatacagactgataattcatgtccgtgattttactaatttcatcaatactcatatccttaatataccgataataaacaatttcacgttgcctggtggttaaggaggacatcatagcatgcaccttcatatgagtattcttctcttgttccttatttatataaatagtttccggagtagaaaaatgctcttcggactggtcttctttctcatcagcttcgtccaatgaaaaagaatcagatgttttctttaacgcattaaagagtgtatttttcagtgccaccatcaaataagctataatgttatcagtaggggttaatttggcacggttggtgtaaatcttcacaaacacatcatgaatacaatctttgaccaactccctgtccgaagtatacagtaaaccatatcggaacagctcttgtacagtctgattatatatttgagaatacgcactcgaatctccttcgagaaacctcttccataaaagagaatcagagagagtgtgtatatctgaggccatctataacaagtttatgagtttacaaggacaaaaataaaacaataaatcaaaaaaaagcccacctttatagaaaaagttaattgcaaagagaaaagccatcatttcctatagataaatagttttctctttgcaatttccccaatactttttctattctggataaagtgtctggataaaatttatttgtttaaacttcaactacattttatatgctcatttttcattgtaaagaaatgaatagccatatgaaaaaacttatctgaagtccggagcagcagtctccaaggaaggtacagcgcctttcacaaacggccagccacctttccactgcacacgatccatcatcaatacacggccctccggattagcaacactgaccgcatgatagaacatccaatcgtttcctttcttatctgtcaccagttcagaattatgccccggaccgacaaatgccttattcttctgaatcaatatctcatgatgattatctgacattgaacgccctttcttgtcaacataagggccgaacagattcttcgaacgccccacaactgtagtatatgtgctcttcaaaccttcacagcagcggccgatggaagcaaacaaataataataaccatcccgtttatgaatatacgtaccttcataagcagtaccggctatttgctctattggagcacctttcttcaaagagagaccatcatctgtcagttccgtaccatatattccgtggaagctcccccaaaaaaggtatttctttccattatcttcaatataaaaaggatcaatgcaattctgtatattgatttcattgctccggaataacttacccaaatcagtaaatggtccttccggcttatcagcagtagcaataccaataccacatgtccactcacctccccaagtggacatagaataatacattacgtatttatcaccgattttattaatatccggtgcccatattctccctttaggttcgaagtttggacgggtagcatctgtaaaagcagtacctacataataccagtttaccaagtctcttgatcgatgaataggtacatttttaatactttcagttgcgtatagatagtaatattcatcgtctccttttataatagtaggatcgggcaaactaaagtttattacaggattagcatatgttttagcgcgaacaggggttgccaaagggctagctcctactccttcaaaagtcatacggacaggctctatttttccgtctttattaaaatacatacggtctatacaagttgcacggctgttcgctgcagtttcgcccaacggacgacggtgataaatgatataccattcatctgatccgggacctttaactaccgaatgatgaccagcaccggttgctatattagtatcttgctgcagaatttttccgactctttcaaacggaccgaacggtgaatccgcaatggcataggctacactataatccggacctccccagccaccttccgaccacataaaataatattttccattatgtttcagcataaacggcccttccacataattttggggagtcacttccttatagatagtaccatcctcaaaaggtacaatactcaataaatccggtgccatcttcaccatattacaatgtccccaaccaccataatacatataatattgtccatcatcatccttaaatacaaactgatcaatcggctgagcaccatttacaatcttatcaatcaacggttttcccaacgcatctttaaaaggtcctgcaggattgtctgctacagcaactccaattccgcctaactcattattattttggatatcattggctccgaagaagaaataatatttatcattagcatggattactgccggggcccacaatgcacgtctgagccagctgatattttctttggaaagtactttcggatgcttggtccagtttaccaaatcttttgatgagaaagcatccatgaatatctgatcatcataagcggcagaataggtaggataaatccagtattcgtctccaaacacaatcccttccggatcggcataccaaccagggaaaataggattaccactcgttttcggaagcttacttttgttttgggcagatatagatacagaacagcaaattacacagaaaagaaaaagatgtctaagtttcatatattatttatttaaaagttcacttcgcaaagatgagaaaaaacaaagaaaagtttcagaaattacagttcatttaacaacaaaaactgaccattctacttccatttgcatgatttatcaatattttatgcttactttgcattgtcattatcaaatgagaagtaccatgagaagcagattgtttttattatccattatcttattaatcggtgtctcttgccagcataagaaggctacaacagagaaagaaactgtagccgcaggaaatacctatacgaacccgttacttgaacgtggagcagagccatgggctatttttcatgaaggcaaatattattatacacagggctcagaaaacagagtcatactttgggaaaccgatgatataacagacctctcacatgctactcaaaaagatgtatggatacccaccgaccccagcaactcctatcatctgtgggcacccgaaattcatcgtataaataacaaatggtatatttactttgccgcagacgacggcaatatggataatcaccagatttatgttgtcgagaatgaagccgccaaccccatggaaggaacatttgtgatgaaaggacgcatacagacagataaagacaacaactgggcaatccatgccagcacctttgaacatgatggccaacgctatatgatatggtgcggctggcaaaaacgaaggatagacagtgaaacccaatgtatctacatcgctactatgaagaatccatggacactgtcttctgacaggattctcatctccaaacctgaatatgaatgggaatgccaatgggtaaatccggatggcagcaaaacagcctatccgatacatgtaaacgaagcaccccaatattttgaatcaaagaataaagacaaagcatgcatcttctattcagccagtggtagctggactccttattattgtgtcggattactgactgcagacgcaaaagctaacttactcaatccggcttcctggaagaagtctccggttccggtactacaacaagaccctgaaaacaatgtatacggtcccggcggaatatctttcactccgtctccggatgggaaagaatggtatatgctatatcatgcccgccagataccgaatgacgctcctggcgcatccgattcccgttctccccgtttacagaagatagactgggacaaagacggaatgcccgtgctgggaacccctcaaaaagaagaggaaccaatggcaaggccatccggttcccctattcataaaaaacagaactaattacagattgtactctgagggccgagataagaacgcttcattcctcccaagtcaatgacaatcttttgaataacgacgcccggatcaccacagcgtatctgcaaagtgttcttaccgggcttctttacatacaaagtagacttattcactctgcaattcttcaatacgctatcataccagatttgagaatattcgatagctgaagtagaaggagtagaaatggaaccatcatctatacggacactatactttgtatccgagttagtatgttccggcaatttgtagtcccgctcagcatgcaagggaaatgtcggcaaaacatacgtatatacatcataaatcccggcattaaatgtatagaaatcatattccaccctggggacatcacctgcacgatacatttgcaagggagctgtcggattccccaactgcaaagagcgaccctcaaaaccaagtcccggaaggatactcatccgaatatcattactctcaaacttccggtggaagtcggctgccggaatagaaatgtaaccattctcctctacatacaatccttgtacttctgtacgtgcaggagactccggattgaatactgaaaccagtacactctccttctgactgccggaagttacatcaatttgtcctttcaccttttctcctgccggcaccttatcccagtcaacagaaatatagatacggttttccgcagacgtcttaccacttttctgagagatcagtatccagtcttccgaaggcgtgatactccagcttagctctccggtcccctgattatatatatctatccaatgacttttacgtgaataagtgctgtaggcgggcaatgtatgaaaactcattcctcctttatccaaattttcgctttctgcctgaagccccagcttaggaaagccaacaggtgtgtattcctcttccatcaatgggatcatgaaataggaactcgtaccatcatagttctgttttaaagacatcatgtgcttccattttccatccagcagagagttgtatccatcggttatgatttcgagactatcatgatagcacttcacctgagccttaagccgattggcggcagcacgttgctgacggacatactgacggtaaaactgtcctttgatggtcatatgattcatcagttcggcccctttcaccggatagtataataattgatagaaagccggtttactcttttcgtccaatgaagctaacaaatcctccgtttttttcccaatacggctatactcagtcaagcgtctttccgcttcattatagttagcaaaagagaactccgtatccgtacgtttctctccgcctccccaatagttattccaatatccccagcccatgtactccggctttctggaaaaagccaaatttatatgagaacaagttatatcttccaatgtatcgtagtactcctcaccaaacatctttgccagccaacgtgccggataagtggcgacattatccgcattgaagctgtctatatcataagccatatcaaggaaaagggagatttgtgtttcagcccctttcaagtctccgcaattcgccagccaaacacgatcggcagtggtatcatacgccttacgaagttcttcatacatcaatgccggaggggtagtactataccacaaatagctatgaggaacacccaaataagatatatgatagtaaacgcctgcacgtccggagcgcttttgctcctgcggaccactcagacgtttcatataaccgaaattatcatccgcccagataattgtaacatcatccggcaattccagtccgttcgaatagatttccagcacttccttataaggcgtaaatgcctgtgggattgtttcaacaggtttgtcgatatgccgggcaatgatctctctctgagcattcagtgcactttccagcatcttaaccttttcccgcatcggcacatctccgccacccatagctgcatcatgcaagcctcttaaagccagcgtatatacattttcatacgcacagttttccttcacacgattactcaatacctcgttgatcttatctttgttcttgttataatcccatggtcccatcgtcttgctgtcccattcgctggcagtgttcagcaataacggttcgcagtgactggaccccataacaatggcaaaggtatcagctaccagtttattttccggtatcttataaaatgcggtagaaacggggtgcatggccggtgccagatgattagctttcagtcgcagcaacagctcgcatattttggcataggtacgaggaccgatatttcctctttctttctcgaatgtcttggcagcccaaggtttcagtccccagtcttcgtcatttaagaaaattcctctgtacttcaccgaaggagtcttggacaaagtggcgggggcatcgacataaagcgtcttatgtttcttcaccggaacatcagcccaccagtaccaaggagacactcccatcatttccgaaagcgaaaaaagtccgtacgcagctccccgcctgtcgctccccgctactaccagcgctttgctgactccggggaatggacgggaaaccgtctgaatcagaaatcgttcccatgtcccttccaaagaagagatatctagcttgcccttctcagctaactggcggatcagccgatttttctcaactgtacccacaataataatctctttgtcgcctttcagtttgtccgtcaaccgtaattgttgtccggtcactgattcgacgtccgaaacaaaaagctccgcagtcttacgtaccaccaaatagtcatcagtatcataaactactacagctttcgctttcgaagtaaccaagggaaaagcatacttactctgaatagcattctctttaatgactacctgcgactgtagggcagaagtaaccgacaatactactaataaaaaaagaattctcattgataaagtttattatagttgtttttcagtttatttacgactatccgcggaaacatacgattgttctccctccaaaagtcataattatctccggtaatataagctacttattattcaattaaggacaaaaaataaccattatcgcataaaaaactgtcattcactataaaatgacgagcatttatcatttattgaacagcaaatttcctttattcttctctgattagcttttctttgcaatattccttttatgaatattaattcttctatttaatacatataaagataattaccatgaaaaagaattttctagcagtgctattcgcattggctctttgtagcccgacattcgctcaatggaagcccgccggtgataagataaagactccgtggggtgagcagttgaatcctaaaaacgtattaccggaatacccacgccccattatggaacgccaggattggaagaatctgaatggtagctggaattatgcgattactaaaaaaggagaaccggcaccaaacaattaccaaggagagattttagtaccttttgcagtcgaatcttccctgtcaggagtaggtaaaaccattaacgagcatcaggaattatggtatcagcgtacttttgatgtaccgtcagcatggaaaggcaaacaaatattactgcacttcggagctgtggactggaaagccgatgtatgggtaaatgacgtaaaagtaggacaacatacaggaggcttcactccattctactttgatattacttccgcattgaataaaggcaataaccagttggttgtgaaagtgtgggacccctctgaccgtggcgaacagccgagaggaaaacaagtagaaagaccggaaggaatctggtatacaccagtcacaggtatctggcagactgtatggctggaaccggtagctgcccagcatatcgcccaactgaaaacaactccggatatcgacaagaagactgtcaaagtggaagtagccaccaacgtatgctctccagacaaagtggaagtgaaagtattcgacggcaaaaacctcgtagccaaaggagcagcgctcaatggcgtaccggtagaattaacaatgccggaagacgttaaattatggacacccgagtctccttcactttataatatggaagtcactctttataaagacggcaaagctgtagaccaagtgaagagttacaccgctctccgcaaattctcaactcataaagacaagaatggtattacacgcctgcaactcaacaacaaagactatttccagtttggtccgctcgaccagggttggtggccggacggcttatacacagcgccaacagacgaagcattggtatatgacttgaagaagatcaaagatttcggctacaacatggtgcgcaagcacgtaaaagtagaaccggcacgctggtatacttattgcgaccaactcggactgatcgtatggcaagatatgccgaacggaggtcgcggtcctgccgaatggcagatgcacaagtactatgacggcgcagacgccatccgctccgcagcatcagaagctaactatcgcaaagaatggaaagaaattatcgactacctgtattcttatccgagcatcggcgtatgggtacctttcaacgaagcatggggacaattcaagactcctgaaatcactaaatggacgaaagaatacgaccccagccgtctggtaaaccctgccagtggaggtaaccactacacgtgcggagatattctcgaccttcataactatcccggaccgaacctctatctctacgatccgatacgcgctaccgtactgggcgaatatggcggtataggtatggcactgaaaggacatctgtggctggcagacaagaactggggctacgtgaagttcaacacgccggaagaagtgactaatgaatacataaaatatgcagaccatttattggaactgatcgagaaaggcttctcggctgccgtatacacacaaatcacagatgtggaagaagaagtgaacggtctggttacttacgaccggaaagttattaaagtagacgagcctaaaatcaaagccatcaaccagaaaatttgtaactcgctaaataaataaaagtttcatattaatgaataaactattctctacaatcatgtcagtttgcctcgcatgcaatgtgcaggcaactgacctgtttaaaacgagtcaggatatcgctttgcgtgcaccgtccgtacctctgatcacttccgacacttatcttgctatctggtctccctacaacgaactgaacgaagggaacaccgaacactggacagccgccacccatcctttactgggagcgctccgggtggacgggaaagtatatcgtttcatgggcaaggacaagctaaacctcgaaacaatccttccgatgacaaacaccgaacgttgggaagcaaagttcaccatgagccaaccggcggccaactggatacagccccagttcgatgattccggatggaccaagggcaaagccgctttcggcaccaaagacatgaaacgcatcggcacagagtggaacaccgaagacatctgggtacgccgtagtttcaacctcaatcaagacctgacaaacgacattatctacttacgttattcacacgacgatgtattcgagctctatctgaacggagaaaaactggtggcaaccgattattcctggaatgacgatgttaccatcgaactatccgcatcagctaaagccaagctccgtaaaggaacaaacattattgcagcacactgtcacaacacaaccggcggagcatacgttgatttcggcctgttccgtgagaacaaacagctcagcaacttcaaggaagctgctatccagaagtctgtcgatgtattaccgacacagacctactatacattcacctgcggtccggtagaactggatctcgtattcacagcacctctgctgatggaagatcttgatcttatctcgacccctatcaactacatctcctatcgggtacgtacactcgacaagaaacaacatgatgtgcaagtgtatatcgaaacaaccccgcaacttgccgtacacgaaccgtcacaaccaaccatctcagaaaagatcagcaaaaacggagtggattacctcaaggcaggtaccatcgaccagccttacgtaaaacgtaaaggagacggtgtacgcatcgactggggatatgcttatctgggaagcaacagcgcacccaacaaggacttaagcataggtaactactatgacatgaagcaagccttcatcaccaatggcaaactattacccaactcccaggatttcattacccgcagcgaaagcgacatgcccgctatggcttataccgaaaacttaggcaaggtagacaatcaagggaaaagcggatatgtgatgttaggctacgacgatatctactcgatcgaatatttctacgaacgccgcatggcatactggaaacacaacggtcaagtcagcatctttgatgctttcgaacgtgcgcaggcttcttatccctcattgatggaacgttgccgtgccttcgaccaacaactgatggctgatgcagaaaaagccggaggcaggaaatatgccgaactactcgcattgacttaccgccactccattaccgcccataaactccttaccgacaaggaaggcaacctgcttttcttatccaaagagaaccatagtaacggctgtatcaacacagtagacctaacttatccatccgctccactataccttatttacaatacggaactgatgaagggaatgctcaactctatcttctattacagcgaaagcggacgctggaacaagccttaccccgctcatgacttaggaacttatccgatagccaacggacagctttatggcgaagatatgcctatcgaagaagccggaaacatgattctggtaactacagccatctctatgatggaaggcaatgccaactatgcttccaaatactgggaaacattatcaacctgggcaaactacctgattgagaacggtctggaccctgaaaaccagctttgtacagacgactttgccggacatctggcacacaacgccaatctttccgccaaagcgatcatggcaatcgccggatacggagaaatggcacgtatgctgggcaaagaaacaactgcgaacaaatatatcgaaaccgccaaaagactggcgatagaatgggagaagatggcatttgacggcgatcactacaaactggcatttgacaaaccgggaacgtggagtcagaaatacaatctgatatgggacaaagtgtttaacatgaacattttcccgcagaaagtattcgatacggaaattcctttctatctgaccaagcaaaataaatatggtttgctattggactcccgcgcacaatataccaaatccgactgggtactatggagcgcctgtatgtctccggacgatgctacgttccagaagttcatcgacccgatctatacttatgcgaacgaaacaacttcccgtgtgcctatcagcgactggcatgatacgaatacaggaaagatgatgaatttcaaggcacgttccgtagtgggtggctactacatgaagctactgatggagaaagtcaaagaacagaaataaaacgaatactcttttcctcgttgaatatagacaaacagcccttttgcctagcgtaaaagatgctgtttgtcttttttcataccacttaatgatgcgatcagttttccggagttatatcatcaatctgatattgtccgtcaacgttaaccactctgaccggaatactcacggcacgttcaaactgactgcctttagccgaagtatagttaacctcataccaattatcattcagatgtttcaccgacaatgttttcatatcattttcacctaaatcttgcgcacgaatgatcggatcggcatctgtcgcctctatcagcctatcaactttctctatcagctccttggtcagaaacttttgcttaattgaatccccaagtgcgagagcttctttaccagtggacatgaaactggcagcataagcctcataaaagtcttcaatcatgccgatggcttcttgttcaattctactactatccgacacattcgcctgtacatcagctggttctgccgatgtatccatattcttccggctctgattggaacaggatagaagaagcattacggactgcaataataacaaatgtacaattctcaatttcataacattaatggttcttgttttaaactaataatcagatttccaaactaatcagcctcccccttcagaatctcttcagttttatcctgaccggtataaaaatctatatttgcaaaataacacaaatatttccagaaataaagcgtcaggaacattcgcacatcacgatctgttttaaaatcactgcaaaaatgatccgtgttcctggcaatttcccaaaatatcataaccgaagaaactcctcctgtcgcatcttcaattttgagatacgctttcaaggccggatgaatggccggttccaattctctttgccaatatgtaaagccatccaaccgtttcttaaacggcaatattatatactcaacctgagctttcatatacgcatattgtagtgaatcggcaacaaggctaagagagccaccatgctcctgctgattcttggatgcttgttgataagcatcagactgacaatattctgacggagaaacaccatccggaacaaacagcgtgcaagaatcattcagaatagctccatcaacaaaataggaatgaagtaaaccacccgcaatccctatgttttcatttaccacctagcatctcatgaattacatcctctcttttattgctaagttcatctatcaactttttcgtgtgttgtcttattgctggactgaagatttggagatactccttttcgatttcatccaaagaataattcttgttatccctcaaaaagagtacgaatacataattcatcaggtctgcttcagttggtttctccttcaagcgtttttcgaaaagagaggcagcttgtttgtaagtatccatagccaggctctttttagcattctcttccagcatcattcccttacctaaaatatagtaaggatcatccggagagaatttctccatttgcaacttggtttgcagtgctttctccttctgtcccaacgccattaagtatttaatcttatttgcatatgccagtttgtatgaaggctccaaagctatcgcctcatctgaaagatgaatagccttatttaaagaatcggaatcattaaagaaacccgcagttttcacagattggttattcttctcaactgctttgggagaaatctgagctatcgcaaaactcgtgttcgtgcataaaagcaaaataataagtgttctcataattctatttattatcattgattagattttgtttaatgtgatacccaaagaacgacaaaaaacaatagaaacacgaacattttctattcaaaaaatgataaaatctattcaacaataaaaataaggcagcctttctcattcagtacaaacgaattttgataaaaagaattatcaacatgaaacagcaatccgattagtatttatagagtaatgaacagtttctttcttagattgaacgttttttttccttctttattcatcgaaaccgctatctttgtagtagttcacatgatactaaaatagcacagagaaagtgctgaacataaaaatcatacaataaaatagacaactaaaaatagacagcactaatatgaaaaacaaaccgttattatttttactctcagtatgcggacttttagcaatatctgcacgtggagaaaatccacccgctaaagtgatattcgaacagtacatgaatcaagctcaaacttttgccgataactatccgcgtgaaaaagcatatctgcattttgataatacaagctattatgtgggcgacacgatatggttcaaagcatatgtcactcttgccgaaaaacaagttttcagttcaatcagccgtcctttgtatgtggaactggtagatcaggcagggcacgttactgataaacagatcattaaactatcacaaggagaaggcaacgggcagtttgtactcccccagtcaatgctatccggttattacgaagtacgtgcttacacccgctggatgcttgcattcagtgatccgcagtacttttcacgtactttccctgtctatcagctttctcatagcgaccagttggagcgtagtatcagcacctatgagttgagtccgtctatggagaaaaggccggaagaaacaagagagaagctgagtctgcgtttctttccggaaggaggacagttagtcgaaggggtaacttcgcaggttgctttcaaagcagaaagcaaaaatgaaggaaatattcaattatcaggcacactttataccaaagaagggcaagaaatcacgtcttttgaaactttacacgatggaatgggagcttttgagtatacgccttctgctctgccggcaatcgctaaagtaaactttcaaggaaaacagtatgaatttaccctccctaaagcactgccaagcgggtatattctgaaagtaggcaataatgcaggggctatttctgtgacggtatcatgtaatgcagcgaccccgcaggatacattagccgtttttataagccatcagggacgtccccatgcctatcagcttatccactgtcaggcaaataagcctcagcaatttacagtattgtcgcgcaagttaccggcaggagtcttacaaatcagtctgctcaatcgtgccggaaatactttatgcgaccgctttatctttgcttctccacgggctcctttacaaatctcgcccaaaggtttaaaagagatttacgctccttatgctcccatccgctgcgaactgcagttgaacaacgccataggagaaccgatacccggcaaattatcagtcagtatccgtgacgccgtccgctctgattatatggaatatgataacaatatcttcaccgaccttctacttacatcggacttgaaaggctacattcatcaacccggctactacttcacagagagttctctccggaaacagaaggaactggatatactgttaatggtacacggatggcgtaaatatgatatgacacaacagatcggtatcagcccattcaccccacttcagttgccagaaagccaactggtactttatggacaagtcaaatctacgattctcaaaaacaagctgaaggatatagctctcagcgtaatggtgaagagagatgcagagattattaccggtcagaccgttacggatgagaacggacatttcagcattccgctggaagatttcgagggatcaatggaagctgtgatccagactcgcaaagtgggaaaagaacgaaataaggacgcttctattctcatcgaccggcatttctcgcctgctacgcgtgcatacggttacagagagttgcatccggagtggagcaacattgcccactggcaacaggaagctgaaaaattcgactctttatatatagattccatccgtcgggtagacgggctttatcttttggacgaagttgaaatcaaaagtaagcggcgccgtcaaagtacgaatatggcgactaaaattaatgagcaaagtattgatgcctactatgatatacgccaggctgtcgatcagcttcgcgataatggcaaagttgtcaccactatcccggaggtgatggaaaaattaaatccactcttttactgggaccgttccaatgataactgtacttaccgccagaaaccgatctgttatattatggataacaaaattctatcgtcaacagaagtaaacatgatgctgactgaaatagacggtttggcttctattatcatcagtaaaggcacaggaggagtagatgatgaaattatccagaataccaaaatgtctaattccaatgatgtagatgtatcgaaactggacaaatatagtattttctacctcattccattgcccagacatgatgttctgaataaacacgagactgcggctcttggtacccggcagactgttatgcagggatatacaccggcattggagtattattctcctgcttatatagataaagaattatacatggataaagcagacaaaagacgaactctttactggaatccgactgtgcagacggatgaaaatggaaaggcagtgatcgaatgttacaataatcagtattccacgccattgattattcaagctgagacactgagtaatgacgggaagctagggagcgtgacgtattctacagttgcagaaacgaaatagtatgctttaggatatttgacaataaacggcacacaatcagtcctaaaataacttttcaaaataagagaagagggtgaattcaataacttgaacttcaccctcttcttgaatcattagattagcgattaatagaaactaccattcaattgcttgatcttcgtctggaatctgagtattgatatcacgtgataatgtcaatgtaccttttacatgatagcgaatgatggtaccttccactggtatataattgaaataataatcaacattattaattattacataacggtgttccagataaggcttcgcgtcatccattgatgaagaaatacgaaatgaaggagtcacgtccttgtttaattcaaatccaatctcttctgcattatcacaggaaatagtaaccgaaccattcgtctcaccattaaaagcaaatttgattttatactttctacggtctgtataatcctcatctactattcctgcatacgtaaaaatagtctgttcatctatcacataccctcttattgacgattttgtgatagattctgctgtttctatcggtttaccatctccatcatatcccgtcaccaccttgttggttattcctgtaccagaataatcgccagagtaatcattaaatgggaagattctcaatatcgccttagcatagtctttacgtggatgagctacgtagttgtaagacgcgtcgtctacaatctgcaatgggagtacccatttttctgacatatcaatgttgcgaaaatcaaatttaagatccagtaaacctttattttctcctgcttttatctgtagagattctggatatgaagcgtatgccaatccttctgctcccatatcctcataatatagttctgtacgtgtagcgtaacgagcgtaattcaaaatattcaatgtatcagcatcatgtgctacgtgtacagtgacattacttggattatcggtagaaccactaacaagtatcggtaactgataattggacctcccttctcctccttctgcataatttccttctgcatcatggcggctataaggtacatatatattcgtcactcccttactatccagttgtgaactgaaagaaatgtagtgctcatattgttcatcttcccattccgaattgcaggaagttcccaacattgtcattgcagccaaagctgccaaagtatatattttcttcatatataagtctttatgtttagaattaatcatacattgtccatcctgggttctgtgttaaacgtgaattacgtttcaactcactatgtttgataggccataaccatagcttttccgagaaagtagacgggagattgtaaacaggaattgccgaatggaattcgtctctcttagcttcaccaacaaagacattacaaccgtatatttgcagagattcttctactggcgcatctttccaacggcgaatgtcaaagtaacgttttccttcgcccattaactctatcatacgttcacgttttaatgctttacgcatatcatcaaccccactctgcagataaaattcgtctggatagtcaggcaacccggcacgaatacgtaccggatgaatacctctttccatttgttctttatcacggctgatagtgtaggttgtcgcctcattccaagaaggtatattgtatgttccagtcaactcattcaatgcttcagcataaagcagtagaatatccgcatagcgaattgctgtttcagctttcgcaacataattgcctggatagtcgtttggatgaacaaactttttgattcctatacctgtacgcaagtagaaaccgtcattacgataaccatcggaacttccaaagtagtaccaaacttgttgatttacatcggcaggtttgctttcagtctggctcaaataataccaggtacagccattataagcaacagaagcatagaatcgtggttcgcgttctacatattgcaaagaaacattcatcccagttttggcctgatcgttatctcctttcttcggatcatatttccaacctaattccggatatttattatccttcaagtcttgcaaatcagtaaatccggttctacgttcacgagtatctacaataccttgataattagctactccttgatacatagagttcatacccggctcattactaccattattcatataatatgcatccagcattttctgtgtcataccatgacagttccagccgccatcatctttgggcatctgatgaagtaccaacatatctatatttgttgccccgcgtgtaaatatcagttctttattgtttgcaggtaatatagtaccatcaaagatagtacgatatgatctgagcgggtcaatatttgtccatccttttggccagggttgattggaaaactcgccatcagccggtggagtaacagtcggacgttcagaaggtccattatcagatgtggatttatttacaatattcaactcataaacatctaaatcgatgacatcacggcaagcggcagcagcttttgcccatttttcttcactatattcggaagaaagcaaacgacgcccttcatcatctaccaattgctgcgcatattcatcattatttccattagcaaacggactagctgcaaaaatcagtgcataagcacgaactgccaatgcagctccacgagtaggtcggcctatagcataattatcagtacgacgatcatattgtaactctttagtagcctgtaccatttcgtcactgatatattgtgccacttcttcgtatgagctacgtggagtagctatttgatcataactttgagtataatccactccttcgtccggcataataggcactggaccataacgacgtaagagcaaccagtaatagtaagcacgaacaaaacgagcctgccccttataatctagtatttcccaatcagccatctcttgacaccggtcaacattatggataaatactgatgcttggaaaattcctttataacatgccccccatgccccaacattataagtattctcatcatattctcctaacttgaacatattatatgacaattcattctttgttgcatcgattgtcttatcgcggtcaccataatacatatcgtctgaaaaacaaaacgaattctcacttggtcctttagtcgtcacctcatagttttcattttttataaatgaaaaagcataagctaaccattcttccacatgatccttactttcgaaagttttctccagtgtcagacgatccttaaaatatttctccgaattcaggtaatcagagcaagaagaaattactcccatccctaatacggttaataataatatataaatcttctttatcataatctcttagtatttttataagttaacagataaacccatagtaactgattttgttagcggataggcttcaccccgcggattgccagtttccgggtcccatgttttgaacttagaccatgtaatcaggtttgatcctgcaatatagatacgaatattattgaagtgcagtttattgactatgctttttggcaaagtataaccgatatccagattcttcaaacgaatatatcgaccatcacgcatccaataagtagaggtttgttggttgtttttattttccccataagttaaacgcggatatgttgcattggggttctcattagcatgcaatcccagtttggcagcagtctccgaatctacccaacgatcacttatcatatctttaaagatatttccccagtcactttcgctgaatgcatatacacacttaccataaatagggaaagtggatttaccggcaccttggaagtgaacatttacatcaattcctttccatgcgaaagatgcccctataccatatactaagtttggagtggtagtagcgccaatagcaactttatcattatcgtttacaacaccatcaccatttacatctttatatttgatatctccaggctgcactgtaccaaactcttgtttcgggctggtacgaatatcatcgtaatcagcaaacaatccttcagctatcaatcctttaacttgatctacacgataccctttttgatataaataagaatagacttgattctcttcatccttttcgagcacttcattcttactataagttatattcccacgaatagtcatatccacctcacccagtttctgcttaagagcaaaattgccatcgaaaccttgagatttcacttcacctacattcgctttaggtttgctctcaagacctgtaatgtcaggcaagaactcacgtgttaaaaaaatacctgtacgtttttcgtggaaatagtcaactgtcgctgtaaatttgtcattaaacaaagaaagatcaatccccaggtcatccttagtcgcaacttcccaagtaatgccattagaagccatctgtgtgtaatgagttcctatgaatgattttccataatcaccaaatccccagttatatacataattaggcttgccttcgctgttatatcctgtagtggctatagtatataagtatgggaaacggttgttatccccaatattatcattacctaccttaccatgagaataacgtattttaaacatattcatccacttcaagttattcttaacaaatgactcttcggcaacgttccatgcaagagaaaaagccgggaagaaaccgaattgatttcctggtgcaaaattttccgatccggtataaccaaaattaaaatcaacaaagtaacgatagttccagttataagtaaatcgtcctgctaacccttgattacgttttgatactccattcttaatatccgtaccaatgtctactgtccgcttctcactatcttgtgtgtaacggaaagtaactcctccatgatgatttccgaaagcacgttcccagcttaacagtaaatcaaggaattcacgacgtttgccagagctaccacttgattgtgtcatgtcatatgcggagaacattttctcataaataatctctcccgtttcttgtctacgtccgttcgctttatacaaatctggttgacgatgacgattaatccagttactgttgtctgtatcatagccaaaacgtcctacaaacttcaatcccttggtaatgaaatcaaaattttgttctaatgtaacattagtttgtacattattctgccaatcttcattgtatccagtttgcgtagatgcaacccagggattaagtttgtttacgttatcccggtgggaaataggcgcatatccattggaatagtatacaggcgttgcaataggattgtatccgaaaagcatgccccataacatctcgttatcagccagtcctggactattacgtttggctaatgaacctgctatacctagtttcaataaagtcgatttggtgatatctatatcaacattcatacgataattccactttttatagttggcatttgtatcgtaatcatcacgtaacgtttggtctgtgttatacataccttgatcttccgtataacttgcagaaacaaaataacgagcagtgttaccaccaccattcatgttcaagttagcgcgataactccatgctccgttttttaggatcaaatccatccagtccacattcggatagaaatccggatccatttgtgtacgaaataactctaattcttccggttgataggccattcctaaattgcgagtcactaatgcttcgttcatcagactggcatacgaaagaccgtctacaaattccggagtgatagtacgcgtattataagaagtttctaccttggcatcaatattgatttttccagctttaccacgttttgttgtaatcaatactacaccatttgcacctttagaaccataaatagcagtagctgacgcatctttcaatactgtgaatgattcgatgtcttcaatgttaagttcatccaaactgctacgttcaaagccatccaccagaatataagcacttgaactagctccaaaagtagaaataccacgtatccaaaactcagaagtactttttcccggttgtccggaagtttgtcgggcaataatacccggaacattaccggccaaagcgttagacatattggaagtagggaaacgttttaaatctcccacattcacattggttacagctcccgtcactgtcagttttttctgtgcccccataccagttaccacaacctcatccagtacactagcctctgattctttcatctttacattaacagtatgctgttcttttacaagtacttccacatcatcatatccgatgtatgagaagactagtcgatgataaggttccatctttatagaaaaattaccattgatatccgtaatggttcccaaacctgctacatcctttacagtgatattaacaccaatcatcggctcatcttgtgtgtcggtaaccgtaccagtcacggtaattgtttgttgtgcagaaatcgtcaatgggacaaccagcatcaacaaaaaaatggctaaatattttttcataatctgataaatgtgtttattcgttagattccactgttgattcatcttccggtatattctcgtcaccggctacattctcttcttgctccattgaaatagtgcgaatagtatgtcccacctgatcatgtacataaaacatctctttcacatcatcataaacaagtccacttacatcacggaaacgagccacttctcgtaggtcaccatcatcagttccccattggtttccgtcagctaaggaagttgacgctcctcgtcccgcataggtcgatacgataccttctggagttactttacgtacacagaagtttaatcgatctacaaaatagaaatcatactcttcttcaccagtataatccggatttttcacaaatactccttgacaaggattattcatacgtgcctcagttcctacatcatccctataacctgactgtttatatcccccgacaaaattatacggggtaataaattccttttttatctcgtcatagtcggaacgcatgaaataatgattgttaatcacaccaaaataagcatactttccagtaggatgaatgaaaatctgaaattcccaacttgggtcagcaatagtgaataactgcttaaaagtattaggattgttctttactataggatcccaacttccaccattcttaatagttttaaagtaatcaaccaagtctaaacgaaatacttgtcccttttcataactattaaaatacaattctccgttgattggatgaatagtagctccattacattgtttgtaagcagctatcaattgtatatcagatctatcatcgaatgtaccatccgcattacgtttaataatatatacactaggactttcatctcccttaccatcataatcaatagctacaatcatatattctgcctcatcagcatatccttctatcttcttattgaaagcaatgcttcgtatacgattagtaggtatagtattgatattcaaaggagaagaaagcatacgattttttaaatcgatcaactgtatagctttatgtccatcgtaacaaatatacaaatgatccttattcaacggatcaaaagctaatcgtccgttatcgctaaagccacagcatttgacaccttccggtccatcaaatggtccgtctctccaaccttgatcatcacgattattgcgatagccacaaagcgtacctacaaccatctttttctcatagctaaaagtagtactcgcagtcgttgttactgcattctctccttctcctacagtgatttcaatttcaccactaaaagctcctgaaggaacaaaacagtaaacataagtactttttacattaataacaatagcatctttgccaccaatcttcacttttaccttcgaaacatctgttccgaaattttcaccataaatcaatagtttctgataggctcctccttctttcggagtaaaatcagaaattgctacaggttttgatggatcaaaggctccagtctctacattgtcatcgtccttacaactacaaatgcaaatcgtgaataatgccagcaatatccaccgccattccttcaatacttttttcattttacatttcatgtttttcattctagttaataataaatgtatagttaattaaacatttcatcgagttttgtccattaacacttgcatccagtatcctccaataaccgaacgcgctttaaacccaacccattcaccactgtctgtgtgatgccaatcactgataggtacccgcgaagtagtttcattgatatatttatagagtggatctatgaatttcttgaaagtttctaaatctgaagacatagcagctgtccacataatccagtcagactttgtatactctttgcgggagtccaatggcaatccgtaaggattctgtttcgtcaaataatagttaatttctttgtcgattacattatttgggaataaattcaaattccacattttgtcccaaatcatattatatttctgactccaggtattctcacggtcgaaagcaaggcggtaatgatcaccttcatttgccatttcttcccatttcaccgccattttcttggctatacctgcatatttctctgcaacatcatataaaccaagcatatgcgccatttcgctatatccggctacacccatgatcgcttttactgaaagattggcattatgggcccaatgaccggcgaagtcatccgtgcataattggttctccgggtcctgtccatactctacgagatagtttgtccaagtagttaagagatcccaatatttttttacatagtcagcgtttccttcgattttgctaatagcagcagcaagaattaccatgttacctccttcttcaattggcatgtcacctccatacacttgaccattagcaataggataagtccctaaatcgtgtgctggaaaaggtttgttccaacgaccgctagcactatactcaaagatgctagtcatcatagctttctgtaattcagggttataaaccaaaaatagtggtgcggatggataagttaggtctactgtatttacacaaccattactgttgttttctttagagaaccataacaagttaccttctttatcagtaaagagtttatgagcagagatcacttggcgataagatgccgaacagatttctgcatattttttgccacctgccttttctgcatcgtcataaataagttcgtcaaaggcgcgacaacgttccataatagcctgatagttgtctctcaatttttcgaaagcatcgaagatagtcactttgccatcatgcttccaatagcccatacgcttctcgtacatatactcaatagagtaaatgtcatcataaccaagcatcatgaatccttctttcccgctattggagacagaaccgagattgtgaacatatgccatagccggattatcttcctctttacgagttgtccatttagtctttgtagtggctaatgtaccatttttcacgaatgattctttcattccgtaatagtctcccaaactgactgatttacctgatccattcgtactagcaagatatgcataaccccaatcagcacaaatcaagtcacctcttcggtcacatattggttgatcgattgaacctgcttctacataactgataccattctttgataaggtacgagcaacagtaggctggttactttcgttaatagccagttcaggagttgtctccatatagaattgtacatcatgagtttttttatctaatgaacgtacatgataagaaacatagtttataggagttgacaataaatcaagatcatcaattaattgaggagcggtaaacacgacatcaagctctacaggaccacaagtgaaagtatagtaggtggaagtagccaatacgtctacagatttctgaacagcttcatttgcaaacttaacagcattttccttctcacgaaacaatccgaaatcgacatatgaaccacctgtagtattgtggcaatgggcagcgattacgttcttacctttacgaagtttcttttttgcttcttctgaaagtttcagatatacattattcttccagacaagtcctgtagaaacaagcttttccccatttagatacaactcaaatacatcatcatgggaatagatcagataaatatcttcagcgatattcggttcattaaaatcgaaagtgcgacgaatgtagatatcggtattgtctcctttccattctgtgtgaatacgttccatatcacgactaccaaacgctgctttacctttcttccaattgctatcatcaaactgaaattcttgccatccgtttgatggttggctgttagtgtacgctgcttcccaacgttctacattagtcataggagcaataggtaccagattaattttatctttccccaaaaaacgatatacttttccgtcaacacgcagagcacccaataaaggtttcttcgcacttgtccaatgctctgtactaccttccattaatttatcatagggtgaccagatcgaaaaataaggatctgaaacgataataggcaccgacggagcacgtagcgctatatcttttgcaggttttaataagtcaacggtctgggcatttgccaacaagccgactgaaagagccattatggctagcaatttcttcataaatatttgctttaaattaatcttcaaatccaaggttatccatccatcaatcttatttacctcataaaaaaacaagccctaagtattcttttaaatccactttttaccttaatactatctcacctttgaataattgcaatctttatacccgttttcctatacctttaatatataatatcagtactgtcatatttaggatgaaatgttatggagaagcggctaacaaatcgtgtatttctagcaaatatcgagctttaacaaactctttattttccatagtatctcatcttgatgacacaaaataatggaattaatagaagaaacaaggaaaatctgtgttcaagaaaggacaaaatctattcttttttggatttcaaacgttcttttaacatacggaataggggctctgacgttgtttgagcagtatttatccttttttgagcagattttatccttaccaacccaaaatgaaggtctattaattgatgacttctaactttaacaaaagagatattggtcatttcagatagctttcgtaaatttgcaacacgaatgcaatactgattataccatcgcaaaatatataccatatattaaacccaagtacgttacccaagagggaactactgtcctttatgttcgatataattacaatcggaacaagcgcacgcttatctctaccggatacaatatcaaaccggaacattgggatgcaaaaaggaaatggattaagcgtgcatgtccccattatgaagaaattgatgcctgcttgattaagataacatctaagctcggtgatattctcacctatgctaaagtaaacggcatagatccgacagttgattttgtcttgcttgaattagaaaagaacagggaatatgatctgcgtcctaatcgggtagatatgtttgatgcattagaacggtatatagtggaaaaagcaccatccgtctctgcagatcaaataaaagactatcgaacactccgcaagcatctgaccgccttcaaagaatactcatcacaacctgtaacattccgcaacttgaatctgacattttacaacgagtttatggattatctatttcataaagtagtaaaaccaaacggaactgtagggctgctcaccaattctgcaggaaaaatcatacgtttgttgaaaggctttgttaattatcaaatagtaaaaggaattattccaccgattgacctaaagaatttcaaagttgtagaagaggaaaccgatgctatttatctaaatgaaaaggagctggctgcaatatacgaacttgatttatcagatgataagcaattggaagagatacgggatgtattcattaccgggtgtttcacaggattacgatacagtgacctttcaactttaagtcctgagcatattgatttggataatgagaatataaatctcaaacagcggaaggtacacaaggctgtagtgattcccatgattgattatgtgcccgagattcttaaaaaatataattatgatttgcctaaaatcccacgatacatgtttaatgagagagtcaaagagttggggcggaagataaaattgagccaaaagattgaagttgtccgcaggaaaggtaaagagcgagaaaagagggtatatgagaaatgggaaatgatctcttcccatacctgtcggcgatcgttttgtacaaacatgtatctatctggttttcctgcagcagaactaatgcgtatatccggacataaaagtccatctgcgtttatgcgatatattaaagtggataatcagcaggctgctaaaagactaaaagagttgcgtgccaaattagccagatgaattccttagggagataaaactataaccatttttagaataagacaacaggcgttagtttcctcggaggaaacgccagttccctttaaaaggaacggtcgtttccattaaaaggaacgtccgttccctcaccgggaaacgacagtttccattccaagaaatgacaggaaactataagttgctgatatctagccatataaagtactatcggtaatattatagagtttatgttcatgtccaaacagatatgcttcattcttacatcgttagagcatttagacagatgaaaataaagtttttaaataaatctataaggaactgctattctaatatataagacaagtatctcatacttcctataattcttttctttctgtaacttatttattcatgtataatacatagaattacaatacaaacgcaatacaattcaatcataattcattaattaataggatgttaatgtgtttgcgggtcgtttggacaggacccggagaaccaattatgcacggatgacttcgccggtcattgggcccataatgccaatcttt

SEQ ID NO: 4539 - DNA, 110308 bp, Unknown
  gut microbiota DNA sequence
tcctcctgatattccagtatatctgccggctggcagtccagtactttgcagatagcctccagcgtagagaaacggattgccttagcttttccggtttttaatatagaaaggttggcgggggtgatatctattttctccgccagctcgcccagagatatttttctgcgcgccatcatgatgtcaaggtttactataattgccataattttattttctcggtttgggttaaatggtcagttcctgttcttctttcattttcagtccgatagcgaatgtttcggctacaatcaggcagccgagtcccaataataaatcagtcgtctgtagcgccaggggagcgatgatataatgttcaagcgcgaatacttctttcagtccccagtagttgacgacctgcggaatcaggtaaaacacgaaggacataatcagcagactacccagccagcgcaggcggcggacattcttccattcgaatatctgcgatttgttgatgctcaaaatcagcatgacaaagataataagtgcggagatggtgagcagtgcattcatgagcgaacaggaactgctgataatcagataactgtagttcacctcttttccggtgcgtaccgccatttgcgtatacatgacgggcactttctcattgttacgggcattgatgatcgtatccggttggatcatggcgatcgtaggtacgacatccacaaaacggaaatcgcctgcaagcataggtctgtcacatgctttcgattccttgtgctgttctttggccagactcattccggctttcatgcctgttccgaactggtatcctgtggtatacagagaaagtcccagaactatgaataccaatatgctgagaatattcaaacgttttttcatcgctgttatttttttagtccgtgatatttgtttcttctttccagggatagcggacggtcgtacgacgcatcgcccagataactcctgccagtatcaaaactgctacaaaaatagcaattagataggagctagtgttcatcagatcgctcatattttctgcttccggatattttgtactgagaaatacggataacgaattattcagtatatgcatcagtatgcaggggatgaggctggcagtcttgtaatacgtccatgcaaacaggataccgatcaggaatgccggaagtatctgggcaggattgatatggaaaacaccgaataaaagggctgaaagcagaatcgcctttgtcgggctgtactgctgtagcaatgctttggtgatggctccgcgaaatagcagttcttcgagtacgggacctatgacggctatggcaagaatgcctccccagccggactggaggatatcgaaggattgttccatgatgttgggaatccacttcatcagttctgccaatgcggatacgacgaagccacaggtgaggacagccaatgcgctgaagaacagatacgaggatgaaacgggcgaccaggttattttctttgtgctgatgtatccggctttccataaatagatacccatcatcagctgaccggccagttgtgccggaatcataagcatggtaatgagcgtgtctttgtctaagtttccggtagtggctaccagataaatcacacaggggatcatgactaaaatgggagcaatgatctgtgcgataagcagattcagtaatatcagtttaatagcagttctcatattcgtagtattcttagtattcttggatggatacaaagataatcgtttgttatttactggcaatgaagctgcacagaaacatggctatcattgagatggatactaccagcatcgatatactcattaatgactttttcataaagtgttatttttttatagatgattaaatagaaaatgtttgtttttcgatgattatttatcgtttatcgatatgcaaatgtagaggtaagttttgagttggcaaaggaaaaagagattttatttatcgaaaaacaataaaaaagatatgtttttcgatattaacggactcgttgcagccgaaaagaggcttattaatgtggttaatttagagaaaaaaagggatcatttctcctgtttggcggcgagtagaatggcttcagtttcttccgcatccttgtgaagctgtgcgattagttcgtcgatactatcgtatttcagttcggggcgtgtccgcttcacgaaagtaagccggataaatttgtcgtaaatgtcggagtggaaatgaaggatattcacttcgattgtgcggttgggaccatttccgatggtagggcggacgcctatattcagcattcccatataggtctttccgtcgaatgtgacccatacggcatagactccgtctgcgggaatcagtttgtcgggatcatccacgcttaaattggcagtcggaaaaccgatcttccggcctacctgatagccgcctactaccgttccgtccagaaagtattcgtagcccagacagcgggcagctgcgtctacatctccctgatgcagcaacttgcggattaaagaagaactgaccggagcactttggatggtatctatctgtatatcatctgtgtaagcctgtgcacggatgaccttaatgccgattgcctgcccgtaacgtacataatcgtcaaacccttcgctgcggttgtgaccgaaacggtgatcgtatcctatcaccagatactttacctgataacgttctttcagtatctgagtcatgaattctttggcggtcagacgggagatgtcgggcgtaaaatcgagcatcaggcaataatctactcccgtgcctgcgagcaggtttgttttttcttcgggagtagttaaaagttccggatggtaagcggcgttcatcactttgcgcggatgaacggggaatgtgaccaatgcagaacgcagacctttggctgccgctatctccttcacctgttgaatcagatagcgatgtcccatgtgtactccgtcgaagaaaccgatggtagccacgcatggttcgggaatcatagccgatgtgtcatttataatctgcatacttacactctcatttttttctgaaaagatggctccagtcttcaccggctttcggtgtgtaggtcgagatacccagttcctgagctactttacagttaatttcggaatcgtcaataaaaaaagtttctttcgggtcaatacccgcatcttcggtcactgccttgaatatttccggttcgggcttggccattttcatttcgtaagagagatacgttttctcaaaatagtcctctactttgaacgtacggtaggggaaggcattcttgcatacccatttccagtggatgtcatttgtgttgctgagcagatagactacgtatttctcgcgtagtttgagcagcaagtcgagtttataggtcgggatgtctaccaaaaagctgttccaggcggcgtcgatctgtttgtcgcttaccatctttcccatcatctcccgaatgccgtcacggaattcggcaggagtgatcagtcctttctcctgctgcaaaaatattccgtccagctggtgggtgcagaacttttcttctatgttctggaacccgatctttttaaagttctcaatacaacgttcgcggtcgagatttatcagtacaccgcctaaatcaataagtaagtttttaattcctttacttttcattattttctcatttgtgaatactacgttgaacaaggcgaataagttctccaacccataacaccgtggacgaaacgcctataatcagaagccacgtctgccagtcgagcggctctgtgcggaatacagctccaccgaactgtacgatcagaaattgtccgaccagaatggccagaacaatcaactccatgccatacgatttggaaagtcccttgaatgccgagtcggtagtgccgaatacgcgggcattgaacaggttccagaattgcagcatgacaaagaaagtgaagaaaatggtgaggttatgtacatccataccttgcgcgctgtggtcgaaataataaatcattccgagcaatacggcgaggaagatcgtacctacacctaatatattgttacgcatcgctttgctgatgataaagtcagtgctgcggcgcggtttttcctgcatgacggtttcgctgggagggatggaagcgagggccagagcggcaaaagtatccataatcaggttcacccacagcatttgtgtcactgtcagcggaagttctgttccgatcatcgatcccaataacacgattagcaaggctacaaagttgatcgtcagctggaatacgatgaaacgctgaatatttttataaagagaacgtccccacatgacagcggtaccgatgctgttgaacgagtcgtcgagcagtgtgatgtcactggcttctttggctacggacgtacctgtacccattgacagaccgacttgggcatgattcagggcaggcgcatcgttcgtaccgtctccggttacggcgactacggctcctttttgttgaagcaactgcacaagacgttgtttgtccgtcgggcgggcgcgggacatgattttgaggtccatcacacggtccagcgcttcttcgtcactcagttcggcaaaggcaacaccggtgatacgattccggtcggtatctgtttccggttgccacagtccgatctgacgggcaatttctgtggcagttcccggtgtgtcaccggtaacgatcttgataccgataccagccgactggcatttggccacagcggcgggtacatccggacgaatcgggtctgagatggctacgactcctaagaaattaaggtcgttggcagataccagttccgtgcagtcattcggttcgttttctcctactattttgaaggcaaagccgagtgtgcgcattgccatattctgataattcagcaactgggcttctactgtcgaacgatattcgacggcatctacccgtcggccgtccagcacgacttccttacatttgccgagcacgatttcgggtgctccttttatataaagtactttctttccgatgatcggagactcgacgagagtcgccataaatttacgttcggtcgagaaggtgagctggtcgaggatgcgggcgtgttcacggagttcgagataatttcttccctgactgttgagccataataacagggcgacttcagtagggttaccgacacctttcggcttttcgcccgttgccgcttcttcgaggaaagcggttgagttggcgctgattccttctgcgacgagagcgctgatgtcatcatcgcccaggttgccgccattcttgattccgtagaaattgggttcgtgtacctgcatcaggttttgagtcagtgtacccgttttgtccgtacagatcacggtgatagctcccatcgtctcgcaggcgtgcattttccgtaccagattgttggtcgagagcatacggcgcatattcagggccaggctgagcgttacgctcatgggcaatccttcggggacggctactacaatcaaagtaacggccatcatgaaatatttgagggtccgttcgaaaaccggaagccactcgtgccagccgttcagtgaactgaaatcaaagtacaacagtacatcttttacaaagaagataaggaaggcaagtccggcaacggtaaaaccgattttaccgatcaggttcgcgagcttggtcaactgtatattcagaggggtcggttccagattttcttcggtgctctggcgtgctaccttgccgatttctgtggcatctcccacgtgcagtacgcgcatggtaccgtgcccgtccaccactgtcgttccgcgcatcactaagttggaggcataggttgcttcttcgtcaaagtccgcttcgatcacagtcttgttgattaccggttctccggtcaggttggattcgttcacttgcagggagatcgcttccagcagctggccgtcggcaggaatctcttcgcctgtttccaatatgataatatcgtctacaacgacgtctttacgtgggatttcctgtacgtgtccgttgcgaatcacttttacgagtgtttcttcattgacggcgttcagtaagtcgaattttttattggcatcatattcgaaaaagaagccgatgcctgtggccaacaagatggccgctatgattccgatagtttcggcatattcattttcgatgatggaaatgatcagtgaaaatacggcggctaccaacaatacccgcacaaccggatcttcaaacttttcgagatagagcttccataaggaaggacgcttggggggtgttaacagattgacaccgttcttttctctgctttgtaggacttcgtcatccgtaaggcctacatgataataatcgtctttttttgtagtactcatgcaaatacatgcgtttgattaggaccgcaaaaatacaacataaaattgtgataaaatgtttaattaaaactttttatgaagttactttattcgggacgtccgcaagtacgatagggaatcgtaaaccagaacgttgatcccttgccttctacggagtctgcgccgatttgcccctccaatttgtttacgatggttttagagatggaaagtcccagccccgttcctttcttgtctttgttcagctttacgaagcggccgaaaacttccggtagtttgtcggcagggattccggctccggtgtcggtgacataaaaataaagttcggtatctcttgcctcataaccgatgctgatcgttccctcctgcgtgaatttaatggcgttggtggtaaaattggagagcacctgcgcgacacggttccggtcggtctctatgctacaggagggaaggcttggttctgcaattatccggatgttttttcctgcgtcgttgactctcatttggaaaagctgccgcaagtcggatagtaacagattgatatctacctttgtatatacaaattccagtgtaccggcttctattttcgacatatccaggatatcgttcactagttgcagcagcagatcggcattcatctttatgatctcctgatattgtgccttttcttcttctgtattggcgctggcgagtacttctgcaaatcctgtgatggcgttgagaggcgtgcggatttcgtgactcatattggcaaggaaggcagacttcgaaaggtcggcattttctgctttctctttggcaagtgtcagttgcttttctgtttctttaagttgggtgatatcgtgcacggtaagtaccatattctcttcttcgttaaggagaaaataggaaccggatatcacggcgtcacattctacggatttcttttcggaagtaagcacgttcagagtagcttccagatcagtgaagcctcttctttgttcgaaagcctggcggatggcacaacgtatggggcaggagccacagtaagcatgagtaccgcagcctccttccgccgataatgcgttgcggcattgcaataagtcgcccactctcttttcttccagacctttctgagttccggtgagttgatagtagtttgtttttaatactttgaagtcgttatctattaataagatataggcatggacatttttcagaatggcgctggcgatgtggttggtatgttccagctttctggattcccggaatagtcgtttttgcatccgaagacattttctccgttcccatagatagctgagcaggaggattgcacatataattagcaggataggtagcaatgctattagcatgatgtaacttgttggttttgttctacaaatatgttgcaaagataacttttttactcgggataagaaataagttcgaacaatttgcattttatttgcgttatattatttagtaaaccaataaaaaaacgaacgttatgaaaaagtacatttgcacagtctgtgaatacatttacgaccccgcacaaggagatcccgagagcggaattgaaccgggaacagcatttgaagacattccggatgattggacttgtccactttgcggagtcggaaaagaggactttgaaccgtacgaaggataaaaaaattaagagagagaagagattattaaaaaaatgaccggaaagcagtgcttccggtcatttttgcgtttcagctcatgcagagctttttttgttcctgtttttatactgtcgggtcaggtgcttcctcatcgccgccgtcaccgccgccgtcggggttgggaggagtaggagtgtttccgttgtcaacgatctcgctgccggttaccagtttttgaatacttgcctttttcagcatatccttaaacttgtatcccggagtaaatacaattttcacccgacgaatcgtgtcggaatccactgctgcttccgtctcctgactttcgctgctgatgccgggacggaattgaccgaaatcacccagttgtacggaaatacctttgtttaagtttatattcagcgtatcgatcagtgcatcgagtacaaacttgaccgctccgctgggaaccattcccacttttgaaatctcatcacacaaatccttgaaattaaccgtattggtaataaaattctgtgctacatacttttcggttttctctttaccgaaaccaatcattctttttttaacgacatacctaagtgccataatcttttttgttttttaatagttagtaaatctgtttcttttgttttgtgatcacgatgcaaatgtatgtgtttccaaatgaactgccaagcaaaaaactcaaagtgcgttaataagtttcttcaactaaagaaatggtcagatgtttttttgttgttctcctttcatctttttccgattgaagattgtccttttcatatcatatccatacctttgtagattcaagaatccaacgtgactccggtggctcaggagccgggatgtccggacttgtcaataaatggatagacgaacagccgttgattatcgctgtttacatcgttttggcacttagttccttcggtatcattgttggaaaaatgatcgacttttgggtgtattgtctccgaaagaaaatgttttaaagtctctgtatatagatccctgttgcctctgcccgaagaaggttggaaacaggcttattcatctaatgagttcaattagggatatacgctatatgcttcaaatcattttcttcgcataaatcacctgttttcctgctccgtagcgcatcagtatccctttttcgataaaagcgttcagctcttttagtgcacgctttttgtcgtgaccggtcatatagcaataatcagtgcgagtcatgcaaggatatttttcaaggtgggcggttattaatgccagacattccgcttcgctacgtccgttacctttggggcgggtgagagattcggtacgttccaatctcatgtcataccctacttcccgcttgaattgtttggtcggtagatagttgatgttttttaatttgattgattgtgcacgcacatctttcttgtgcattacgggtggtccttgcagcgatacggagaaatagccgatctcgcctaattctacaatccagccgttagccagtaaatcttttaactcattttgaaaagactgcattgctcctgccagcaaactacggctgattcctgtaaatttgtgtacgcggtccagaaattcgtcctgaccgatagtccctttgggaacaatgcggggatgaaggggttgtttttctcctgtctgcttgatatcgggagtctcgtaaaggtcatactgtgcgctcataacttaagttgttttgttgtgttattaatgtttctgttcctataaactaaggaatccggcttaaatattaattcgttctactacagttccccgtgcggaccactagagtgggacacagggggaactatagttcttctttcgtgccactatagtggtacgaaagaagatttgcatacaaagttattaatattaaagagaaaagggttaaccttacgaggtttttgcgttaattatttatttccagccgcaattcctcttgcatcaccttgcttttcccatcctttgtgtatcggtacgacagcagaaatacattataagtatgaccgaaagattcctctaccttgaatgtattggggtatttggagtcaccgtctatctgagttacctcaatatccttgtacggctttatcgtgacatgattgttttcctccacttgcagtatgatggcggttttgttgatgtgatccacattgctttcaaaagactccgttccggctatcacgcgtacgctgttgtgggtgagtggaaacatcttcttgttacctgcggttgccatcccgtctgccagaccggtcattgaatagtaaacgttttcgccctgcgttgcataatcgttcttgataagtatctgatatagaatggtgtttttgctttcattaatctcgacaccggagatatccgtagcttttaatcctacgaagtaggtagaatccggcgacagtccttcgggacgtatcttgatcatggttctgcctgtccgttcgcccgcattgatctgaattttgtaatctacgatctcgtatttgtcactggacaggaatttggcatagcaggcttcatcgacgtcataaagagaccggttgtagaattccagtgaagtcaggtcttcttccagcccgatcaccatgtcttgtttcggggcatgggtgcctccggtgcaggctgcgatatatcctgtcgcctcttctccggtaggggacaaggtgaccacttcttcaaccgtgttatagtagtcactgctgatcagggccactacattcttgtacatttccttttcaaacagcgcatcgtcattgcatgacgaaagcgctgtcataagtgcgagtatcgttataaaatctcgtttcattttcttttttgttatttagattaataacccggattctggtcgagagaaggcagtcttctcatttcgttgcgtggtatgggcacccagacagaccttttgtcaaccaccctcgtcaggaatgaggaagaactagggatgacacgctggtagtaggtctctttggttgcaccgtcgggattcattccacggataggttcctgctctgtctcttcataaataccccagcggcggacatcatagaaacgtctgttttcccataaaaactctaccatacgttcgcgttctatctgtttctgtacttccggcgtactgttgagttgattggctgtcagccccggcagtccggccctgtagcggacttgattgaatgcttttttaatttcctctttatctctgctcatggtataaggctgaccgtccagttctacggtgtgggggccggtcaggttgttgagtgcctccgcatacgatagcaggatttccgcatagcggatgatgggataggctttctggatatggcgggctccggtgccggtccaggcatccatcggattattgtactttttgattacgtatccggtgatgggatagttgggcgaagtggctgtaacaccgccacgaccgtcttcatcctgatagtagtacttggctgtgtggttgttgagagtcgaactggacaatgcctgccatactgcctcattgaatcctatagatgcgtagaaccgcatttcacgattggcgtacatcttatatacaccggcgttgaggggatagccggaaaagttacgcggttcggaagtgaagcctgtctccgagtaatatccgtcggcggcggcttcttctttcgtacggccgtcgtccatcagataggcgtctaccactttctgagtgacgcagaaacgtccccatccacccatcgagggagggaaagaacctttgctgatggtttcgttgaggtacgtcgtgtttcttccccagatcaattccgggttgatggacgctacggcttcgccggtaaagatgtccgaataagatttgaaagggtctattccgtcggctccgttcgggtaggcgtcatagaaattggggtcggaagtgactccggcgggaagctccggcgtgttgtcgtcttttgcatacgtatagagcttgtacgctcccatatccatcacccgttttgcggcggcagcagctactgcccaccggctttcgtcatattgttgggagacataatgcacaccgtcggtcttgcgtttccagttgccgaaataggagctggcaacaggcccgccgttgaatagcgggctggcgtgtatcagtcgcaggcgggctaccagaccgagtgcggctcctttggtggggcgtccgaagtccagcgtagaaacatcctgaggcgagggcagcagccgtgccgctttttcgaactcctcacaagtatagttcattgtttcgtcataggtggccctggggcggtcgtagtattcgataggttcgttggtattcactacttcgtctcccagcaagattgccggaccgtaatcgaccaaaagattgtagtaggcgaaggcacggataaaacgtgtgtatccttccagtctgagccgttccgagtttgttaggtctttcgggcggtcgaggttttgcaggatgctgttgcacttacggatgattttgtaatacttgccccattggttcaggtttggggagccgtctccgaagaaatcctgtgtgatctttccgttggcgaaatccatgccgtgatagatattggccgttccgcttccggtcagtccgttaaatccttcgtcggtcgccatcggtcccggtgtgtacccgttacggatggtctgtgcctcatccgggaacatggctgccgctccccacatatacgcttccatatatcgggcattggtgaaaaccgagtcgatgttgaattcatcatcaaagtaattgtctatgtttaagaagttgctgcaagacgttaccaacatgactgcctgaaccaagaagaacattcttgctgttttttttattaaggatgttttcattttatcgtttatcgggtgatgtatttattagagattgacatataattgcagggaataggtggaagggatgggatatacacggccgttccagcgtgcctgttccggatcgaagagtttcactttatcccatacatggaggttgttacctacgaattggatatccagtgaagaaacacctatgcgtctcagaaatgctgctgcaagatggtaattcagggtgatttcctgcaggcgtatgtagcgtgaatcgccctgccaaaaggtggacaactggctgttgttgctgttatttccatattgcaggcgcgggaaacgcgcgtccttgttttcggcaagggatgggtcgatcccgtgtgcgatggcataatctctgggaatccatcggttggccggattggctgccagggtgagtacatttccggtattaccttcgaagaaaggcatatatcccattccgttgaggcgggtttcgtcgttcaccgttgtcttttgacctacatagaaaaaagaggtcttgccggttcccttgaacaatacacccagagtcagattcttgtagcggatttctgcccctagtccgtacatcagcagcgggtaagtgctgtgcgtcaacggcaccatgtccagcttgtccaccataccgtctccattgatatccttatatttgatgtcaccgggcattacttccccgaaagtctgcttgggactgtatttgatgtcatcttcgtccttaaatagtccgactgcctgatatccgcggatggaattgtatgggaaattattgtattctagatagggatactccagataagcctgctcccagttctgtactttatttttagagtacgtgaaattgccccgtaaggtgaagccgaaatcgggagtgaaatcctgcgtgaagctgatgtttccgtcggcaccgtaacttttcattttacccacattcgcgtatggattggagaccactcctacgaactcgggcacctgtacccgttgctggaaaataccgttacgctgatcatggaaaatatcgacaacgaaatcgatcttgttattaaacaactttccttcaatacccacattggacttgatggccttttcccacgccagattatcagctccgatacgtgtctcaccgataatctcgatgtcgggaacgccccaagctgatccggtgccttcgttcacttttgtaaggtaggggaagcggacgtcggtaatccggtcgttacctaccgaaccatacgaagcccttattttaagatagtcgagccaggggagcgcctcttgtataaacttgtagccggtaggtacccagcccaatgcgacggacgggaagaaaccgtattgtctgccgggctggaaattttcggaaccggtgtatccgaagttgacgtccagcaggtaagtatccttgtagccataagtaaaccggctggatactccctgatagcgcaagggaatggccgataaattacttgtagcgtcgtccgtgtctttagaatcgctgatgtaataatagaccagcgcggatgtccggtgatctgtaccgaaaagccggtcataattgagtgtagcctcaaagtggtatttgcggtactggcgggtggacttgctgtacgaggcttttttctcctgtacggtctcctgcatgatgagtgatccgtcgcttgctctgcccagcgcattgtagagggccggctgcacgcttctccgttcattgaagtagctgtggatatcgtatgctccctgtacacgtaatttaagcccgttgatcaattcggaaaagtcctgattgattgccaaagttgatttgcccttgtacacttcgttggcagcctttcccgtatggttgatcatgacataaggcgatgacagctctccggcaccgcgtccgggcagcataccattggaatattgggtggggatggacaatggagtaagccgcgactgtgctccccatatatattcggtattggctacgccgggctgattcaactgggagaggaatccgtccgaacccaaataaactttcgttgatttggtcaggttcacgtctagattgatacggtaattataggtgttgtagctgacgttcgaactgtatatactgttcttgtctaccttgtaggccgcactttcgtttttacctcccaggctcagaaaataacgtgccacatcgctgccgccacgtccgcttacataataagtgtgccgccagaatgttttgttgagtatctcatcctgccagtttacgttgggatagaggtcggggtcgagaccgtcgcgtataattcccatttccgtatcgtcatacaaaggtgtttcgttccgtactactctggcttcgtttgctaactgcgcatactcataagctcccagatatttcggcagacggttgaggacggacagcgtggtgttgaaacgtccggtaatctgaattttgcccgaaaggcctttcttggtgttgaccaatacgactccgttggctccccttactccgtacacggcagttgccgacgcgtctttcaggatggagaaactttcgacatcggcagggtcgatggtgttgaggtcgccttccagaccgtcaatcagtacaagggcactgctgttggctccgaacgtaccgataccacgtacccagaaatcggcgatattctgaccgggctcgccactgctctgcaaggaaatgacaccggctgccctgcctcccaacaagttactgatggaaggggagggggactggatatctttagtgctgaccgtcgtaatggcacctaccgaactgattttccgctgaacgtttcccagtgcgacgacaaccacttcatcaagggaattgttgtcttcaagcagtgtgaccgttaagtcggtttggggtttgatggccacatgctccgacggtttgaagccgataaaagaaaatatcattttgtctccataaaccactttcagcttgaaattaccgtcattgtcggttgtggtacctttggagggcttgtctttgatgtataccgatacgccgggcatggatagcttgtccttatccacgacagttcctgaaacggtaaattcctgaacttgctgcgcgaaggttgttgccgaaagcaataagcagaacgacattaagtataaaatctgtttgattttcattgtgagtttactttgttattcgataaccaatttgcgaatgcgtgcattaccccagtctgcaatgtaaatgtctccctgttcattgacagccactccccagggattcttgaataaggactctaccggtcctccgtccttgtatccggcgacgccgggctgtccggcaactgtcgtgacgatattgtcggcagatatcatgcggatgcaatggttgccatagtcggcaacgaacatattgccgtcgttgtcaaacttgatatccttgggataattgaacagggcatcttcaatcggaccgtcgcggaaagcgctgccgccgggagcattgagacgcttaaatccgcctgttccatccggatcgcggaggtcgagcaccgaaatcccttgtctgtatgcggtaggggcgttggagtgaagcgttatatacagaagccagggcttcgcaggattaatcgcctgtccgtattgtgatccgctgggaccttgatggataatgtgtccttcgaatgtgttgggatctattttagcgatctttccatcacggtatcgtgtatatagatagccgtcataagggcagaaggtgacgaaattcttgtatctgtcggcatctacgattgagttcagatccgactgtgagtattttatgttacgctggcggggataccaggcttcacgcggatcgaaggtaaacgtcacttctttgaccgactcgtgtgcggcggtcagcattccggtggcacggtccaccgttaagccgttggcatataagatacggttggcggcatctgcttcaatgagaggagtcacaatgttctgttgttcgtttatccgggcgattccaaatgtaccgccgtcacgccatgacatgaaaagattgccttcggcatccagatcaagatatttgccatatacctgagcggtggagagtgttccggcaaggaagctcgtttcaccgtttccggtgaccgtgctgaccaatgcctgtgtatgataagcatatgtttcttcgtaagcgacagaatcggtgtcgaccactacggagatacggggattatcgcccggaaggcgcggtacaatggcataaatacggcttccgcttgatgaaacgacggaggccctggcattgttgaaatatactttgattttactcacgtcggtgccgaagttttttccgtccagaagaattttgtcacgtgctccgccttctttgggatagaaggaggtcagtacaatcggttgatcggattggtgggctttctcggtgggctcactgtagctttcgcaactcgataaatagaagaaagctaccagcgagcaggctagggataagtaacgattcataaagtaataatttaaaattaaacgattatccgcatgtagttcgtcggatatcttgatattacatggctttgatggctggaactttatagtttgatggtgtaatccaaacctttatcgggggctacgatgaagttggtaacttcaaaattgcagtcgcctcctttgataccgttgtcaaacttcacagagattgtatgctgcgtatgtggtttcaatgtcatttcgcggaaatagaccaaagaaggatcatgtgcggtctttttcagtttcagtaccagatcggtagcgttcatgacagaaaatgtcacttctttttcggtgcgtttcacttcttttatgtctacgcatttttcaaagaagggacggaggatttcttcacgcccgatcaccagttcgcggtaataaacggcggtgcggcgattgtcgagtgcttcacggataccttccggagaacgttctttgacaaagacaaacgtcatcgtgcggtgttcgccttttgaaaaatcatagtctgtctggataggctggtggatatcggaagttcctatcatggtcagattcttgtccagacaccattgaatggcttcgggcatgaaaagaccaccattggctacttcaatgccgtgcatgcagccgtcattgtagagttgtgtatgctcaggccaccacagggtggagtccggctgctggcgtgcccagcccggatgattccagaagataaaggctccttgtttttttgcctcattgaaagcgtctttatatgccttttgttccaatggattggagtcgttcaggaagattgcattaaaatgtcccggaggcatggaacgggtgatttcactgcctctgattagaagtattcctaacttcttcgcctgcttctgagacagttcataagagcggttatgatctgctataatgtcttttttgtgtgggcggtactcaatatgttctgtcagagaaatggcatccagtccttctcgatatgcttcgtctacacgtacggtaggccataccagaccgtccgaaaaaacactgtgcatgtgaaagtcacattttaaagtagtgtacccgttcagattgggaacttgaatctcattgcggcgttgcgcttgtgcgctcattaaacacattgctgccagtgcaactcccatcaatacttttttaattttcatttcttttgctttaaattagagatttggttttcttttggaatgcctctgtccggtcattggaaaatggtactaaacataggcccctgtgtattttggcgcaaatgtatatgcaaaaaaaagacctgcaataggcgcagtaaaagcttaacgggaacttcacggaaaagaaatgtaatcgttaacgtctgtgaaaaatgtaatgcctttgtaaagtgtgagtgtccttgtaaacggacatgagttgttttgtctgtgtggaaataaaaaagaaatggatagccaatttatgcgttgcagcataaaattgactatccatttctttgattgagttcctctttatttaagaggctttcttctcttttacatcactgctggcttctaccacattcactacatagtcgcccaatttctcacattcggcgataatatccatataatagactcccatctgataatcatattccttgttgttgacatccagaatattctgatttttcagttggttacggtagttattgatttcgttttcgatgttgaaagacttgttgatatcaatgctttggtgttccggtttttctaccaccacaatcatttgtgcgagggcatcatcggtcagcttcatcatgaagtggatgtgctcgtattgcttttcggtaaagtcctgattcgtctggcgtttccggttgatggtgcgtgccaggttgtaacagctgtcgccgatactttcgatttccgtcacttcgcgcagcatggcacgtatctgcaacttactttcagaactcagacgcccttcggatacctgattcagataattggctatttcaagttccatgttgtcgctgatgttctcgtacttttctacgcggctgaacagcttgttaaagtcatcgtccttttcggtgtgcatcaagtcctgcaccattccgaacatacggtgggtacgttctgcaaacaggtggatttccttgcgtgcctgcaggatagaaagctccgcagtagaaagcataccgccggtgataaaccgaaggcgaggttcctcgtcttcctctttcgggtggattaatgcgcatacggtgcgttcgatcagtttcactccccatatcaggatacatacgttacagatattaaagatagagtggaaagcggacagtttataagaaatggctacttccggattattgctctggaagaaggtatccactacccagttgaccagttccatgaaaggatggaaaatgatcaatacccagatcacaccgaacacattaaaaacaaaatgggccaatgctgcccgcttagcctgtgtgttggctgttaatgcggcaagattggccgtgatggtagttccgatgttttcgcccagtacgagcgctgctcccagttccagactgatccagccgttggcgcacataattaatgtgattgccatcgtggcggctgaggcctgtacgatcatagtcagtatggtaccgatgaataagaacaggagaatggagaagaatcccatatccgtgtagttctgtacgaaggcgagcatttccggattggcgttcaggtcgggagcatttgctttcaggtaagaaagtcccatgaagaggaaggaaaaaccgaaaatgaattcaccgatggacttgcggttgctcttgccggagaagatgagcggaagggcgatggccagaagtggaagagcgaaagcggccatatcaaccttaaatccgaaaattgaaataatccatgccgtaaccgtcgtaccgatattggcacccatgatgacactgatggactcggccagtgtaagcaaaccggcgttgacgaaactgacgaccattactgttgtcgccgaggaggactggataagggctgtgatcaacactcctgttaatacccccgttacccgattggtggtcatagctgtcaggatacttcgtagcctgtcacctgcgactttttgtaagccctcgctcattatcttcatgccataaaggaagagccctaacgagcctatgagctttaaaaaatcataaaaagaatattccatctataataattttagtggttgtttgttctctatctgattactaagtatatttagtcccatgttattcaccttattaaaaagactacgatgaaacagatgttacaaatatgttgcaaaaataataatatttataaagaattccctatcggaagctcacttttggatatttattacggttttaatcttaattttccttatcaggtagtcagtgccaaggtgaataaccgttccgaaggtctcaatttcaaagtatataataacaaggatatagagtttctggatgtacgcgattcatccggtatgcgtacgtatgtgcggtcactctgctttgtcttgttcaaggctgtcagtgagctttttcccgaagggaagctgtttgtggaacatccggtatccaaaggttatttttgtaatctgcggatcggtcgccctattacattggaagatgtgacgcgtatcaaacagcgtatgcaggagattatcgcagaaaatatctcttatcaccgcatcgaatgccatacggctgaggctgtacgggtgttcagtgaacgcgggatgaatgataaggtgaggctgctcgaaacttccggttcactatatacctattattatatgctgggcgatacggtcgattattattatggtaatctgctccccagtaccggatatatcaagttgttcgacatcgtgaaatactatgatggcctcttgctgcgcattcccaataaagagaatccggatgtgctggaggaagtggtgaagcaggagaagatgctggatgtatttaaggagtatctcaactggagctatatcatgggacttaataacgccggcgactttaacctcgcctgcgaagaagggcacgctacggatttaatcaatgtagcggaagcattgcaggaaaagaaaatagcccagattgccgatacgatcttccatcgtggggaaaacggtgaccgggtgaaactgattttgatttccggtccgtcctcttcgggaaagaccacgttcagcaaacgtctttccatccagttgatgacgaacgggctcaaacccttcccgatctccttggacaattatttcgtagaccgtgaagagacacctctggatgaaaacggtaactatgattatgagtctctgtatgcgctcgatctggaattgtttaaccagcagttacaggctttgctgcgcggtgaggaagtggagcttccgcgttttaacttctctctggggaagaaggaatataaaggtgataaactgaaaattgaggataatacgattctcattctggaaggtattcatgcgttgaatccggaactgacaccgcatatcccggatgaaaagaagttcaaaatttatgtctcggcattgaccactatttctttggacgaccataactggattcctacaacagacaatcgtttgcttcgccgcattatccgcgactttaattatcggggatattcggcccgcgagactatctcccgctggcctagtgtgcgtgccggcgaagataaatggatattcccttatcaggagaatgcggatgtgatgttcaattcggcgctgttgtttgaatttgcagtgcttcgcctgcatgcggaacctattttgatgggtgttccgcgcaattgtccggaatattgtgaggcgtaccggttgctgaaattcattaaatatttcgttccggtgcaagataaggaaattcccccgacgtctttactcagggagtttttgggaggaagtagcttcaaatattagataataaatttatttaagagaattattttggaatttatagttattgtataaatataagttcgtaacttcgcgccgcaaaaaacaagcgtggcaatatgttgttgtattccagggaaaggaaataactgtaagattagacttaaataatgaacatttgtacgttctttccgtttatgttattacacagcaaaaaaagggtatatgatattttataacaatttactagcgaaatgctttttagggaaaaagaagcattattttatgataggagggttattctttactcggtacaagtatttggaagtttgggaagaaatggagttaagaatacatgcacggcaattctgggagtgttttttattgactttaatcccagcattgggtttatcactatggttctcatggtggtggatggtgcttccgttcatgacatatcacttgctttactggtttgaaaaagcaattagttctcattcggtttttaactgggaggcattgacctattgtggtgatgccgtttatatgagaaaaagaaaatcctatgcctggatgaaatggtatgggaagaaaacttttccgaaatcggaatgggaagattaaaagaatagagagacgttaaaactctcttgcggatttattcaggcacggcttacacagattaatatggtttcgattaaaacagaaccataaaaattctgtaagccgtgcctgaataatgatatgataacagttatttctgctttcggcggtttttccttttctactgcttttatttcagatgtttctttatccaaagcagatgtccgtactctgtgtcactggaagtccaatgttcattaataggagtgatcaatgcttctttcgggcaattcaatacattatatacaatgtagctggtagtcggtggacaaacgtcatcattgaatccccatgtcatataagtatccgccctgattaattgggcaaagttcaccacatcataataagccattgttctgatcttttcgggagtatccatatctacggtatttcggaagaaatgggggtaacctccggcacgaccggctttgtaacctgccatatcgcttagagccggatgattggctacgcaggccgttacccgctgatccagtccggcggtgacgagtgctaatgctcctccctggctgccgccttgaacgactacattctttccgtcccattccggtagtgaggtcagcaggtcgatgctgcggacacaggccagatatacccgtttcatgtaatagttgtcgcggctgtccagaccgttggacaggtagccgttttctctgccgttgaaagcggcactgatttctttgaattcttcttcgctcatttccgggttcagcccgtgaatctctatttcaaaacggatgcagccttgttcggtgtaatacttatgtcgcaaaggttccttgattgttttgattcctgcgcccggaggacatagtacgacagggtatttgccttctttcttcggatagaacaggtagccgtagatactttgtctgcgttggttcacctgcaacttgataagatagcagtctatttggtcggtcgagtatttctttacgtgctctttggtgtatgtcagcggaaatttggccagttccgccttttcgttctcccagaattgctgaaagtcggcaggcatggtggtatacggacggagcttttccggcgagaaacccactttgacgtgatgggagtatttctttccgtctacggtggtggtcaggcggcagtctcggaagcccggtttcttcatggtgcctacggggattgttgcctttccttttctcatgatgactgttcctttggtatcggcaggcatcatttctccgcctatttcgaaattaatcgctatgctatctcccggaatgccgtatttgtaaaactgtacttctacatttgcctgttctccagttttgtaaagccagtcggcatgatcgggtacggttacccaaaatacgtcactccggtagggattattttcggcaaccgcgagcagcgttgtcagtaacaacgctgctgatacgtaaaatcttctcatattcattttactgttcaatataactgtcattcgttttctcattctattttccatctgatcggtttgttaattacgccgcaatattaggaaagattagaaaaacagaggtcgataaaatgttctattaagtgtaaatttagagcaacttccactcgaatgtatgttttccggcttctaactctatgacacgttctcctttcacagtatcgggcacgtataaagtggcactgctgttggcaggaatcgtcacgctgtacacaacactttttttcttacgttcccattgggactgaatctctccgtacggagaacggtgtctggcctcaaactgctttaaatcactggggaagttggggcgcaggaggatatgtttaaaacccggctgctgtgggtcggggaagataccgcccaagcctttatagaaccatcctccgatttctccgaacatcatgtggttgtccgaaatgtcacgtgtagcattcaaatcccagttttcgagcagggtggtggctccgttggcaatccagcagccccatgacgggtaggtgtcttgtgcagctactttataagcggtttcggcttctccgttttcactcaaggcgttcagtatggctttggctcccaatacacccacatccagatggaaaccggcttcttccaccttcttcgccaggttgcgggctacttttgctttcatatccttggggacaataccccacatcagcggtacacttagttccgtctgaacaccgctggcgtatatgccggtttccctgttcagatatttgtcattgatcgcttgtctgatcttttccgcaagcgcctgataatgtttgtaatcttcctgcttgttgaacagctttgcggcattggccagtattttagtatctacatagaagtataccgatgaggtcagttctttggacgaatgcgatttcacaggaacccagtctcctcttccccatgaagtcagtccgcttgggctggtacggtctacgtagtctatatatcgtttgatgttttcgtagcagtcggctaataatttgctgtctccgtagaacagataaatattccagggaataatggcgattgtactcgtccagtccagaccgttgtccgtgccgtatccccatcctccggtcggaatgatgtcgggtaatactccgttgggttgctgttcgtcacggtggtcggctagccatttttcgtagactgtgatgccgtcataattatatagtgctgtttctatcgcaaaatgtccgtctcccgtccatccgtttttctcccgttgggggcaatcggtgggataccccatcagattggacagataggcgttgttggtagcccaccacaaccggtttacgagtgggtttgacgtgtttatctctcctttttgcagaacgtcgctatgaacgaaataagcagtcagactgttttgatcgagtgcgacaggcttactgcttgtcacttctacgtatctgaagcctttgtagttgaaccgtgccataaactcgtcttctccctttccgctcaggatgagaatatccgtctggaatgggtctttgtcatctaccggacgatggtatacgtcaatgtttgacatattcacccgtccgttgtcatagatgcgttcgccgtgtttgagccttactaccgttccttcttctccggataccttgatgcgggtcactccggacatatttctggcaaagtcgaatacatacgtcgtgtcgttcactttcttaagcgcttttgccggtattgtttctacgatacgaatcggttgtacctgctgggatacgacgttttgagaaggtacagctctgtaaccagcttccttccatttcgaatcgtcaaaatctgcagtattccagcctttctgttccaggcgggcgtcataatgttccgctgtatagatgctgttgaagatcaaggcccccgaagaagtcttccagtctctttcggagcggattacttctgtagtgccgtcttcgtaggtaattctcaggtccatgcaaaaagcggggcggttacgccacggtgcgcggtcaaagtctcagactgcttttgactgatggttgtaccagccattccccagcagtacgccaatcgcgtttttacctttctgaagttggttggtcacatcataagtcacatagaaattccgtctgtcgaaacgggtatacagcgggtctagccgatggtttccgattttctctccgttgatgtataattcgtataaaccggcgacggcgatgtacgctctggcggatttgactttcttttgagtgtcgaatgtttttctgaaatagggggcgggcttatagttgatgtctctgttgtcgccaatccatgcgccctgccagttctccattcccatcattccggtctcgaagctgttgatgtccgaagtagcctttttgccgtccttatcccatacattcactttccagtaatatttggtaaagggttgaagattcttttccggataggtgacaaggatttgatccgattcctttttccccgagttccagatttccccgttttcgttgtttgctttcagtgagtctgtgctgattattatctgataggcagtctgccgggctccttgtcgggcatcgtccagcatccacgacaatctgggattggcattgtcgatgcccagcggattgatcaggtggtcgcaatgaaggttcacgggcttgcattcttcttgcttttgtgcaagggtgggttgcagtgcacaacatgcaagtgcagtcactaaatatatttttttcattctgtctatttgttttcctttttaaccacaaactgatatgtaccggactgtagttctaatactgcctttccattcatgaaagtaaccgaagaaactccttccgctttcacggcagcttttccgctttcttctactacatagtcgagagtaggtaatagtaagtgaagagtggcggtggtgttggcaggtatcgtcacttggtaagaaaccgttccgtcattttcttttttccagctgctcttgatatctccataacaggaagggaacgaagcatttacccagtcaatccgttcctgaccggcggcaacttccggacggttgtccggaatcggctgtaatacgatgtgcttgaatcccggacgtgtttcgtcgatatctataccgcccattgtgcggtacatccattcggagactgctccatacgagtaatgattgaacgagttcatcgatacggggccaaaacctttctctttggtatacgaatcccagcgttcccagatagtggttgctccctggtctatgctatacagccaggaagggttgttccgttgcagcagtagatcgtaagccgtatttgattctccgaactggcttaatgtctgattcaggatggctgtacccacgaatcctgtgctcagacggttaccgttgccggtaatcttgcggaccagtgtttccactcctttcttccgtgcttcttctgtcgggaataaatccagtttcaaggcaagcagataggccgtctggctcttttgcttcaagtctccgtctgcatcgacgtagcgtgtctggaattctttcttgatttcctgtgccagctttctgtaagcctttgctttggaagcgtaggcatcacagtcgtccgttttcaatgcttccgaaattttggccatcaattgtgccgtatatgcgtagtagcatacactgacatagcggcgttcggtatcttcgtacgatagccagtcgccataatttgttccggcaccgttatagttataaccgtctcctttttgacgggacaggaactccatgtatttctccatagatgcataattgtcctgcaatatctttttgttgtcgtacatcagatagatagtccagggaacgatgacaccggcatcagcccaggctgcctgtccgtagcctacccatgagtgtggagctacatccggataggcgccgtcacttcgctgaccgtcacgcatatctctcatccatttttcgaagaaggcggatacattcgcattataagaagcggcacggcagaacacttgcgtgtctccggtccagcccagacgttcgtctctttgcgggcagtcggtagggatgctcagatagttgcctctttgtccccacatgacattgctgtataactgattgattgaccggctgctggtgacaaacgaagctccctcttcggtagcggaaccgaccacttcccctatcagggaaagtacctcgatgtcttcacttgccgttatctcacaatactgaaaaccgaagaaggtcatggacggatggaatgattcgccttccttgcttcctttcaggatatacttcaatgttgcttttgcacttctgaggttggcggtatatatacttccggcagggccgtcgtctccgcgtgatttatctcccgtgtcgttcagcatctcgccgaaacggagtttcatctccgttcccgatgcaccttttactttgaaccgaacccagccgaccatgttctgacctaagttgtagacggccgtttcacctttctttagccggataggagccggtttgtccgtaatactcactacattgattttaccgtctttttcaccttggtaaacagtagtggacaaagggatacggctcagatgcggacgtacctgaacggtgggaccggcaaaggcgattaactctcctttgaaatgagggttgacagccgtcttgttccagttggcagtattatatccgggcttcgtccatgcactttcttttcgggcgtcataagtttctccgtggtagatgtctcccattcgtatggcaccgtccatggatgacagccaggaaaggtccgttactaccgtttccgaagtgccgtccgtatatttcagtaatatctttgcgatgaatcctacttcgtgactgccatactctccgtggcagacgtcactgttccaccagccggaggatacttgggcgccgactgcgttttctcctttccggagcaaatcggtgatgtcatacgtctgatagtgggctgttttgctgaaatccgtccattccggcttcaattcgtcatagcgtatgctgccgtcttccatcttgtttcctacccgttgtccgttgataaacaaatcatagacgcccagagccgaactgtagatgcgggcggatgcaatcttcttttttgccttgaattctttacggaacatgggtactccgctcatgtcaacctgcaatacccgataatcgccggaaccggaaaccatattcagtttacgattacctcccacagatacgatttctccgccttcaaaagcggactgaggtttctcgaaatcctctttcagaacgactttggcttcttccttgtcgcctttctgttcgtactctgtcagtacgatattgtcaaacatggccgtttcgttggtgttattccctctgaatgcccggaagccgatatatccattcgatagtttggaatcggtgtcggtataggtatccaccagtaccttgtcaatataagtcttgaccactccatcttttgcttcgattgccagatggtgttctttattcagcaagtcggatttagtgaagaatttgccgatcggagtatccgaactttgcaggcgtcccctgtcataaatatgtcttctgatcaaaggctctttttcattgtccagcgtattgacagaccacatgaatacgttggaagcatcgcgtgcgccgaaaagaacggatgcgttgccggaagtcagtgtgacatccatttccagcagcattcgtgcctttgtctgtttcttgtcttccggattgattttggaattcttgtttatttgagttgccttgatccattgcgctcccgaccatccgtcggacagcagtcctgtttcgaagaaagccttttccgtcgaagtctcttctccggttttgttgttccacacggttactttccaataatagcgggtggaaggggtgagagccggtcctgcataacagatgtgcaatgattcgtcagatgccacctttccggaagtccagaccggatttagacaggctgcatcggtcgctaccgtgatttgataggctgtttgtctgactcctctttccgctgactctagttgccagctgaatcggggagctgttatgtccagcccgataggattggtcagatattcaacctgtagttttttgattgctgcattcgtgggcagcagaaaaagaatagataaaagtaacaaagtagttcgtgccattagtttaaagtattaatagtttgttatgatgggggatacttgcaaatatagtgcttattgtcttggatagacataagaattttgacactaatacttaaaaatatgaccgtccccttgaaataataaatgcctatacttgttgtagtacaggcatttatcgttttatgtgaattccggtgccatctgtgaataaagcaggggttatcttaaagcttccacttcttcgggtgtcagcggaattttcttgccgagtcggcgggcacctgtctccgtgatgagataatcttcttcgttgcggataccgccgaagtctttgtaagtttccactttgtcgtaattgataaaatcggtgaacttcttttctgctttccacatatcaatcagttcggggatgaagtaaatgcccggttctacggtatgtacgaatcccggttccagtggaatggcgaggcgttgcgacttgcgtccgaactgcgtgctcttcggctgaccgttgtatcctacccatatctcacccagattttccatatcgtgaacatccagtcccatcatgtgtcctaatccgtgcggatagaacagggcatgcgcgccttcgcggacagcatcttccgtatttcctttcattagtccgagagttttcatgccgtctaccatgacgcgggcggacaattcgtatacatccatataaggaatgcccggacgaagcgccttgacagattccagatgcatcgcattctggatttcgtaaacttcgcgctggcgggttgtaaatttcttatccgcaggaatcgttgacgacatatcgcctgcataacccgactcgacttccgcacctgcgtcaatcaggaacagatcgcccggtttcactttatttccgtgataatggttgtgcagcgtctgcccgttgatggtggcgatcgttgcaaacgacagttcgcagttgttggactctgccacgcgattcatttccgctactacttcatattcgtacattcccggacgaagcaccttcatggcggtgatgtgcatatcggcagtcacgtcacaggctttttctatttctacgatttcttccgccgacttgtagttgcgctgagctatgacggcacggatgaaaggtacggaaccttcctgacgtgcaggtggtattccgagccagtccatcagtttcagtttatgttcggggcggtagggaggaagataatgaattgcttttccactctggacgcatttgtgcagatagccgacgatatcggcggaagccatcatttccctgatgccgacacgttcgcatttttcgcgtaacgtaggctgtgagcccatccatacgatggcatcgatggataattcgtcaccgaaaataatttctttgtcttcgtcaatatcgatgatggccgaaagtccggcacacgaaagaccgaaataataaagaaaagtggagtcctgacgataacggaacgtgttatcctcataattcagcccgcactcgtcatttcccagaaataacaaaactccggagcctaaattctttttcagcagggctctgcgctgcatatacgtctctttggcaaacatactgtcctaatttttaagttcgtgcaacaaagatataataaagaatgaaatattacataatcaacaagtgacaattaagctacgacttacatagaaaattctttttctaattcctttgttacagctctgttgataaattcattaatagtagtacctgcgttagcggcggctgttgctaccattccgtgcaggtcggaaggcatacgtaggactaattttccactatacggtttacttggctccactccacgatctttgcaacttgccaaatagtcgtcaatagccccttcaaagtcactctttaattcactgatggtttcaccttcgtaagtgatgcaatcttttttaagaccgagaactttaccgaacaggcaattatcttcttcgttgtattctacgctaccagcgtaacctttgtactttaactgtcccataattactttattctttactttgttcatatttctcaatcagcttgttctcacggatataagcaagtaactgcttcatcacgtatcctttaataatattagacggatgcggcttatgcatgatatacgagcttttgttatcagcgcttataaattcaacccgtgaaccagaagtatttcctttttttccttcactataaccaaataacccaaataaccgttttacttcatcgtaagtgaagttcttaggcaatgtaaggaaacgttctattagcttttcttttgtacccataatgtataatggtttatgcaaagatactaaatttagtatcatgctcaagtgctggcttttctttttattaattgatactgatatttaacattaaagcaaagtagataacagtgattttgaacttaatttgttgtaaattaagatttaatctcttatcaatctgtgttcttttctacaatgattttaggtaatacaatcttaacctcttgtttgtctttccgtctttcccaatatactacgaagttgacagctgcctctttaagtctatatccttttttatctaactcttcaagtgtattttggaattttctggagaaacgtaatatctcgttaccatgaaagtctgtacagccatttgcttttagctgtaaaggcattccactttttagattatatatagcggcctgacaatatgaggaaataaatgtgtctagatttaaatctttgtgagttaataaataacatagtctttgaggtataggatattgattgttgtcagtccgaatttctgttagtccattgacaatattattaaaataatgtccatttagatggatagatatgttttgttttgcacgagtgatggcaacatatatttcacgtttcttttcatctgagagtgagttaccattgttaaggagtaaaaagacattgtcgaactcctttccttttgctttgtggatggtggagacaataactgtttcaccttgagctgaataaaagtcttctagattggattcaaatagataggttttccagtccgacaaatactttcgggagtagatttgttcgaaagtaagtatgatggaacgacatatttcccacgaagaagtattgccgaattcgtatttcagctttctcttagctacttcccatcgttcattgtcgataatatgggtatccttagtaagatttagtacttgggtgaaatagcggatttcatttaaatcgcctaaataaaaattactgctattcgtttgaactagtttggtggctataccctgttcctgtaagaggcatgatataaaaactgcttcttcgtttgttttggtgagtacaccagtcgtgcctgcaagcgggctttcaactacatcctttattaaaggaataattaaattgtttgatgggtagtaggtgatacgaagcgaaccattctccggttgatgagagacaataggattgtgcttcatccgatgaggtatttgattgacaaatgaatttgcgaatgtcacaagattgcttttacttctgaagttttcatataactcataaaagcgtgcttggtatttgctgatgaggtattgcatatatttggagtctgatttacgaaaggaatagatgttttgatcatcatctcctacagctatgacctttagagtttcatttttatctataagagcagtaatgagattgaattcatcctctgtcatatcttgtgcttcatcaattacaagtacgcttttggtgatacggcttatttcaacttcatcattcttgattttgtctattgtatctttaatgacagattctgatttctcaatcgaacctagtttgcctaataagtcgaaacaataggagtgaaaggtctttatttcaatgtaacctactgcatttcctattaaatcatgaagcctttttcggaattcactagctgctgctcgtgagaaggtaagcatgagtaactgttcatgttttacgtcttccattaataacagagaagccagtttatgtacgagtaaacgggttttgccacttcccggaccagctgcgacaacaatgtgtcccggctgattgtcattaataatatttagttggctttcggatagctctccgaacaattgcttgtatttggttggagtgattcgtctgctaatctcttcttttcgtcctcctggaaaatatttttgaatgaaagacatattgttcaacctgaaatagtcatcaacgaatcgctgtgcttcttggttgttttggctcatttttcgtgcatattctcctacaatgtgaatcttttgtgttttgttactatagaatttttctagtttgcgataatcgtcctgcttataccgtatatttgtgtctcccaatcgtttaatcgtcattcggttgtatatgactagaaatccaccttctatttgcagagctcctatccgggaaaggtaaaaaagcgtatcttctatatcttcgagagtagtcagttcttgaaacaatacttgttgtttttcatagctttcttttaattctactacggaaaattcaacgagaatttcatctcttttagctgaaccagtttctgattcagttttttcatataggtaatttattataaactcggataaaagatgtctgtcctttgtttttttatcaaatgaagtattggaggatgaacaccgataaatagcacgatagtttctattatcatctttgtgtgaacgtataatccagttcttttcacaccagaaatttatgagtgtttttaatttgtcaagactaatctcttttcttatttcaatttctgcttgttcacgtaattctttcaagttaaataacttctcttcttcattaaactgtgtgaggaggaaatcttccaaacagttgtatagtctggtgatttcaagagaacggtttcgctgctcttttttgattatataagcagtgagatcctgattgtcagccaatatcttttcgtcacggagtaaagttattatctggatgacttcatcattggggatacctaaatgatcggagatataatcaatacgggcctccggtgcttcatcatttgcatactttcgacttttggttgatatgagctttttaatgatgcgaatagcttgcgttttttgtttttcattgaagcgaggagacaggttaattttatcaatagcttcctgaactgtatttgccaatatactgtcggcaaatacacgtggaatattttgtccacggcgtaaatatccggattcttcaagtgctgctatggccgtggtcacacgagtttctatgttggtgacattctcatcccatccggctctacgagctatctctaaagctgactgcgaaacagtcgggcgcaagcgagtgttattttttatagctttccagacctgttgtatttctccgatatgtaacttcgtttgattaagcaggatgaaatgctttgttaaatcttcttcgtcaaaaagaatataacaagaggcttcgatattctcgtctcggccagctctgcccgattcctgtacataattctcaagtgaatcggatatttcataatggactacgagtcctacatcttttttgtctactcccattccgaaagcagaagtggctaccataatttgtacgatgccggagatgaaatcgttttggttttctgttttatccttaatgtccatttttccatggaaagctctaacggaaaaaccgtcttgctttaaacgcgctgcgagggtggaagctgttcttgtgcgtgctacataaataattgtcgggcatttctttaactcaataatctcccttagacacgtatatttctcttcttgctgacttttttggaatacttgatattcaaggttggtccggtaactgttggagcgaaataattctaactgtatatttagcttttctttgaaataaatggaaatatcctcaatcacttcctgtttggctgttgctgtgaaacaagagacgggtattggttgtaccaaaccttttttcagttgtagttgtctgatataatcacctatgtagagatagtcaacacggaaatcttgtccccatgaagaaaaacaatgtgcttcatcaattacaaaacgaacaattttacgtcccaataataatctttcaattgattttgaccgtaatgattcgggagatatataaagaatggaagcagttccgttttcaactctttcaaaagattcagaacgttctataggatcaagcaaaccattgatagtgactgcatctgtaatggaatattttcgtaggttgtccacttgatctttcattaaagactgtagaggagaaataactactgtgagtcctttaactaattctccactcattaatgccgggacttgaaaagtgatagattttcctcctcctgtagggaagattgcgaggagtgatttaccttttaaagcagcttttactgcgtcttcttgcaaagattgattgttgtaagttcgataagaatcaaaaccaaagaaagtttttaatcctttatgtgcgtcaaaaacctgattacaaaaatcacatccagtcaagcaaggagtattacgtaatgcatacatgattgactctactttcgggtgcgaatgcagtacccaaggtggggtaatagagtagcgatctttacaattgattagggcaaggcaataagctaattcgacaggagattggttgatatagtttgtaagtggggcatacttacataaatcaccgtcaaatctgcggtttatgatagcatctaaatcctcctgctgcttttcgtagttataagtaatataatcaaaaaagtaaccgaactctttggtatgatataatagtgcaaaatagatatcctttaaatctttgtccagacaattaaatgcttctacctcagagaggaatagctcttgtgctttgattgaatcatttagtgggttgctgaggctttctgtttgtaatttgtcgtctttcaataaatgatggtaaggtcttgccggaaataataaaggcgagagatagagagtgtctattactttggggtgtttgtatccgacttgcgcaaataaaggcgaaatatattgaagatcatgattcaagatgttatgtccgcctatatattctgtttgtgcaatgaattgcattaaatctttgggcgagttgcaatgaaaagaagctccgtcatggcgaatagctcctatatccaaaatctgacgattagttggattaatttcaaggtcaataaaggtgatatttgtcatgcctgttttttttaatcaactgttcaaagataatactaatttacaaaagtataatgaacttcatagaataaatatttgtttaatttataaattactgtgataggattaaaaataatcccactaatctgtgtaatctctcgttaaaaagttacttttgtagcgagaaacagtagaaagcaaaaacgaatatggcacaaggttcccgtcaaatacaatcgcaggcgcaacagcagatacaaacgctctcgccacagcagattctggtcgtgaagttgttggagcttcccgcagtcgagctggaagaccgtatccatgctgaactattggaaaatccggcgcttgaagaaggcaaagaagacgctgctacagatgaatatgccgatggcgtcagtccggaagaaggcatggataacgatgccaatgattatgattctttaagtgattatctcaccgaagacgatatccccgactataaattgcaggaaaacaaccgctcgagggacgagcaggcggaagatattcctttctccgacgccacctctttttatgaaatcctgaaagaacaactccgtgaacgtaacctgaccgagcaccagtgcgaactggtggaatatctgatcggttcgttggacgatgacggactgctccgtaaatcgctggaaagtatctgtgacgaactggctatctacgccggtatcgaatctacggaagaagaactggaagaggctctgtgcatcctgcaggattttgacccggcaggtatcggagcacgcaaccttcaggaatgtctgatgatacagattctgcgcaagaagagcgaagagaagaagccgtcaccgatattgaacctggaagagcgcatcatcagtgactgttatgaagaatttacccggaagcactgggagaaaatcattaagaaactggatgtcagagaagagactttcaatgaggcgattgccgaaataaccaagttgaatccccgtccgggtgcttcgctcggagaaaccatcggaagaaacctacagcagattgttcccgattttctggtggatacctacgatgacggaacgattaacgtaagcctgaataaccgcaatgttcccgaactccggatgagccgcgactttaccgagatggtggaggagcataccaaaaataaggcgaaccagtccaaagagtcgaaagaagccatgatgttcctgaaacagaagatggatgcggcacaaggatttatcgatgcggtgaagcagcggcagaatacattgatgactaccatgcaggcgattatcgacttacagcgtcctttcttcctcgaaggcgacgagtcattgctgaaaccgatgattctcaaagatgtggcagaacgtaccggactggatatctctacgatttcccgtgtcagtaacagcaaatacgtacagaccaacttcggcatctatccgcttaaattcttcttcagcgatggctatacgacggaagacggagaggaaatgtccgtacgcgagatacgtaagattctgaaagaatgcattgacggagaagacaaaaagaaaccgctgacagatgacgaactggcggatatcttgaaggaaaaaggctatcctatcgcccgccgtacggtggcgaaataccgtcagcagttgaatataccggtggcaagactgagaaagtgagtttaaagtattaactataaagtattaagtattaggtgctgatggataaagaaaaagagcatatcatagcggataaaacaatgttgcgggtggcacgggtcacctccatcgtgtttactccattttctataccgtttctggcgtttctggtgttattcctgttttcttatctccgtatcatgccgatactttataagggaattgtgttgggaatcgtttactgcttcaccatactgacgcccactatcaccattttcctgttccggaagatcaacgggtttgcccgtcaggaactgagtgagcgtaagaaacgttatgtacctatcctgctgactatcatttcgtatgtgttctgcctgctgatgatgcggaaactgaatattccctggtatatgaccggaatcatttttgtttccctggtgatatcgatcatctgcattctggtcaatctgaaatggaaactgagcgaacacatggcggggatgggcggtattatcggcggactggtttcgttcagtgcgctgttcagctataatccggtagtgtggttgtgcctgtttattctgattgcaggcatattgggctcggcgcggattgtgctggggcatcacaccttgggcgaggtcctttccggttttgtagtcgggctggtctgctcttttttgatactccatccggcgtacaaccttatattcagagtatttttattttaaaaacaatataaatcctaaaaactaattattatgaactttccacagaacttgaagtacacgaatgaacacgagtggattcgcgtagaaggagacatcgcttacgtaggtatcacagattacgcacaggaacaattgggcgatattgtattcgttgatattcctaccgtaggagaaacgttggaagccggagaaactttcggaacgattgaagtggtaaagaccatttccgatcttttcttaccgttggcaggcgagatactcgaacagaacgaagctttggaagaaaatccggagctggtaaacaaagatccttacggcgaaggctggctgatcaagatgaagcctgctgatgccagtgctgcggaagacctgctcgatgccgaagcatacaaggcagtggtcaacggctgaatttgaataaacagtacttctgcctcaatggaagctgactaaatagtcgttagtaactccaactctcctcctgctggaaggaggagtccccgtagggggggtggtaggtaaatgaatgtatgtaataacttttagattagatgaaaatgactccaattgtaagtatcatcatgggtagcacgtccgaccttcctgttatggagaaggctgcgcaactgctgaatgatatgcatgtaccgttcgaaatgaacgccctttctgctcaccgcacgccggaggctgtggaagagtttgccaaaaatgcccgtagccgtggcattaaagtaatcatcgctgctgccggaatggctgccgcccttccgggtgtcatcgcagccaacacaacgcttccggtgatcggagtacctgtaaaaggctctgtgctcgacggtgtagacgctctgtactccatcattcagatgcctccgggcattcctgtggctacggttgctatcaatggagcgatgaatgcggctatccttgccattcagatgcttgcgttgagcgatgcggcattggctgaggcttttgctgcttacaaagaaggactgaaaaagaaaatcgtaaaggcaaacgaagaactgaaagaagtgaagttcgaatataaaactaattaattgacaattgacaattgacaattgacaatgggctggcgctgtgggtgctttgttgagcttgttgttgattctcgattctcaattgtcaattgtcaactgtcaattgtcaattgaaaagatggatttattcaattactttcgaagagaaacatccgaagtaaatattggggctgtacctttgggcggccccaatcctattcgtatccagtcgatgacgaacacgtccactatggatacagaagcttgtgtggaacaagccaaacgcatcgtcgatgccggcggcgagtatgtacgactgaccacgcagggcgtcaaggaagcggaaaatctgatgaatatcaatatcgagctacgaagtcagggatatatggttccgttggtggccgatgtgcattttaatccgaaagtggccgatgtagcagctcaatatgcagaaaaggtacggatcaatccgggcaactatgtagatgcagcgcgtacttttaagaaactggaatataccgacgaggagtatgcgcaggagatacagaagattcacgaccgctttgtgccgtttctgaatatctgtaaggagaatcatacggctatccgcatcggagtcaatcacggttccctatccgaccgtatcatgtcccgctacggagacactcccgaagggatggtggaatcctgcatggaattcctgcgtatttgtgtggcggaacatttcacggatgtggtgatttcgatcaaggcttccaatacggtggtgatggtgaagaccgtccgcttgcttgttgccgtgatggaacaggagggaatgtcatttcccctgcatcttggagtgacggaggccggagacggagaagacggacgtataaaatctgccttgggcatcggtgcgctgctttgtgacggattgggagatacgattcgtgtgtcgcttagtgaggctcccgaagcggaaattcccgtagcgcgcaagctggtggattatgttctgttgaggcaggatcatccctatatcccgggtatggaggcaccggaatttaattatctttctccttcgcgccgcaagacgcgggcagtgcggaatatcgggggcgaacatctccctgtcgttattgccgaccgcatggatgggaagacggaagtcaatccgcagtttactccggattatatctatgccggaagaacgttgcccgaacagcgggaagaaggagtggaatatatccttgatgccgatgtatgggaaggggaggccggaacatggcctgctttcaatcatgcgcagttgccgttgatgggcgagtgcggtgcagaactgaaattcctgtttatgccttacatggcgcaaacggatgaagtgattgcctgtcttaaggtgcatcccgaagttgtggttatttctcagagcaatcatccgaaccgcttgggcgagcaccgtgcattggtgcatcaactcatgacggaaggtctggagaatccggttgttttcttccagcattatgcggaggacgaggcggaagatttgcagattaagtccgccgttgatatgggagcattgatttttgacggtttatgtgacgggattttcctgttcaatcaaggaagtctgagtcatgcggtagtagatgctactgccttcggtatcttgcaggcaggacgcacccgtacttctaaaacggaatatatttcttgtccgggctgcggtcgtacgctttatgatctggaaaagacaattgcgcgtatcaaggcggctacctcacatctgaaaggcttgaaaatcggcatcatgggatgtatcgtcaacggtcccggtgagatggcggatgccgactacggctatgtaggtgccggacgcggaaaaatcagcctttataaaggtaaagtttgtgtagagaagaacatacccgaagaagaggcggtggaacggttgctggaatttatccgcaatgaccggaaagaactggaactttaatcagtaatacttttaaatagttaagacaggagttgttttaagtttgcttaaggcaactcctgtcttttattatagtatacacaaacatttatccgtacaaggggaagataaccacctgggattaatagtaggagaaccgttcattaggctattatgtaggttagattaatgtattccgtcagtaagaagaagtcatttcacatacatgggcccatcagtccacgtacgtggtctattgggttcatgtacgtgaaccgaacggtccacgtacgtgaaacgaatacatgaaacgtactaaatatattagtcaaaccttgttagcttgttaaggttactatgctatggcttaatgcaggcggcatagatgaagctatatatggcataaacaacgcacattcacgctgaaaatggagtttttaacacatgctgccaatgcttctgaatagtctgttttatagttgttaatcagcgtgttaatcctgtttcttattaaaagcaggtgataatagaaaccagaaaaagttctattatcaccttattatcaccacctattatcaccattactgccttaataataaggaacttatcctttaaaagtgacaagtgacaataacaaagtgttttattaactctagtgagaaacggttggaagcctaagggcatttttcaaccattgcatacagcgcatgacgaaagattcgtgatgcaggttttgggtttgttcttctatctgtatttccatctttcgctgcaattcttccagcaatgcttttcttgttttccgtattatttcctgttctttttcatgtgttatttcttgttcgtccttcgaatgccttttctgattatcccgaagcatgtcaagttggtcgtgcaatattttgtttttcaactgcaacctttggcataattcatcataatcccgtattttatgttctaatatatcccgttccatttttagccggagattgacagactctttggctgtaaacgctccgttattaatcttgcgtcgcaattcgcatacgatagaacggaattctattgctatttcttccggtgtttgcttgtgaaagtcagccagacgttttagcttgtgtccttttacgatggagcagaagatgctacgccttttgttatctataatttgcagtgccaatgctttaacgactatcgggtagaggttgaaacattcgctctgcaagcggatgtagaattctgcttcttcatatttgagcatctcgttcctgatagctttatccatattccggatgagcttttcgtgattggttcttttaagtgccagtgtttcttctaaatccatatcgctttcgttgttttgattgtcttctaaaaacgactgggcgtccatgcactctccttaaaaaaaggatgtggggttggggtaaaaaaggaaaggcacggacgctgttgtcgtttcactatccacacataggtgttggctagaccctatcaagaatagtgataaacaacagacatccatgccaattttatatatagggattctatataacaattagcatggaatatctgttgcatcacttctccttgattttaaaagtaagccaactttatgtgcgaagaagtaatacgtttatattccaatatttataaaaaacatctttcccctacattcacgtcacgctgacggggagaaaggtgtatgcaaagataagtgtttattctgaaatctcaacgaaaagcggggatttcttcacatacgactatctccatgccacgatagacgaccactattttgtggagcgtcgttgtgccgatagctttttgtactgtttcgctggcggcatagctgaatcggattcaagcaagtatcctgcttcgagaaggaaaaattaaagtttggccgttggctggatgtggtggattatgagttattgatttagttttctggtgacttatcattcattttttcttcaagtagtttgagtagttcgttgcaagcagtatccatgtattctttgccttcttctgccaaaacatccggattataaggcagtttcacagaattgggaatgatatcacagcttacttcacatccatctgacaagtattgaatataaatacagaatgggaaatcaaaagtattatcgcctgcatatcggcaatgattaaaatgaaaagttactgcatcatattttagcttaaagtagtcaacctgagatttcttggataaacgtatgatatcctctacaaagctatactcttttgacttagtatataaaatgtgtgactggataattggctcatcaggattgggtgtatttatttttctagccatgttccaagtgggagtgttggttataaatgttctgtcaaatagcttttggagtccactgatcttttgctccacataaacggccaattcaaaaaaagcacttcttgcctgttctacggaacgactgcttttttcgatagctttatctgagtatctacgctgtaacatcgctattttcttatcgaaatcaccttcttcctctatgctttctcccttggcggctttgattgcgagtgtcagactgcgtatcaagcaactgctcaaatagttgacgaatggtaatatatcattcaaagtggcattagcaccatctgaaggggttaatcctgcttctacatcacattgatggaggatgttcagatagttggatttatcttcggagtgaataacgatcatcggatatccataacggtgcagcacaaagtttactaataaacgggcaatgcgtccgttgccatcttcgaagggatgaatgcggatataacggtaatgaagcaacgccgccaattcaacaggagtcagtatttctttgtctgcttccaggttgtaccagtctaccaagctcgtcataaatgccggagtttcttcgggcgaagcataactgaaaacttctcctgttgcggtcagtacggaattggggcgtgatttatattcgcctacttttatctgcatacggatgtcttgtccgtcgggtgttttggcgttcttccaatagtcctgcacaaggatggtacggttcaactcgcgaataaaactttcagtcagcggacgttctttgtcctgcgcctcttgctttatcatttccagtcctacgttgtgagctttcatctcttcataatctttcaagctggcattacccgaagtttcaccgaacattaataatagttttgtttgtccgtatgtcagtgtatttccttccaagtggttagagttataattaaactctaacttgaatttatcattccaacgtttcaggtcctcaggcttaagaggctgaagcgatttccattcgctatataattgttttatattacttattcccatttatatatgtggggctgtgcccattttttttgtttagatacaaaaataggaaactttctttatatgccaatcccttgaacgatatttatttggagattggctgtggcgtcttcttttgcaactttgttgcacgaatcattcgctacctttgcagcagataaaaaagaaagaatgattatgggacattgtagttgttgcgcacatacacacgaatgtgcacccgaaaaacatattgaaaagaaagaatcaatattcgctgaatattggaaagtgggactttcatttatcctgttgataagtggaatcatcatgaacgctttggagttacctttcttccgtgaaggatatttctctctgatatggtatgtcgtggcttatcttccggtcggcctgcccgttatgaaagaggcttgggagagtataaaggataaggactatttcagtgagtttacgctgatgtttgtagctacgcttggagcgttttatatcggtgaatatccggagggagtagcggtgatgttgttttactccgtcggagaactgtttcaggaaaaggctgttgataaggcgaagcgtaatatcggagctctgctggatgtccgtccggaagaagcggcggtagtcagagatgaacgtgtcgttattgagaatcctcaaaacgtaaaagtaggagaaacaattgaaataaagacaggaggaagagttcctttggatggaatgatgctcaatgaggtagctgctttcaatacggcggcattgacaggtgagagtgtgccccgaagtatccggatgggtgaggaagtacttgccggaatgattgttaccgataaagtaatccgtatcaaggtgatcagaccttttgataaaagtgctcttgcccgtattctggaacttgttcagaatgcctccgaacgaaaagcaccggcagaactgtttatccgtaaatttgcccgtgtttatactccgattgtgatagggctggcggttctgattgttttactgccgtttatttattccttgatcactccccagttcttatttacttttaatgactggctgtacagggctttggtctttcttgtgatttcatgcccgtgcgctttggtggtcagtattccgttaggatacttcggaggcatcggggcagcttcccggttgggaattttatttaaaggtggaaattatctggatgctgttacgaagattaatacagtcgtgtttgataagacgggaacccttactaaaggtacgtttgaagtgcagtcttgtaactgtgaatccggtgtatccgaagaagaattaatccggatgatagcctcggtagaaagcagcagtacacatcccattgctaaggctgtggtgaattatgccggacggcgggatatcgagctttcctctgtaaccgacagtaaggagtatgcaggtctcggactggaagctgccgtaaatggaattcaggttttggcaggtaatgggcgtttgctttcaaaatttcagatagaatatccgcccgaacttctttccattacagatacgatcgttgtctgtgcgataggaaacaagtatgccggttatctgctattatccgacagtctgaaagaggatgcaaagatcgccattcagaacctgaaagcattgggaattcaaaacattcagatattatccggtgataaacaaagtattgttagtaactttgcagagaagctgggtatttcggaagcctatggtgatctgctccccgatgggaaagtgaagcatttggaagaattgcgccaacatacggagaaccaggttgcctttgtgggcgacggcatgaatgatgctccggtactggctttaagtaatgtaggtattgccatgggcggactaggcagtgatgcggctattgaaacggctgatgtggtgatacagaccgaccagccttccaaagtggctgaagcgataaaggtaggaaaactgacgcgaaggattgtatggcagaatatttcactggcgtttggtgtgaaactgctggtactgattttgggagccggtggactggctacactttgggaagctgttttcgccgatgttggtgtagcactgattgctatcatgaatgccgtaaggatacagaaaatgataaaataaaagaatatggaagaaaaagtttatctggataagttggcaaaaagagacatcaagccgacggctatcagacttctcatattgaaaagtatgatggaagcggggcgtgccgtgtctcagcttgatcttgaaacgttgctggatacggttgataaatcgactatatcccgtacaatcacgctttttttgtctcatcatctgatacatagcatagacgacggaagcggttcgtggaagtatgccgtttgcgatgattcctgcaactgtgtcctgaaagacttgcattcacatttttattgcgagaaatgccatcggacattttgtttggaaaagattcatattccggttatcgacttaccgaaaggattcactttgcatagtgtgaattatgtagtaaagggagtgtgtgcggagtgctcaaaagtgtaggattaattgcagacaagcagtaatggtaaaagaaaaacaccggaactcgaacggaaaaatatcgttgagttccggtgtttattatattaatgatactggttagtcaatattgggattcagagaatgccagtctttgattgccgggatgatccccatttcaatcacttcatcgcgaagtttgcacagatgttcgtagctcttttccagttcttcctgttcggaaggagatccggccacttctttgtaagtaacgccatctttcgtaatggaagtttccatagccatcatgatgtggtcgaacttaccattggaaacataagtaccggcaggccagcggaacggttgtccacccattgcggcagcgatcatttcgatagaaagataagccgggctttggaaagaagaacggccacgaagatcgatgatatgtttgccaccctgtatgacacgtacttttaatgcttcccattctgtcagcggaagacgggtagttccgatgaaatcagtcagcggttcgccttttactttggtagttgaggcgaatacggccatctgttctccatgtccgccatacgtacggcagttttgaatgtcggaagcgggaatatggaaatatttcaccagttcattctgtagacgggtgctgtccagtgctgccagtgtagaaacctgggatggtttcagaccggaatatagcagtgtgatcaatcctgtgatatcagcagggttaaagatgacaacgatatgttttacattcggacagtattggcggacatctttaccgaactgagcggcaatttcagcatttcctttcaacaagtcttcacgggtcatgcctgctttgcgggctgcaccaccggaagatacgatataagaggctcctgtcaatgcttctttaatatcggaagtataagtcagattcacgccttcgaaaccgcagtgatataattcttctgccacgccttccagagcgggtgcgaaaggatcgtatagacaaatattcggagtgagtttcatcatcatagctgtttgagccatattggagccgatcattccggctgctcctacaatcgtaagtttctcgttggttaaaaattccataattatatatgtttaaagatgaataatctgttcttgcttattaccgctacaaagataacgacttaatcggatgattgttcattgaaaatagttttgtttgataacgaaaagttatatttattcaaagagcaagagggccagttacgtgaactgaaccctctcttcctctttttacccctcgtgtaaacaattagtctaccactttaaaaagattcttttctcctgactggctgtccggtgctacccagagggcgaaatctcccggttctaccgtctttaccatatcgatattccagaaagcgagttcactgatgggaagttcgaaagatacagttttcttctcacctggttttaaagtgacacgggtgaagcgtttcagttcttttaccggacgggtgacggagcctatcatgtcttgtacgtacagttgggcgacttccgttccttcgtacttgcctgtattttccagatcgaaggtgactgtcaatacgtcgtctttcttcaaattgtcggaagacaatttcacactaccgtactggaaggtagtgtaagacagaccgtaaccgaatggaaacaaaggatcgaaacctgcatccatatagaatgaggtacagccgagtgaagtctgacctgcttcgagggcaatgtcgtctatcagtacttcgcttctcgtagcgggacgtcccgtattattgtgagcataataaacaggaacctgaccgaccattttggggaatgtgacaggtgtcttcccgctcggaacagcctttccaaaaagcaggtctgccaaagcagggccgcccatggtgcccggatggaatgaatagagcagggctgaagaaagttccgtttcctttccgatagtcagcggacgtcctgccatgacaatcgttaccactggtttaccggttttggcaagggcggagatcagttcgctttgcgcgccttgcaggttcaggtctgccaggcagtgcgcctcaccggaaaggatggcttcttcacctacaaaagcgagtatgacgtcggcacgtgcagcggcagcagcggctttagccacacctgctatgtttttgtcacggctgtatgtcagcccgggttcataaatgatttgcactttgtcgtctgccagttctttgattgcggtcagcggagtcattgtatgggatttttcgccatcaaatacccaggtgcccaactggtcgtatggtgcgtttgccattggacctactatggcgattgtttttacagaagattgtagcggaagcgtttcatgatcgttcttcaataagatagcagactctgtggctgcctgtttggcggcttccagatgagaaggagcgtataggacattggctttctcatccacgtaagggttttcaaacagtcccagacgatatttgattcgaagaatattacgcacggcgttatctatctccgcttctttgactttgccttcttttatcagccccggcagctccttgacaaatgtgttgcccaccatttccatatctactccggcattcaccgctttcatcgctacctctttagagtcagcggcaaagccgtgagcgatcatttcggtagaagaagcccagtcggtaaccaccagtccgtcaaatccccattcggaacggagtacatctttcagaatgaacgaattgcctgtggagggtactccgtcattatcgttgaaggaggtcatgaatgttgctgcccctgctttggaagcggcttcgaacggtggaaggtagacgttgcgtaaacgacgttccggaatgaaggtcgagttgtaatcccttccgccttccgccgcaccgtaacctacaaaatgtttcgggcaggaagcaatcgaggtgggactgttcagggagtcgccttgaaaacctttcaccatggctactcccataacggtagtcagataggtgtcttcaccgcatccttccgccatacgtccccaacgaggatcacgggcgatatcgatcatgggggcgaatgtccagcggatacctacggatgaggcttcgatggccgctacgcgtgcgccgtcttcagccacttgcgggttgaacgatgccgcctgtcccaacgggatggggaagatggtcttgaaaccatgaataacgtcacgtgccatcagcaaagggatgctgaggcgggactcctcgatggcaacgcgttgcagcgcattgatgcgtaccgggtcagtttcattcaatatagagccggcaccgccttgttttatcaatccgctcatgtcttcaatattgccgtaagaggtgatttggttcatctgtcccagtttctcttccagtgtcattttggacaacagagcttctactttcttctctatcgctgtgtcgcctttgtcattcgtcacttgcgtacaggaaacgaatggcaggaggaaaaggcacgcggagaaaatctttattactttcatacctatcaaatattattttttttgaaatacacgtacatagtcgatctcgtaagttgcgggaagggccgactcatccaccccttgtgcaccaccccagtctccgccccatgcgagattcagcttcagatagaaaggggcgttgaatggccaggtgttcctgttgttggccttgtcattgtcgaagcggaaaagttgctttccgtccacgaaggtgcggatgaagtcttccgtccactccaaagcatagacatgaaactcggtctgtgcggtaggcaggaatgtctcgccggtcttttgcgtaccgatggagtggtggtaggctttacaatggatcgctgaggacacgtagtttgcattatagcctacttcctccatgatatcaatttctccgtcgtccggccaggccgtatagttcttcggcatcatccagaaggcgggccatgttccttttcccttgggcagtttcagacgggcttcaaaataaccgtatttccagctttctttggtgttcatacggatggaataaaccgtttcgcctatcttcttggcgataatgctgaggatgccgtcttttatggcagcgagttgttcgttgccttgattgccggctacataatgctgcaattcattatttccccatccgttttctcctgtttcataataccattggtcgagatcgggttgagttcctttgttgaactcttcgttccacaccagtctgtatccttcgggcacggtaatgtccggatcggccgacggttccggtcgggctgcctgtgtcacagggatggaagtgcgtgcggctccggctttcaccactacctttccctcgcgggactggtaggtggtgtttgctttaaccgtgacttcaactgttccctggctgccgttatcagttatcttgcaactgatccaatctttgcaggcgtcgtcgctgaaagcggtccactccagtcccgagtttattgtggcgctggtgacgagaccttcgtgagtggctgaaagctgggcgggcgatacgtcgattacggcaacttctgtttcttcattgtcactgccacaggacagaacgcttaataaacagacgaagattgaaagtattgtcattggtttcatgcttttgtttgattaatctttatgcttttgcaaaatgatgtctttgattattacttccgtattggcaggattgcctccgaagtcaaacaccagtttcgcctgggtgatgtctactcccttggcattgataactttggcggttacatcttctcccgcagtgagttttacatcttctagcaggaaaacaaagatattgtcattatctccgcctcctacctgaacgagtttgatggtggcggaactgatgtcgttagatgcgttcagtatcacacggaagtcatagttctcctctgccgaggcggtaagtgcgtcactgatgaaagtaacttggttctgccacttttcattggttgccgtggggaagttgagtgtgtacgttgccccgtcgatattgagtgccgggttggcaatcggattccaaccgggagcataataaaattcattggtgaatgtaacgctgtgccacaggttgtcttcactgtctaccgcactccatgtcggttccggagtctcttcttgttcgggtactatggttccgtcatcgttggcgtgatctttcagtacgatgctttctattgtcatcactgttcctgctgcattgcctccaaagtcgaagacgaggttcaggttggcgatgtcaagccccggcatattgcttttccagaaacagaccggctcgttggcaaccagtggcgttttgccttcgaaataatagattttatcttctgtggcatcaaccagcttcaccgtcacattcggatggtcgattgtagaagtcaggatgacggagaaatcgtaattctttccggcatcggttgcgatgttcgtctttatcggcatttgtgcctgccaggtctcactggttgcttcgggcagtgttactgtgtatgtaccgttaaccagtgagtaggccgggtccgcaatcggactccatcccggtgcataccagaatgttggttcactgattgtggcagtccgccatatattgaaattgctttctgggtcgaagccaccgaagcccgtcatgatggttttgtcgatatggaagtttcgggtgattgctctgtcgcttactccattcgagttggctattttcacttctacactgtaatcaccggccttgcggtaatatttcgtcatgttgaatgaagaagaatagtttttgccgtcaataatccatatcggcattactcccttttgtccctgaaaagagaaagtcacataattggtttcctgattcacgtcgatgcggatacagtcttcgtagtccgataccaccggaatgccggcttcgttgggtgatgtgaagctttcgggcgagcaggccgtgatgttaagaataagggtgagcattagcaatgctccgctgatttgtttatatatctttttcataattcctctttttaagtacattaataattgttctgaactaaggtacctttggctgcgtcgatttctttctgtgggataggtagatatttcttgcttgacgaccagctgtttgtacgataaccatacgcatcgggaaccagtacactggcagctttgcctgtacggattaaatcccagtaacgtttgccttcgcccacgaattcaagatgacgttcttcgatgatgttgtcgagtgtaggttctatttcggttaccagtccggcacgtttgtgcacgaggttcagatacttcttggcatcaccctgaccggcgccgcgtgtgatcagttcggcagcattgagcagtgtttccgagtaacggtaaatgcgtagattgttgttccagttcagctccgaacttgacttctggtctttgttgttgccggtgatggcagcatatttttcaaggaagaagccggtgtcctgatagcgtgtggtgtatgacagtttatcgcctgggtgttccgcattgtgagcgtcaagcacggcttgtgcattccagcaagtggcgttgcggcgggtgtcgttattggaatagcgctcgtaggtttctttacgtaccgggcagaatccccagccacggtcgtgattgtctgttccattaggccagatatacggactgatgagtgtcggcagggcagttcctccggcaacgaggggacttccccagtcgcgtacggcattatcgtctttgtaattgatctcgaagatggattcgatactccattcaccggtttccttgaaaatatcggtgtagtccggcatcaggtcatattgagggctgctgatgatttcttccatgtattttaaagcggtggaatagcgtgaatcgtcattctgatacatcacgatttcggcataaagcatatataccattgctaaggttacacgaccatagttttcggaatcttctctcatcgggagtacgttgagctgaattacttcttcaagactggtgaccatcttttcatatagctggtcggcagtcagttgctctgcaacatacggagcggtcaggttcttgtcgaaataaggaacattgccccagaatttccacacccagttgtagtagaatacccgcagggcgatgacctgagcttcgtaataggcacgattggcgtcggttacatcggttgcccagtccagataggttattacgtcgttgcaacgcttcacaccgctatatgcacatttccacagaccgtagatcatattggtgggaatggcttcaaagttcatcatcaagtgccacggctggttgtcggttttactgtcaccacccacccaaaggtcgtctgccatgatatcgctcatcagattgacaggattatattcgtcgaatgcccagtccggccagtgcaaagggtcataagcagctactacggcttcttgaatgtgttcgtcagtggtgaagtaagtgtctattgtttcgtccgtaggagatgaaacttccagaaaggagtcagcgcatccggtggttagaagaacggatgccatcaggcatactgctatgtatttatattttttcataacgttttatgtttttagaatgaaaggatcagaaagaaagacttgcgccgattgtccatactctggcttgcggatatacaccgtagtcaatgccaagtgaagttccgccggaagagatttcggggtcgaagccgtgatatttggtgaaagtaaacaggttctcggctgccacgtagaagcgtagtgaagagatgaatactttctgggtcagtgcggcaggcagagtatatcccaactggatattcttcaggcgcagatagctgccatcgtagacgtaaaggtcggatgattgccagtttacgttgtcaccttgtacgaagcgggggatacggttggaggtaccttcacctgtccagcggttcagcatccatgagggcaggttgctggtggcgatgtccgtacggcgggttgcgtcgtagatatcgtttccggcagtgccttgccacatcatgttcaggtcgaagtttttccagctcacacccagattgaagccgaatgtccagtcgggcatacctttacctatatctgtacggtcgttcgcatcaatgattccgttgccgtctacatctacgaagcggacatcgcccggtacggctgtcggttgcagtaattctcccttgtcgtttttgtaagcctttacttcgtctgtgttctggaagataccagctgtcttatatccgtagaagaaagggaaaggtttgccgttttcggcgcggctgatatcacccgttccctggaaggagtctaggttttcccaaccggattcgttaccatattctatcagtttgttcttcaggtaactggcgttggcgctgacacggaagttccagtcgctgacgcggaacttataggctgcttccagttcgataccgctgttttccattttacccacattaccgataggtttagcttcacctacatagaaagggatattcatttccatcagcatgccgttggttttcttcttgtaatagtctgctgtaaaggtcagggcattgttgaagaaaccaaagtccaaaccgaagtcgagttgttcggactcttcccatttcaggtcgggattggcaagcccgctggctttcacgccgttgattacgttttcggatgaaccgaaaatagcattattgccgggagaagtcaatacggtatatttgaagttaccgatattttcgttaccattcttaccccatgaaaggcggattttggtggtagtcagccagttcgggcgtttgttcatgaacttttcgttggtgaggttccatcccaaagagaaggaggggaatacggcatagtgattgttgggcccgaagcgggaagaaccgtcacggcgtacggtcacctgcaacatatagcgttcgtcataattgtagcttgcacgtgcgaagattgaagccagtgtggcatctaccgaaggagcacctgcggcgtcacgatctgcattggctgccagtccggtacttgcgtcgatataaggacggctgtaattggtgatgttattgcgtgaaccgtacagataggagcctgaactttttttggcggattggcccagcaatacggagaaagagtgcttgtcgatgctcttgtcatacatcagcacgttttccagctgccatacggttccgtcttcttttcttgaataggcggaagactgggtagaagattcaccgcttcgcagataataaagaggtctgtaaccatcgtatccccaaaaagagaggtcagcaccataggaagtcttgaatttcaggttgtcccataattgcaattctgcagagaagttagcgacgaatttatgactccagtgtttgtcgcccggcaaagaaagtttggcaatcgggttggacatttcaccgaattcgcccgggatgctgaaaagttttccgttgcgtgggtcatatacaggcgtgtactctgccgttgtgccgtatttgtcgaactgggcttttatcgcttcttcagtttcgtcgtacacgttcagtatgggagacagggcgagtgccgatcccagtggtgtaccccaggtggagttatcatcaaaactcgtacttttaatgcgggcataagagaggttggaagtcactttcaggctgtttagccagttacgttctttcgattcgtcgaaaagggtgtactgtgtattgctgcgcagtgtcagacgttcgtagttggaacggtcgaagttacctcccacgataccgtcttgtgtgtagaagcccagagaaaagaggtagtttactttttcgctcgcaccgctcacgctcacctggcgattcatcatcggagcattgttgttgaatacttcgtcttgccagttagttccttgaccgtaagagtatgggtcgctgaatttgggggcgatgcctgcattgatcgcaccttcattgatcatgagtgcgtattccgaagcattcagtacgtcccgttttttccaggcactctgccagccgtacgaaaagtcgtaagtcactttcgttttgccgatcttgccggttttggtggtaacaaggataacaccgttggcggcacgtgcaccgtagacagctccggaagcggcatctttcaatacttcgatagaagcgatatcattcggattcaggtagtccagcccaccttcaagcggcataccgtctacaatgtaaagaggatcggcggctccgttctcggtacgaatggtacctacgccacgtacacggatttgtgcggcggcacccggctgaccggaagaggatgtaacggtaaccccggaagctaaacctttcagggcattgtccatacgtaccggagctgtggaagccagatcatcagcggatactttggcgatagaggccgtcactacgcttttcttctggacgccatagcccactactaccacttcgtccaatgtctcggagtcttcctgaaggacaattttaatatctttatgcccttttaccgcaatttcctgtgacttgaatcctatataagagatggaaagaatagcgtcggcgggtgccgataatgtgaaagtaccgttgaaatcggtgattgtacctgtggaagtattccctttcacaaccacatttactccgggcagaggttcgttgtccgtaccacttaccaccgtaccttttatctgtatattctgtgcatatacagcagctaaggtgaagcttaatagaaataaaactgataataactttttcatgagttttactaaattaagattaactatactctttttatgttcgcaaccgaacgatgcaaacataaggctaaatggtatacggcttgataaattatgttattcataaatacgtcaaaccgggaaaaaaaatacgctatcaatacgtcatattatagtaacgtattgataactagataataaagggtacgtttgtttgatacgtcacaacaacagattcagaaaaataatcagtttccgaatctgtcggggcgactatttgtgtcagaggtagttgcttaagtaatctgtcaaactgtcttcccgttccagaccgaacttcttgcgcagacgataccggatcgtctctaccccccggacggagatattcagaagcggtgctatctctttggtagaaaggttcattttcagataggcgcacatcatgcgttcattgttggagagatcggggtgtttggcatgaagccttttcatgaaattattatggatcaggtcgaactggtcttcgattcgctttaatacctcgtcgctctggatattggaatcaattttgctgttgatcagtatgagctgctgtttgctttcacgggagccttcgcctttcaacatggcggatactttggctatttctgacttaatctcggtcagcatctcgttcttgcgtacgaagtttatcatcaggttggccatttcctgacttttgtgttgcaggtcatgctccagcttttctttttccagttgcatgatctgtttttcgttccgggctttttcttcttcgtattccttttccatctcaaacagttctttgtctttttctacaatggcctgttgctttttacgcttcacacgcatatcgtcccatcgataaacaccccacataccgaagagagccagaacgatgtagcagatgtaagccattacgctgcgataccatggcgggagtatgcggaatgatatttcatcggaagaggaagtaccatcggggaaaagggccttgatttcaaatatatattcgccttcgggcagattactgtattccttggtgcgtgcaacggtgaagtccgaccattctcctttgttcagacgataacggaaatgggtgtcgtcactcagaattaaagaagaaagctcatattcgaaacggatggaattcagtgcatagtcgatagacagtgcaggttttcgcttcaggaaattggccgtatacaccagtgagtctttgggataagacagatacatattctttatatataaggagtgactgcggtcttgttgctctctgacagcaggaatgctgaaaagggcgaaaccgtcttcgttaggaataaccagcaatgaatcggacaggggaatgatggcctcgaaattgagcaccgactctatcttgggttgtcggataggattgatgctggtattagcccctttcttataagttcccagattggcgatacatatttcataagggcttaagctgatgagatggtcattgtattccaacagacgtgaataggttgccgtaccgttcagaagattgttcatatccgggtagggttccatgatatctttatggatgttgtgtttatagataccggacggtgtggcaaagtagatacgacctttaatttttgcggggtatatatgatttcttgaaggaaagccgtctttggtatcataatctttcacgctggtgaccttcgtcagattttcggataacttgatacgggtaatatggtctgcgttatacatccagatagttcttgcatcctcttgttcgaagagacggctggaatcgttcaatccttcgattttgcagacgacacgccactctccatctgttttttccactagataaatgccgttgtatacaccaatgtacatcaggcctttacgattcatgacctgctgacagcaccatgcgccggtgatgtccgtcactcgtttcattccgttgtcctgaatcaggaaaattccccggtcgtgcaggcagaaaagttcgtctcctatatggcagaggttccagacctggccgcttgactgcggaacgggacggatatcgggcaggttaccgttcgattgcaccggataggaagtgtagtataaaccacggttagtacctaaataaagagaaccgtcttttactgctgccgtatatcccgctccataagagtaggggtatgaatatagattcgtaaaaggagaagtgaggcagacatagtcaatgccactatccagtcctgcccaaagattgccgaaagtatcaaaagcaacggaaagaactgtgttattgtgaagtccgttattctcattgaaatatttgagcttcatggttttgcagtcaatcagtatcaggcctttatgaatagtacccaatgcaatctggtcattttttgccgccacgcagaatacttcattttcgcgcatgaagtcttcggcaccggtaacgaatggttccattgtgcgtccgtcacagtaaaacaatccattataggcggttaccacaagtacgccacttttataaggtataatgccacgaatgcgttttgatgccaggtcttccgcaccctgtaacgggaaaggggtattgcctaccagtacccatactccccggtcggttccgatatacaagatcccctttatcatgctcgaacagtcaatcttggcatccgtctcgatggcggtatacttaccgttcagatatttcactatgcggctgtctccctgaaagtacatgatattatctgcttcgtgaatgttccatacattgccaagatagcggcaatcatctttcagcgtatccgacatacagtaatattctaaactgccgtccctgcccggttcataatagccgaactcattgattcctcctgcataaatccggttatgagcggtagataccaacactgaacgcacatctgaagtattgttcagcgggaaaacgttccacgcattgccgtcgaattgtaacataccgttcttattggcaaaaaatacccatttatcatcgtaaggtgctatcttccatgtctgagcgcctttgccatagagattcttatcgaagttgataatgaaactgttccaattggcgaaggtttcaataaaaggtaaaaaggaaaataagagaaacagattgcgtatcaggtgttttttcatatgtattaatcattttattctacaaaaataatgtttattttcaatgtagcctcttaatgctgatttttatgtgccgatttttaataatccgttcaacaatgtttgggtgaaatctgttgcttttcattatctttgtctttcataaaaacaataattttaaaaagtatgagtatcgaattaggaaaattcaaccaactcgaagtggtaaaggaagtcgatttcggtttgtatctcgacggaggagatgaaggtgaaatcctgctgcccacccgttatgtacccgaagactgtaaggtaggggatatgttgaatgtatttctttatctggatattgacgaaagactgattgccacgacactgactccgttggtgcaggtagggcagttcgcctgtctcgaagtctcttgggtgaaccagttcggggcattcctcaactggggattgatgaaagacttatttgtacctttcagtgagcagaagatgaaaatgcaggtgggaagatcctacgtggtccatgctcatgtggatgaggaaagttatcgtattgtagcttcggcgaaggtagaacgctacctgtcgaaagatatgcccgattatgctccgggtgcggaagtggatattctgatctggcagaagacggacttgggtttcaaagcgattatagacaataagtatagcggattgctgtatgaaaatgaaatattccgtgcattggagaccggtatgcagatgaaggcgtttgtgaaacaggtacgcgaagatggtaaggtggacctgatacttcagaaaccgggatttgagaaagtcgatgatttctcgaagacactgttggagtatattcgggaacatggcggacggatcaatctgaacgataaaagtcctgcggaagatatttacgatacctttggtgtcagcaagaaaacttttaagaaaggtgtaggtgacttgtataagaaacgattgatttctttgcatgagaacggcatcactttggcagaatcctaaacagaatagggaaatccctatgcaggaatagagagaatcattggggtggggagttttctcaccctatttttgtgatatcagttaaagataataattttaaaaacagataagctatgcgtaagataataataagtttctgtattttgctcgctgccctttctttaaaagcgcagcctgtcagcggaatccggattgatggcggagatactccgattcttgtttattttggcggaaggcagatgtgttatcctactactacttgtttcgttgccaatctgaaaccgggaaattataccattgaagtgtacgcttcccgcccgactcgcccgggagaacgtgtatggaaaggagaacggttgtataatgaccgcgtttactttaacggaaacgaagtaaaagatatcattgtagaagaacgtggagatatccgtccgggcagacccggaagaccgggaaacggtcagggtggacaccgtccggactataaccgctacgatagagtgatgaatgaccaacttttcaagaagttctttgatagtgtgaagaatgagccttttgaaaaagatcgtatggggttgattacaactgcattggcgaactctgattttacatcggagcagtgtcttcaactggtgaagttctatacctttgataatgaacggctgaagattatgaaaatgatgtatcccaatattgtagataaagaggctttctttacagtgatcggtactcttacattctccagtaacaagaccaaaatgaacgatttcatcaaggaatacgaaggacgctgatcatacattagttcactaaaaacgatacggttatgaaaaatatacatataatcctgtttttcacgttgtgggtaatactcggtagctgttctacttattacgtatccaacaagcaagtgatggaggttcagcagggaatgtcccggcagaatgtagaaaaaatcttgggtaaaccggattacagacgttttgacggaggtggtgaggaatgggagtaccaccggatttcttcagtgctttacggcaactcgatcaagattattgtatattttgcagatggaagagttacgggtatggatacctttaatggtgatgaaatacttcttccgccgcctccggttgtgatgtctccttccgttgttgtaaccaatacggatccggttcgtccgccacgctatgaagaaaatccccgtcgcagaacacttatgatgcgtgatgagtttgatcgttttcttagtgatttccggatggtgatcatgtctgatgagcagattaaatatatagatgacgttttgttggattgcaattttacttctgcccaatgcggaaagatcattgatcagataagtggttcggatgcccagatgactgtgatgaaacgtatgtatccgcaaattgtggataaagaaaattttgcttcggtcgtcaataagcttttttcgtcttttgaccgtgacaagatgaaggaatatatccaggcttaccacggtgaccaacgaccgggagacgtaggatatgtacggcccagagctatgagttcagccgattttgaccgtttcttcaatgagtatagaggtaaatcttttgagtctgaccgtaccaggatgctggatgaagttgtacctccttcgggattcacttgtgcccaatgccgtaaattggtggatatgtgtacttttcagacagataaaaagaatatgataaagaaactttatccgaaaatcgcagataagaagaacttctccatactgacggatgttttcacttttgagatggacaaaagagagatgagggagtttgcggaatcttacgatagcggacgtaactaaaaaagaatgaaaccatgaaaagaattctatttatattgttagtcgtgactgccagtaccactgtaatggcgggaatgagtaccagcaaggtacgtaaggagacacgtttccttactgataagatggcatacgaactggacctgaataatccccaatataatgacgtgtatgagattaactatgatttcatttattcgcttcgtaatattatggattatgtagtacggggtgatgagtgggcattggatgattactatgaagcgctggatattcgcaacgatgatcttcgttgggtgttgagcgatgcgcaataccgcagattcctgggagctgagtatttctatcgtccgatttatgtcaccggaggaagatggaatttccggatttatatcaattacccgaatcgtagtttattctattttggtgtaccttatcattatcggacttactgtggtgcacattatcgtccgcatattcatcatgtgagttattatcggggaagatataataatcttgtgcactatcctacgccatatcgggtaagagatcagcgggtattccattcttatcgtcgttcagacttcggttctgtacgtttccgtccgaacacttccgttcgtccgcataatgcacctacccgaccggggacttcgggacgtccgggaacaacgtcacggcctaatacatcaggacgtccgggaaatacttcccgtcctcgttctgaaacggaccatagaccgtccacttcaggcagaccatctacatcgggcaggccgtccacttccggaagaccttccaactctgaaagaccttcggtcaatgaacgaccgtctattccaagcagaccgtccactccgggcagaaatgataaaccgaacaaggaagtaactccgggcagaggccacaacagaggtgaaggagatcgtcattcaggaagtcgtccgggaacgagtacaagtactccgaattctaatcgtcgtccggaaacgaattcagggtcttcgaattccagtcgccgtccgacaagtagtggtacgagcacaaaccgtggcagcagctccggtaggaacagcaattccggcagtagttccagcagagggaacgtatccggcagatcaacagaaagaagctcatcttcagaaagttcgagaagcaacagcaaccgaggttcttcttcccgttcttcagaaagaggaagcagctcaagaagataaaacctattcctttattaataaattattgctcctcagcggtaggagaactggactccggcgtttcgccgactagactattcagggcgtcgcccgtaacttggatatcggggcggatactatccgcctcgatttcacttattaaccctttcttggcgaggcgtccggcaatcagcttataatagccttccatattctctttcaaccgtccgttttccgcaaaggaactgcggaagtgtttaggcttcgggataatagaagctagaaaaatactttcttcggtcgtgagttgcgaagggcgtttgccgaaataataggcagaggcttcctgaataccataaaccagcggtccccattcggctatgttcagataaacttcatacatacgttctttagaagtcagcctttctgtctctatcagccatacgatgagtgcttcttccaatttgcgggcaaagttcttgttccggttgagaaatacgttttttaccagctgcatggtaattgtgctgcctcctctggcgaaacgttcgacttgcaggtcgtaaatcaaagcttcacgcatcgcatcaggcaaaaagcccttgtggtagaaaaaagctccgtcctcactttgcatgacagacattcgcagcaatggagaaatgctgtccaaaggagtaaaatgttcccatgaaggtccgacaggaaatgttttgaccggtattccgttttcataggcggtatagacaaactcttcactcatttttgaaagagatgttgcaccatattctattatccgaaaatctttttctttcaattcggactcaaacttaaggctgtctagtcgggcaaaatcgatatctaacagaaaatgataagccagctcaccacttgtttttataccttctagattgctgaataagcctttgggcaaagaactgaatagttcgtcgggcggaaaccatgatttatctgtggcagcagtgaagtgccattgattttcattcttttctgcccgcagataaggatgaaattttatttggttgaataataccgtcgtcgtactgtccagttccagcgtttgcttgccgatattcatctgatacgtgagttgtccgcgatccagatggatcacttcgggagagagtgctttgtgaaatacatcaagtccgcttactttcgccgtaccgtcaagttgcagttggttttcggtacgactttctttagtcatactataatataaggtatcgaaagtaacttctgctccaaaacggcggttgatatacggtagtgaaactttcttttgctctgtggcaaaaagttctgcctgcagggtatgtacctttctgttcaactctcctgctgctttccattgttgagtcagcgtatcttcttttatcttgatggtggactgaaagcgattgttttcgattgtaaaggtggggatattgactgttacgaaattgctgtctttccgttcggttatattaagttgagtcagttgaccgttttcggggaagaaaccatatattaagtttaatattcggttgatgcgatgggcgtaattggtttctatgaccggctctgtagttgcttccgggtggtgtccggagaatagaaaatcatagttggctgcactgtcccgtttgataaaagcgattgccagtccattcatgtggacgttgcggacttcaatatttcctttcagcagtttccaaaaattcagtctgacattgacagattgtagtgtaagaagggtatcccgttggtcgggaacgatggaaagcccttgcagagtaatttcgctacatcccttcatctgtagattctgataatgaatttgcagtccgtatgtttgttcgatatgagtcgtacgcttgttagttatgctttgcagaagcatattgcggctcaaatagatactgataaggcagataaacaagcctcctccgattgatagaagaagaatactttttttgctgttctttttcatcttttgcctttaataagttattggctgcaaaggtagataatattctgttcaacaagatataagcagtctttttttattagtgtgtccgcttatgagcgtacaactgttcattttcgtacatctcagtttttcttctttccgctgactattaagtatttatctttttggcatgcccattgcatttatatattcgaaggcgggcaacaaaagaaatgaaaaaaaagttcagatagttgcaaccattccatatagacgttccgtctaataaacagaagaacaaaaaaagaaagttgaactaataaaaaatatacaattatgaaaactacagtattattcagaatgatggttttagtggcaatggtagttgccggtatcgccaatacagagttgaaagcacaggacaataacttcattactaatgaagagaaagtagatgatcttgttgtttcgaaggtgatttacagactggatggttctctctatcgtcacatgaaatatgattttacttatgatgatcaaaagagagtaacagctaaagaagctttcaagtgggattcatccactgaaaaatggattccgtatttcaagatcgattatacttattcttctaatgaaatcacattggtatatgcacgttggaataattctcacagagcttatgatgattctgtagaaaagagtgtttatgaactgaatgatgctaatatgccgatcgcgtatatgaactacaagtggaatgactataaatggattgaagaatcagccggcaactgggctatgaatatacagactccggtgacagatgaagcagacttgctacttgccggaagataacaataccggggattgtgaaattctctttctctcttaaggttttaacaaacgaaaacggtggattacccaaacgagggaatccgccgtttttattgtatctgtctgaaaccggtgctgtttactaggttgttctatttaatgagcggcagatattctccatatccttcttctttcattttttctttcgggataaaacgcagcgaagcactattgatacaataccgcaatccgcctttgtcctttggcccgtctgtaaatacatgtcctaaatgcgcatctcctgtcttgctgcgtacttctgtccgtatcattccgtgagtagtatctttcttctctgcgatcagctctttctgaataggtttggaaaaactgggccatccacaaccggaatcaaatttgtctgtggaaacaaacaacggttctccggtagtgatatctacataaatgccggggcggtgttcattccagaactcattatggaaagccggctctgtggcatttttctgagtcactgcatactgttcggcagataatttcttacggagagtggcatcgtccggtttttgataagttgcggtcttgggagcattcgcttttcgtgccatttcaaataaagccggattgatatggcaatatccgcccggattcttatccagataatcctgatgatagacttctgccggataaaagtttgtcaacggttccacttcaacggcaatcggtttgttgtattgagtggctaatgcctggatcgcctgattgatggtggggagatcggctttattgatataatatataccggttctgtactgtgtaccacgatcgttcccctgtcggttgaggctggtcggatcgattgtctgaaaatagaggttgagcaataaactcagatttacttcttccggatcataaacaaccttcactgtttcggcagcatttgtcttgcccgaacacacctgttcataactgggattggcaacggtgctgttggcatatcccacctgagtactttctacccctctgatttgtttcaggaagtgttcggttccccaaaaacatcctcctgcaaaataaatttccgcttgacttttcattggttttgcaattcctaaaaatacattactaattattagaatcactgcgatgataatatgtttcataactgttggttctttctatagtaacggatgaaccggtggatatgttttagaaatctcttacataaataacaagtgttttttgtgagtttgaaaacatgagtaaagccttaaaaacagaatacttttccgatgtattctatttttaaggctttttgataaatagccggaaatctgttctattctatgatttctcctttatagaaatccagtattttagtacggaacagataatcgtatttagcttgcagtttatccgacagtgctttggtcaggtttagtttcgcttcattgtattccacaaaagtagctttaccgttattgaatttttcgctcatcaaccgaaaagattcttcgttggctttcactgcaacttcgctggagttatatttactttctgcagctactgcattataccaggcttgctggatttctttataaagaactttcttggtgttgtccagttgcaaagcaaggtttgactgttgtaggcgggcagtgcgtacccgattacgagtgctaaaacggttgaagatcggaacgctcaggttgaaagaaatagatttgctcaggttattttttaattgacgggcaaaaccggattctgcttcaccgttgagtgtatagtagctgcttcctagccctgcactgaaagaaagttgggggtagaattcactttgagcgatacgaatgttttttaaactaccttgtaagcgatattctgctgccttgatgccgggcttataggcaatcgcctggatataaatgtcatccggagctgttagaggttcaaatttcagttcttcttttggattctcaagaacgaaaccttccggtgtaggcagttctaataactggctgagacttaatagtgacaatttatatgtattgtctgcctgtacggctgtcatctcatcctgtgctacacgtgcctgcgcttcagctacctccgccggtgaagccttgccgacatcatgcagtcctttgatacgtttcagctgatctttgcttaactcaacctgattttgtgctaccttgttcaattccagattgaaaagcacttgcagataggcagaggtaacattgattgcaatatcctctttggctttattcaggtcctcgatagcagcctgtaaattgagcttggcaagggaatattgattggataattgtaagcctgtgaagagaggtacattagtacttaagttcactcccgtactggaactgttagtatcactatatgaattatctttcggagaagctgtacgtccccagctccacccctggctgataccaccatttaagttcggcagacgtgcccatttagcggtgtttacactaatcttattttgttcggcttcattggctgtctggcggatgtcgatgttatgctcgatggcatagtcgatgcattgccgtaaagtccatgtctgcggagtggtatcctgtgcttgaacagaaccgataccggttccgctcaacaggatgattgccatcattttattgattactttcattggatgtcagttatttatcttttttctcagcaccgcgtaacttggtctgagcggttacacctttttttatctcaatcttgataccgtcactcattccggtagtcacctgtgtacgttcgaatttctgttgtggtacggagtccgtcatgatatacacaaatgtagagtcaccgctgaactcaatcgtactttcgggtactgccagcactttgctggcacgctggagcacaatctctgcattggcagaatagccggaacgaatctgcacggtatccggaactgtgatagcagctttgatttcaaattgattggctccgttggtttctactcctttcggtgaaatatattcgagaatagcatcaaaagtcagattctgtaaagctccgatcgtcagtttaatcggcattccctcatggatgcgacccacttcggtttcgtcaatatttcccctgaaaatcagatcgttcatgtttgctaccgtagcaatggtagtaccgtcgttgaatgtattactcatgattacggagttaccggctttcactggtacgtccagaattaatccgtcaatagtagagcggatcatggtgctactgaatgaagcactgtttttagtgattccttcttttataatttccagattatctttggcagtctgattctcttcccgtgcctgctttaccgctacttctcctttttcgtaatcttcacgactgataagctgatcttcatataacttcttgatacgggtaaagtctgtttcggcctgctttgcattgatctctgccaggcggacacgactttctgcggagttcagttgtccgagttcgggaattactttgactttcgcgatcacttcccctttttttacgctctgtcccgcttctttgaatacctcgtctacaataccggaaatctgaggcttgattaaaatttcatctctcggctctacctttccggtggctactgtagtcttttcaaggtccgtgacttctgctgccagtgtttcatatacgatcactttaggcttggatttctgataaagaaatacgaacgttccgacaaggattatggcaataattaccaataatgtgattttcagatactttttcatcttgaatatatatgtttaatttttaattcttcatttaactctcaactctcccttctcaactctccacttctactcatctctgatcgcttcaatcggtttgatagccatcgcacggtaagcaggtgccagtcctgccaacatacctaatgcgatcagcagggcacaggttccgactgctaatccgaagctgacctggaaatgagcatctcctccgttggagttcgctcccatctcaaccagttgcagcaccatgacagcgaaagaaattccgaacatgccggcgatggttgtcaagaccatgctttcagataagatttgctgcaggatgtctttggggcgtgcaccgatggcacggcgtatgccgatttctgtagtgcgttctttcactgtcaccatcatgatattcgatacaccaatggcgcctgccagcaaggtacccaaacctaccatccagatcagaatatggataccggtgaataagttgtctaccatggaaaacatagcctcagcgttcagatacataagcgcctgcttgtcattaggagcaatatagtgtgctgccttgatgatttcttccatttggggttgtacatcggaaacctttacgccccgtttgacggtgaagcagattacatcaatttgtccgcctagattataagtctgctgcatggtggtgaatggaagggtaacagcctcggaggcacggccctgtatgttcatatctccttcggaagaagacatgccgatgacttgatagtagatgccgtctacccgtacatatttgccacacgggtcttctcccggtttgaacaggctttcgtaaacacgcttgccaataacgcagaccttacgcgcttcacggatatctacgtcgttgataaaacgcccgtatgccatttcttgtgattcgatatggagatagtcgggatataatcctttcacactacaatcgtatttcttgtctccataaatagcgttggatccccaacgggcaacggaaggggtgatgacttccacatcctttacctgcgagcggaggcgttcgatgtcgatggcttccagatcccaccagcgtcctttacgaaatcctttgtaggcttctcccgttttttgggcggcaaggaagccggagttggtggcaaatccctcaaagttcttttgcatcatatcctgcaatccctgtccgccgccgataagcgccacgagcatgaagattccccagaatacgccgaatgccgtcagcaggcttctcgttttatttcttgtgatggtgatgaggatttcctcacaagtatctatgtctattctcataatctttaatcggctctaagtgcttcgatcggtcggatgctgactgctttgcgggcagggaacaatccggctaatgttccggctattactaatgtgagtgtagcttggatggcgattcctatgtcgaccgttggattcaggaataccgtttcggaccatataccgttgtccatagtctggtttccgaaggcattgttcatccattcggtggctccgatacctgcaaccatacctatatatccgaatatggtggtaatcgtgacgctctctacgataatcagccaaaggatagaaagtggtttggctccgagcgctttgcggatgccaaattctcgggtacgctctttaacggtaatcagcataatgttcgaaactccgacaattccgcttaataaggtgaaaatgccaatcacccaaatggcaatacgaagcatcgccgatccttgctgttgctgcagataattggtgaaacggttccatatccagatggcgctatgatcggtcgggtcaaaacgctggttggcgccgatcactttacggtagtgggcttcgaattcctcgttagactctattgtttccaaattcttggtggtcatgatgaggttattcagcttgtctcctttattataaatcgtttgcagggttgtgaacggaagataagcatcgctgtctccgctgtcacctttgtcattgtacagtcctactacctgatagacaacattgcccgcattcacgaattgtccgatggggtcagtatgtgttttgtcgaacaggatttcggcagtctttttgtggagtacaattactttccgtcgttctttaatgtcgatttcgttaatgaaacgtcccttgaaaagctttactacttccacttccgtatggttgggatatactccagaaagattcaggttgacatattccggtccgaagctaaggttcacacctccctgatatacggttgctccggccttgatgacatgatccggaaaattcttattggtcgtattcaagtctttgttatccagtcgtatccgccttccttccttcagaccgtcgtatgatttactggtccatcccggaaaaattttgatggagttcatggcccgttccgaagccgactgttcgaatgcgtgaatcagcccgttgccggcacccagcaggacgatgagcataaatattccccatgcgacggcaaatccggtgagaaaagtcctcaacttattgcgtttgatggtactatatatttcttgccaaatatcaatcatattttaagtaataagttataagtaataagttataagtaataagttataagtaataggttataagtaataagtaataggtaataggtattaggctgcgctgtgaccgcatggaattaatacttaatacttattacctattacttatttcataattccgttttggccgaatggagaggcgtcgtggtcgaggttctcttcaatccgttcgataataccatctttgatatggatgatcttgtccgtttggttggcaacaccactttcgtgggttacgacgacgatggtcattcccattcgatgcaagtctttcaatatctgcattacttctacggaagttttgctgtccagagcacctgtcggttcgtcggcaaggatgatctgcggctgggtgattaatgcgcgggcgatggctacacgttgtttctgaccgccactcatttcatttggcatgtggtgtgcccactcctttagtcccagccggtcgagatattccagagcgagtgcatttcgctttttgcggcttacaccttgataaaataagggaagtgccacgttttctacggcatccttgaatgatatcaggttgaatgactggaagataaatccgatcatacggtttcgatactcggcggctttcgtttcgctcaagtctttgataagtacgttgttcagataataatccccggtatcgtagttatcgagtattcctaatatgtttagtaaagtagatttgcctgaacccgaagctcccatgatggaaacgaactcacctcgctgaatgtcgagattgatgcccttgagtacatggagaggtgctccgttgttgtaggtcttgttaatgtctgttagttttatcacaatttcccttattaagtttcttttttctttttatttttcactattagacgcatgaaagatacgaaaagttgcaaacagagtgaacttttttgaaaaaacattttgtagactcaatcttctttacgtaatttgtgtgcagtaaactttataattaactaacccttttaaataaagtatcatgaattcaaacatggagaaaccctacgtagtaggtattgacataggcggaacaaacaccgtctttgggattgtagacgcacgcggaactattattgccagtagctcgattaaaacagccggctatccgactgctgcagaatatgctgacgaagtatgcaaaaacttgcttccgttgatcattgctaatggtggtgtagataagatcagaggtatcggtgtcggtgctcctaatggtaactattataccggaactattgaatttgctccgaacttgccttggaaaggaattcttccgttggctgctatgtttgaagaaagactgggtattcctactgctttgaccaatgatgctaatgctgctgctatcggtgaaatgacttacggcgctgcccgtggtatgaaagattttattatgatcactctgggtacaggtgtaggtagcggtatcgttatcaacggtcagatggtttatggtcatgacggttttgccggagaattgggccacgtaattgcacgtcgtgacggtcgtgtttgtggttgcggtcgtaaaggctgtctggaaacttactgttcggctaccggtgtagctcgtacagctcgtgaattcctggctgctcgtactgatgcaagcttgcttcgtaatattcctgctgaaaacatcacttcaaaagatgtatatgatgcagctgtacaaggtgataaactggcacaggaaatcttcgaatttacaggtaatattttaggtgaggctttggcagacgctattgcattctccagccctgaagcaattgtattgttcggtggtttggctaagtcgggtgattatattatgaagccgattcagaaagcaatcgatgacaatatcctgaatatctacaaaggcaagactaaattgcttgtttccgaactgaaagattctgatgctgctgtactgggtgccagtgctttggcttgggaattgaaagatctgaaagaataatatcatttttttaataataaaggtaattggatccccgggggcgttgagtttccggggattttttgtatgtgttgtttctcaaaagttgtatctacaggaaataaaactggatattctgtagttttttgcgttatattgcgtctaatgtatagacgattaatcaaaataagatgaaaaaattggaaatagagtttgagcaagttgtgaagcaatataaaaatacaatttacactgtatgttttatgttctctaaagactcccgggaagtgaacgatctttttcaggacgtgttagttaatctttggaaaggtttcgatacattcaaaggagaaagtaatataggaacatggatatggcgtgtaagtctcaatacttgcatttcatcagacaggaaaaagaagattgtttctgtacctctgattatggggattgatctgtttgaagatagggacgaagatacaacacagataaagatgttgtataacagaattagtcgcctgaaacatttcgatagggcgatagtgctattatggcttgagaatttcagttatgaggaaattgcagctattgtaggaatttctgtgaagaatgtttccgttcgcttatttagaattaaagaagaattaaaaaaaaatgtctaacaactagaaaatatatgggtatggaagaatatatagatacgattgaacttaaacaaatgaaagaacagatagctattcttaacagcaagttggatgcggaggtcgttgttaatgagaagttgttacgtaaggttattaaaaataaggtgtcgggaatgaatcggtatgtagggattatgaattcattggcattattacttattccgttttatatttgggcatgtccttatttgggaatatcatggtggttttgtagtgtgttttgtttgttcctgtttatagcagttatgcacggctattttacgcataaacgattacgaacaaatgatttaatgagtgaggatttactggtggtagctcgaaagttgatggaaataaaatcccgttattccatttggcgtaaatttagtattccatttattattatacttttgtgttggctctttattgaactgcaattggcaggaaatagcaatattataattttttgtgttagtcttattttttcatttagggagggatataaacagtatcacatgatgcagcgcaaattggatgaaattcagcaggagatagatgaaattatgaaagagtgatcatttcagaaagcaaaggttggaaaattattatcaggacattttatgcatttaggatttcaataaaacttcttcaactccaataactctatgaatatgcgatagattttgtttttaggattcttgatatgtttgtgaaaattctgtttgactattgttttgttcgttttgtcgatgatattttgtctttttgttcggtgatgtaattgtttgttggatgatatgatatttgtagactgttggggatatgagatgaaatagaaataaaatcccttggacatagataaaattgcaatgtatagcaagtaagatgaacttggttttaaaggaagcttccgttcctttaaaaccaacgcctcgttcctttaaaaccaaaaccactttttaatcctttgaaaacttgcatattgctttggttttatgcagaaaaacagttgtatattgcatatttataggtgattttatgcaataatttgtctgaaacacagatttttctctgtttattaataatgtaaatcttaaaaatgggacattgaattccgctttctctattgttgccaatcgaacaatatagacttttgcgatgatgacactatcctgatcacatactgtcagtatccggtaggtatggtaacactataccagtaggatggtgtcactatgttcaaacgctcgttatgacaaaagtatggaagagaaagacttgaaataaaaaagaggaaatcccgttaccggaacttcctcttttttatttcgaatctcagagttcagcttagttgttaactcttttttctttgattctagctttcttaccagtaagagcgcgcaggtaatacaatttagcgcgacgaactttacctaccttgttcacttcgatgctatcgatagccggtgattcgattgggaaaattctttctacacctacagtacctgacattttacgtacagtaaaacgtttcttgtctccgtgaccggcgattttgataacaacaccacggtacaactgtacacgttctttgttaccctcgatgatacgatatgctactgttacagtgtctcctgctttgaagctcgggtgctgtttaccggtagcaaatgcttcttctgcaattttaattaaatccattgttgctattattaaattgttttatcgttacaacgcaacataccaagtatctcttctcttgacagcgattgcgcgaaagcggtgcaaagtaacgaattatttatcagatagccaaatgttttggagaaaatgatcggctgtgagctggtatcgaatgtttttggggttacatcaaacaaatgtggcaatagatttgtatctttatgattgggaataggaaaaaaggcactgccggggaatgtggagaagggttcacttctcttttgcagcagcctttattgatcattttaaacagtaaaaaatggggaatttaatttcatttatgaagaaggtagccgacgggctacgggaaagtgggaattatgggaccgcccatatttacaggagtagcatgagtgcaatccttgcattcaatgaaagcgggaatctgcctttccgaaaagtgactccggagtttttgaaaagttttgaagcgtatctgcgtggaagaaattgtagctggaatacggtttctacttatatgcgtacgctgagagctgtgtacaatcgggcagtagaccgacgcattgcaccttatgtaccgcatcatttccggtatgtctatacggggacacgtgctgataaaaagcgtgcattggaaaaagaggatatggaacgtcttatgaaagatattccgaaacagctgcactcgggaaacagggaattgcagcgtgctcgtggttttttcatattaatgtttttgctgcgtggtatgcctttcgtcgatcttgcttatctgaaaaaacatgatatagacggaaatgtccttacttatcgtcggaggaaaacaggcagaatgctgactgtgactcttttgccggaagcggtgaaattgatcaaacagcatatgaataccgatcctgcttctccttatctcttttcgttgatttccagcaaggaaggaacggaggaagcatataaggaataccagttggcattgcgtaactttaattatcagctgatgattctgaaacaagtgctgggactgactacggatctgagttcatatacagcgcgtcacacatgggctacgatggcttattattgtgaggtgcaccccggtgtcatttcagaagcgatgggacattcatctatcactgtcacagagacctatctgaaacctttcaagaataagaaaattgatgaagcgaatgtaatggttttctcttcctttaggaagtctttctcggtaggtaattatttgaattaaagcctgttactttgtaggtaacggggagataatacgctgcaaagatgaacatattttggaaaacatgcaaacaaaaaagatattttttctgataaactactaaaaaaaggaaatacaccaaacaaaactgcggattttttgtgaagaacacaccatgctctcttattgttgcaaaagatttccctcccctctgctgctattctaaagcaggggttaaatatattttgatacttatgtttcttgtctaccctttagacgcttcttcagaagtagctacaggctgtttcccgttacctacaaagtaacgggcgaatattatttgaacttagtgtttaataatatattattaatgtaatttttaagtagttatgaagaaaaaatttattagagtgatgtttttcggagcattggcgctaaccacattttcatatgtaggttgtaaggactacgatgacgatatcgatcggttagagcagaagataaccgaaaatgccaacgctattgcggaaatcaacaagctgatcgaagggggatctgtgatcacaaaagttgagaacattaccggtggtgtggaagtaacattgagcaactgtaagagctttaccatcaaaaatggtgatgccggaaaagatggtactcaatggacaattggtgatgacggatactggtatcaggatggcaagaaaacagagttcaaggctaaaggtgataaaggtgatcaaggagaaccgggcactccgggcgagccgggaactccaggtactccgggtgaaccgggagaaccaggacagccgggtactccaggtaaagacggtgatacctatattccaggtgaagacggattctggtacaagaatgaagtgaagccggaaaacaagactgatatgacttgggttatcccaggagtcgtttctgttgcagatatgggagattactatattttcagtaatctgaagaatgaagctggtgaagcgacttctgctacagtttataaatactctgctacttttgtttcttctttagtacatgtaccttctaatattcataaagaattaggagatgtagtatttttgccggttattggttatgatgagaactctaaggaagcagctcctgtatatgaatataacagttctaataaggttgtagatgcgactttggttaatggatgggctacatttgagtacaaactgaatccggctaatgttaatcctaagtattacacaggagtaagttttgtcgaaaaaacagctacagtagcaactaaagctgttactgaaataggattacctattgctaaagttgttcctaacgaagatcgtggcaaattgatcgtaaaagctactgctggtgataatgcagagaatcagaatgcatttaagatgtttactgaatacaatgaggatggaactatggttagcagatataataatcctgttggcaaaccattctctgaagcagatgaatatggtgaagtaaaagaaaacggtctaggtaaggctaacatgcttgcttatgtagttaagaatacaaatgaacaattaggtgctgctgaaaatgttaatgtagtgtctgactatgttgctgcaaaacgtatggtagttgaacaacaagaaacaactattgctatgccgcttaagggaactgacagacctgcagtgattgatcaggaagctcaggttctgactgaattgactgcaatttataagttggcagatgtaacgaaagacggtaaagtagaccaagcattagtaaatgctaaggtggcagctatccagcctttgttgaaactgaaatatactgagtctttggatttgaatacggtactgaaagggattgctacaaaattccataccaatacagggtttaatgcaaaggacggtcaatatttgctgactgatctgggattcgaaaacgttacattcaaatatgaattgatgtcaaatcctttaggagaagttgatcagactttcagatatctgaaacttgatggaagtacaatctctgtgattaatcaacaggatgccgctattgaccgtgaacctgttctgaaagttcaaatgtacgtagatggcgtctttgtaatgactaagttgctgaaaataaagattacacaacacgaacagttgacagaagactttattaataaagatttgcttcctcagacgcttgcttgttcacccatctatggtggtggtttaatattggatcaggaagttcctttcaaacacgtggacaccgctggtgagttagattatctgtataaggtagatggtcttaagattgactttgaccaatacttcaataagctgaaaataagcaaagagaagtttgttgaatactatggcgcaaatcctgtagttgaggttaagaaagatggtgaagaattcactggttggagtttgacagctgatgatagcaagaatctgagaattgattattctaatgtttcaggaacggctactactttaaataactatatctacttcggattgaaaccggcattgcatgcaggtacttatgtaattaagttcaagtatgctacaaccaataaattggctgaatacggttcattcactattactactacgttggtagtgaaagatcctaagcatgtttgggtatataatccatctatgtggaatggtacagagaatatgctgggttatggtcaacctacttcaggagactacgatacaccgttcttgatgaaggctgtccttgaagatggattcaaagaacctgcaccttgttgtggtaactggacatttgctatagcagatgctacaattgaagctactgatgccaagatagttttagttggtggtaaacatgaattgcaaatcctgaagaaagaatggatggataagaagattcgtatcaaggtaacagaagagcttgcaataggtcgtacaattgacaactatgtatctgctggtgcagagtccaaagaatttgatattgtattccctaacccggtagcatatactccgatcaatgcgtctgcttggtatttggttgaccaagctcctacagcaacatgggataacggtgcttatctgccaatctatcgtttcattaagctgtatgatacacacagaggtgaaactaccaatgggctgatgtatgatggtagccaaaaagctccttgggctaagttgaatactgtagaaagtggaaaatctctgttcaagatgcatcaggttaaggtttcttatgagctctctgataagaataatgacattgtgaagagacatgcttctattgtgaagaatggtgagaaagaagttggtttgctgaaatgggaaaatactggtggtgcagctgttggttcagttgaccagccgattgtaatcaatgtaacaatagagaatacatggatgggtgatccggctcaaacaacgaagcaagttcacgaagtcactgtatatgtgaagaaagctgatactaagtatacgaagccaagtacaggattcttgggtacattggctgctcctgaaggattaggctcatacgctgatttgaactaacattaacttgtaaatagttttagaagggtatcttcataagagagggtacccttctttaataaatatcttatttaaagaaaagagatgagcatgaataaaaagaaattgtggatagcagcgttttctttgctatttggcagtatagccgtctctgcacaagaacagagaattaaagaagaaggtaagacggaattcaaatcccattggtttatgcaggtacaagctggtgctgcgcataccgttggtgaggccaaattcactgatcttatatctcctgcagttgcattgaatgtcggttatcagtttgctcccgcatggagtgctcgtgtaggcgttagcggatggcaggctaaaggtagttgggttgctccacggcaggattataaatataaatatcttcaaggtaatgtggatatagtatctgatttgagtacgctgttttgtggtttcaatcccaagcgtgtattcaatggctatatatttgccggagcgggtcttaaccgtggcttcgacaatgacgaagctgttgcaattaacgcagccggttacccgatgggctatctttggacagaaggaaagtttcttgttgccgggcgcttaggtctgggatgcaacttgcgcttgaatgaccgtttggctatcaatatagaaggtaatgccaatgttctttccgacaagtttaattcgaagaaagcgggaaatgccgactggcagttcaatgctttggtgggtttgactattaaatttggcaaaggttataaagaaatcccgcctgtgtattacgaaccggaaccggtcgtggtggaacaaccgaaacctgctcctgtggtagagcagccacaacctagaaaagaggtagtagtacagccaatgaaacaggatatcttttttgccttgaactcggctaagatacaagacgaccaaaagtctaaaatcaatatgttggtagaatatttgcagaagaatccgtctgccaaggtaaaagtgactggctatgcggatgctaatacaggaaattctaagatcaataaaacactgtccgaaaaacgtgcagctaatgttgcagaagttctgaaaacaaaaggaataactcctgatagaatcattgccgattccaaaggtgatactgttcagccctacaaaacaccggaagaaaaccgggtgagtatctgtattgctgaataaatcatgttgctcaaccgatacgtaagtaacggatgcgactactttgcgggtatctgtctctgtgaagcgattgatagtcgtttttccccactaaggatttccccactatagtccttagtttattttagtgaagagaggaaaggtctgcacttgcgaaagaccggacttttcgctaactctattcaagggacgttcctaatttcccctttttccctgggaacgtccctttttattgcatatcattgatgataatccttccccatataaaacttaagatatatacaaaaatgtcacacgcccaatagcactttgggattttgaacaaatatatccctatctttgtcttttaagatttagggaaatagaaagaaaaggtgttatggaagaagcatgggaaagggaatcttcttcctcttaaaacagccttttaagtatcatttaaattcgtataataatggggaatttaatttcattcatgaaagacgtagccgatgggctgcgggaaagtgggaattatgggaccgcccatatttacaggagtagtatgagagccgtcatttcattccacggaagtggaaatcttccttttcggaaagtgaatcaggagtttctaaaaaatttcgaaacgtatttacgtggaaaagattgtagctggaatacggtttccacctatatgcgcacattacgtgcagtgtataaccgagcggttgaccgacatcttgctccttatgtgcctcatcattttcgttatgtctatacagggacgagggctgacagaaaacgtgcactggacaaagaggatatggaacgattgatggcaaagctgccgaatcagctttattccggaatcagagacttacaacgtacacgtgccttctttttattaatgtttatgcttcgcggcattccattcgtagaccttgcttacttgaagaagcgtgatatagaagggaatgtcctgacttatcgccgaagaaagaccggcagaatgctgaccgtaactcttctgcccgaagcaatgaaactgatcaggcaatacatgaatactgatcctgcctctccttatcttttttcgctgatcgccagcaaggaaggaacagaagaagcgtatcgtgaatatcagctggcccttcgttattttaatagtcaactggtgattctgaaaggagtgttaggattgactgctgacttaagttcatatactgcccgtcatacatgggctacgatggcatattatagtgaagtgcatcccggtatcatttcagaagctatgggacattcatctatcacagtaacagagacttatctgaaaccttttaagaataagaaaattgatgaggctaatgcaacggttttctctccctttagaaaaacgtttttgaagataagttgctgataaatatggtgttacttcttaggtaacggcaagaaaacacgctgcaaatatggacatattttggaaaacatgcaaacaaaaaagatattatttctaataaacaactaaaaaaaggaaacacatcaaacaaaactgcggattttttgtgaagaacacaccttgctctctaatttttgcaaaagatttccctcccctctgccgtctctccaaagcaggggttaaaaatatcataacttatttattgaaaatggcccgcagacgcttctgtcggagtgggaaaatgtattatcccgttacctaagaagtaacgggcgagtattatttgaacttagtgtttaataatatattattaatgtaatttttaagtagttatgaagaaaaaatttgttagggtgatgcttttcggagcgttggcgcttgctaccggtgcatcgttcgtaggttgtaaagactacgatgatgacattgatgcggtaaatgccagagtcgatggaattgaaaaaactctctcggaattgcaagctcaagtgggaggctatgtgaagtctgtggtgtatgatgcatctacaggcaaattaacagtgactggtgcggatagtaaagagtacactataccaatgcctgaagaattgccatcgtatactcttgatgtgacaaaggatggtaagattactttgaagaaggatggtaaagaagttagttctggtactatcgacattcctgaaatccctgaaattccgacgtataaggaatttgatccattgttactgactgtaaaagatggctatgtttattatgatggcacaaaaacttctgttgcgattcctgagaccgcaaaaggatctattactgctatccttgatgaaaaaggagtcgttacaggatatagaattgtaacgatcgaaaacggtaaagaagttactggtgaattctctgtcatagacgctatacctttgaagggattagtatttgagcccacttgctatgtgggtggaatctctgcattgaaagctaacaacttgacttataatgcatggtctcaaaatgcgtacgctaaaccgtcagaaaccggtgaaacatataagtctaatcctacactttcttatattactccgcaaatctgggcatattaccacatgaatccggctagcgtttcaatggcacagattgaaagcctgaaattcctttcaggcgataaggattattatccagtttctcgtgctgctgcaatggatccaactgctaatataaagaaatcagatgtcgtaaccgaagacggacaacgttatcttaaagttgcaatggatgcagatgcagaaaagataccggcactgaattctggtaaggtagctgtatatgctttgcaggctcagaccaaagctattggtgctgacgaagctaaagtaattacctctgattacgctagtatatataaggtacttatgagcgacttcgttctagaaaccaaaattgatgcagaagacgtaatcttatatggacaaagcatttctcgtactggttctactcctaatgctaatgcaggtaaggcacaagaagctattgatgcaaatgcagattacactgtagctacagatggtacacttaaattagcagataaaatctctacttattataaagaaaacaatggtactgaattagttaagatgactaatattaaagataacggtctgaaatatgtcttcactgcttccaattacattggtggagctaataatgagacagaacagaactcattctttaatggtagtgatgctgctaaaggtattattaaccctgaatataaaggtcaggattctgaagcaactgaacatcgcgagccattgttacgtgtagaattggtagataccactaaggttcctaatcaggtagttgctgtaggatggattaagacaaagattgttaagggtacaattgacggattcggtaaagtattcactaaagatacttattactatggttgtgagaacaatgttgccaaattgacttacctcaacatgaatgatgtttatgctgaagcgaagttgaacaagcctgacttccatacagcatatacattgaagaaagatgatggaggtgctatcgctttgggtgaaggaagtacaggaacagtaacagaagtaacggatcctgaagctattgctactacagtagtagagtggacagtaactccggcagaagctttggctcttgttaaaaagtcgaagacagagatgttcgctactgtgacttatgaatcagtagacggaactcgtggagatatcacaattacgatgaaagcaagcatcgcaatgcctagtggagtaattaagaatgaccagaagattactgaagcttggtcacctgataagtcttatgtaaaagctgatgtgaaagaaccggttactgtagcagtaacagacttcaaacttgatctgtttgatgtatttgaaggtcgtaaggttgttgtttctgacgttacagaagcgaacttcccatcatttacgaaggataagttgactgcgaagtttatcttctcaggagctaaggatgtaactatcggaactgataaatacacattcactgtaacagctaacggtactcaattgaatgctagcaagaatagtgctactgcaactaagattgctacaattgatgctgacggtattattacttacaataaggctgacgagaatgcacaagcattgttgaataagtctgcttacaacgtggatccgttcactgtaggtattgaaattgtggtaactaacgaatgcgatgaaatcttaccgttgactggtaacaaatttgatgtgaagttcttgcgtcctatcaatgtagttgacttgaagtctgccgaattgcaggatgcaactacaggaactgctaagatcgacatgagcaagttacttggtttgacagactggagaggtcaagcgtttgctgtagcgcctatcgatttctatacttattatggagttactggtagtgcaatttcaattgataaggatcagatcatgacaacattgaatgcaagcgaagctgcaccaaaactgttgaaggacgttgcacctaacatgtcaattaattacacatgtaatcttcagaaaacaggtggtgacataacgtatggtgaccttgtttatgcaaacggtaagtttactataaatgcaccattcaaactgtttattcctgtaacggttaaatatacgttcggtgaagtaaccagcacagtaacattaacaattactccgactcaccagtaattgattgatctctaacgatagcaatatcgacaaagataagaagggtatctttttcaaaagaaggatacccttctttaataaagttaatgcaatatcatactaaaataataaagataagcatgaacataaagaaattgtggatgtctgtattcgccttactgttaagtagtacagtcattttcgcacaagaacaaggaataaaagaagaaggtaaaactgcattcaacccccattggtttatgcaagtgcaagtaggtgctgctcacacacttggcgaagctaagtttagtgatcttatatctcctgcagcagcgataaacgtaggttatcagtttgctcctgtatggcgggcacgtgttggtatcagcggatggcaggcaaaaggcggatggatttctccgcagcaagattaccagtacaaatatttgcaaggtaatgttgacatcgtttctgatcttagcacactgttttgcggttttaatcccaaacgtgtattcaatggttatgtctttctcggaggaggattaaatcgtggttttgataacgatgaggcgaatgcactggatacacgaacctatgagatggaatatctttggcaggacggaaagtttctcgttgccgggcgcatgggtttaggatgtaatctgcgtctgaatgatcgcttgtccatcaacatcgaaggtaatgcaaatgtcttgtccgacaagttcaactcaaagaaggcaggaaatgctgactggcagttcaatgctctcattggtttgaatattaaatttggtaaaggctatacggaaactaaacctgtatattacgaagcagaacctgtagtagtggaacaaccgaagcctgctcccgtggtggaacagccacagccgaagaaagaagttgtagtacagccaatgaaacaggatatcttctttgctttgaactcagcgaagatacaagacgatcaaaagtcaaaaatagatatgttggtagaatatctgcaaaacaatccggctgcaaaggttaaagtgacaggctatgccgatgtaaatacaggcaatcctaaaatcaacaagtcgttgtctgaaaaacgcgcaggcaatgttgcggatgctttgaaggcaaaaggaataaccactgacagaattatggttgattccaaaggagacactgttcagccatataaagcaccggaagaaaaccgtgtgagtatctgtatcgccgaataaacaaagttattaacaagatattataagaagatattctaaaaaatatgttgcttcatcggtacaaaagaatttctaatggtgtagaaatatcattgatacagtaagtaccgaatgcgactactttgcgattatgcgctcctgtgaagaagctgataatcgtttttccccactaaggatttccccactatagtccttagtttattttagtgaagagaggaaaggtctgcacttgcgaaagaccggacttttcgctaactctattcaaaggacgttcctaatttcccctttttccctgggaacgtccttttttttaattaaatcaaccctgcctcagaatactttcaattaacatttttaagtgcattttgcagctaattccccttgaaataggactaaacttgctataagtttcttcttcttccgcatgactttaaaatataaaatgtacatttgtagcataaacaaaagaaagaagatgaaacgaaattacgtaaagtatacttcgggagctattctgacaggactaatcctattcacttcctgccaatctacccgtgaagttcaggcaaattatgaagttgtccagatagaaggaacccggatttgtatggattcaacctgggatgctcatcccgacgaaaaggctgccgccctgcttaaaccctacaaagaaaaaatagataagatgatgtatgaggtgattggcgtcagcgagatgacgatggacaaaggacgtcctgagagcttgctttccaatctagtcgccgaagtgctacgactctctgcagagcgtgtactgaagcatcctgccgatattggaatcatgaatatgggcggtttgcgcaacatacttccacagggtaatatcacagtcgatgctgttttcgaaatacttccttttgaaaattctctctgcgtactgacgatgaaaggtacggaaataaaaagactgatggaagtcatagcttctttgcacggtgaaggactgagcggagcacatctggaaataacaaaagacggaaaacttctgaaagcaaccgtacaggaaaaagagatcgaagatgacaaagactataccgtagctaccattgactatctggcggacggaaacgacagactcactccctttatcaatgcggataagcgtgaatgtccggatggattgacattgcgcggactgttcctcgactacgtaaggcaacagacagctgcaggcaagaagattacctctaaactggatggacgtatcaccgttgttccggcatccgaccggaaataaaaaaatgaaaagagaataaataaccaaggtttacaatgaaatctcagtatcctatgacaactcataatcatataacttccgtcttgaatatattcaaaggaagaaccggaaagtggctgatgcttttcctccttttactacctgcattggcaactgcccaagaaacaaaaaaactaatcatactgcaaaccagtgatgtacacagccggattgaacctatgactcaggaaggcgaccggaactacggtcagggtggatttgtccgtcgggcaagtttcctgcagcagttccgcaaagaaaatccggatgtactgctgttcgattgcggcgatatctcgcaaggcactccttattataatatgtttaaaggtgaggtagaagtcaccctaatgaatgaaatgggatacgatgcaatgacaatcggtaaccacgagttcgatttcggtttggacaacatggctcgtctatttaaattagccaagtttccggtagtatgtgccaactatgatcttgatgccacagtactcaaagatatcgtaaaaccttatgtcattctggatcgtttcggcttgaagatcggagttttcgggttgggagcgaagccggaaggactgatacaggccaataaatgcgaaggggtaatctataaagacccgatcgccgtatccaatgacattgccgcacaactgaaagaagaaggatgcgatgtcattgtatgcctgtcacatctgggtattcagatggatgagaagctggtagccaacacccgtaatatcgatgttattctgggtgggcattctcatacctttatggaaagccccaagaattatctgaacatagacgggaaaaatgtccccgttatgcacaccggaaagaatggaatttatgttggacgactagatttgaccttgaataaaaaatgagattactaacatatatactggctatcctgctatttcttcctgtcaaggccaggggagaagcaatagatactcccgtagaacctttactactttataaagctaaacaagatgtccgttgtcaacaatgggtagactccattatgaataagctgacgcttaaagagaaagtcggtcagttgtttatatatacgattgctccggtagataccaagcgcaaccagatactgctgaaggatgccgtcgatacctataaagtcggcggactgctgttttccggtgggaagatgcagacccaggcggaactgactaatcgagcccagcgcatggcaaagttaccgttaatgatcacttttgacggagaatgggggctggcaatgcgtctgcgtggtactcctgtctttccccgaaatatggtgctcggatgtattcaggataataaattaatctatgaatacggtcgcgagatggcacgccaatgtgcacagttaggtgtacaagtcaactttgctccggtggcggatgtgaatatcaaccctaagaatccggtcatcaatacccgttcctttggtgaagaccccgtgcaggtggcggataaggtagtagcttatgcttccggcctggaaagcggaggcgtactttccgtctgcaagcacttccccggacatggtgatacggatgtagactcgcacaaaacacttccggtacttcccttcactcgcgaacgtctggacagtgtagagctccatccttttagagaagcgatccgtgccggattgagcggtatgatggtcggacacctgcaagtgccggttattgaaccgataggcggacttccttcttctttatcccgtaatatcgtatacgatctgctgacagaagaatttgctttcaaaggactgatcttcacggatgcacttgccatgaaaggtgtttcggggaatggaaatgtcagtctgcaggcactgaaggcagggaatgatatggtactggctccccggaacctgaaggaggagatagccgccgtactcgatgccattgataagggagaattgacacgcgaagatattgaagagaaatgccgcaaagtactgacttataaatatgtgctcggactaaaaaagaaaccgtttgtccagctatccggtttgggacaacggatcaatactcctcagacacgtgatttaatccgccggttgaatctggctgcgattactgtgctgaataatgaaaatcatgttcttcctttgcatacgaatcaaaaagaaacgatggcattgcttgaagtcggtgatgcgggtgaaaccaatgcattggcggaacagttgtcgaaatacacttctttgtcacgtttccgtcttcgtcccggtatgacggaagaggcgaatcagcggttacgggactcattggctgcctataaacggattattgttgccgtaagtgaacagaagctgtcaccttatcagaccttcttcggtaaatttactactgaagctccggtcatctatgctttctttacgcagggtaagatgatgttgcagatacagcgtgcggttgcccgtgcctcggcagtggtgctgggacacagccctaatgaagatgtgcagcggcaggtggcggatgtgctctttgccaaagctacggcggatggaagattatcggccagtcttggagaactctttcaggcaggagacggtgtcacgattactccgaaaacacctttgcattttattccggaagaacatgggctttcttctgtcgccctgcaacgaattgattcgatcgctttggacggtgtacgtcagggagcttatcccggttgccaggtgatcgtgatgaaagagggtcatgtgatggtagacaagacattcggcactcacaccggaacgggaagcacacgtgtgcagccgaccgatatctatgacttggcttcactctccaagactactggtacggtgcttgctttaatgaaactttacgataagggacgttttaatctgacggacagaattgcagactatctgcctttcctccagcatactaacaagaaagacataaccattcaggaactgctttaccatcaatccggcttgccgcccggaattgctttttatcgggaagccatcgatgaagatagttatgaaagcagactgtttatgtcccgcaaagatgcacggcatccgttgcagttgggaacttccacatgggcgaatcctaattttgcatttaaaaaggaatatgtttcaaaggttaaaaccggagattacaccttgcaaatctgtgatagtctgtggctgaatccttctttcttcaaggaaatggagaagaagattgcagacgcaccgatgaaacctaaaacttaccgatacagcgatgtcggttttatcctgttgcgtcttctggttgagaaacttgcgggaatgccgatggatgcctacttgcaacgtgaattttatgaaccgatgggactggaacgtacaggataccttcctttgcgccgttttccgaaatcggaagtcataccttcttctgtcgaccgcttcttgcgtaagactacccttcagggatttgtgcatgatgaggctgccgctttccagggaggcgtttcgggaaatgccggattgttctcgaatgcacgtgaagtggcacaggtttatcagatgttgctgaacggtggtgagttgaacggacagcgttatttaagcaaggaaacctgccagttgtttacaacggaagtttccaaaatcagccgtcgcggacttggatttgacaaaccggatacccttaatccggaaaagagcccttgcggaaagcatacaccggcaaaagtatacggtcataccgggtttaccggaacgtgtgcctgggtagaccccgacaatggcttggtttatgtatttctgagcaaccggatttatccggacgtaaccaaccggaagttaagccgtctagaaattcgcgaacagatacaggatgcgatctataaagcgattcaaagcaaataaaaaatgaagagcccctctgccgaagtagaggggctcttgcttattaatgtaaaatcaagtagttgctcgggttagaatgaaacacccacgcggaaaccgaagttgttcagtccgtctacactgtaatgcagtacatcagctttattggtaccatagctgtagtacagagcaaagtgcagacccggtccgtaaacccaagggaatacattgacacctacttcaggagaagcgtagaatccccagctgttttctctggcttccaacatattgaagttggaacggatcttagcatattcagcacctaattttgcactgacataaggttgtacggctccaccgcgattccattggtagcgggcggcagcaccgaaaggcaactggaacattgtgtgttgctgatcagttgtaacgtcacctgcacccatcttgaatgtttcgcgaggaatatactcgtggttgctgtgatagttcaggaaaagacccagacccaggttaggagtaacgaaataaccgccttcaaagttcataccccaaccgctggctttgtctgcaaaattgttgctcaatggaacattgaactgccagtctatattagcatatccattgtctgatagctgtgccttagccggcatggcaaaggcgatggcaatggctgctagcgccactaccttgaaatatatattctttcttgttttcataacagttgtagttgtttatttgttagtaagataaggtgactgagtgaatgactggttcactgcttcaatagcaagagtgcggttgatagctttagagcctgtttcaaatccagtcagatagcttgtccagactacaggaagttttttgccttcaccttcatctgctttcaggttcaccatttctgtaatgaatgagttggtgctatagctgtaagtcacagcgtacggatagtaccatccgccccagttaccccagtagctgggtccccagtagccgggatatccccaccaccattcgggttgagaatagttggtgaaataataagtacttgcgatgtagcttacctgaataccaagatcggcactttctttatcggtagccggttgataacctttcgcttccatattttctgtgtaagcagccagaatttgcttagcgccttctccttcgagatattccggttctttgctgtcagagataaccaagattttgtcagccagatagaatgtgctgaagtctttgaagttggcttgcttgtcgtagttagtgtataccagatagttgtcatccagcttacccatgtccgggtctttttcgcaagaagcgagtgcaaagaccgccaataaaataggaattaatttcttcatatcttttataatgtttaggttatataaaaatcacgccctggtaccttggggcttttgttacaaacaacaagaaatgtgtaaaaaggttcgtgcaaatgattatctttgcgagaaaattaacactcaaatgcttatgaaacacattcggatacctcttttcgtatggttctcaatcgtgctgctgatcgcagctgcgcccgtctcattgtcggcgcaggaatcgtttattcagaagatcgaaaaaaataagtccgtcagcggaataaagtcgctcgacaccagccgcttcccggaaaagtatgtaatgtacctgactcagccgctggatcatcgacatcccgaaaagggaagtttccgccagcgggtgattgtgggacacgtcggttatgatcgtcccacagtgattgttaccgaaggatatggggcagggtatgctctgcgccccacttatcgggaagaactttctgaattgttcgatgccaatatgatctttgtggagcaccgctactttctcgaatccactcccgaaccgtgcgactggcaatacctgaccgcagagaattctgccgaggatttgcatgccgtgacaaccgctttcaagactttatatcctggcaaatggatcagtacggggatcagcaagggtgggcagacctccttattataccgtgttttcttccccgacgatgtggatgtttccgtgccttatgttgctcctctttgttatgcgcgtgaagacggtcggcacgaacctttcctccgccgggtaggtacggaagccgataggaaaaaaatagaagatttccagttggaagtattgaagcgaaaggctcgtttgttgccccgttttgaaaaaatgtgtactgaaaagaactatacattccgcgctcctctggaagaaatatacgatttctgtgtgctggaatattctttctctatctggcaatggggaacggatatccgtagtataccggaaatctcggcttctgacgatacactgctggatcatttgctggcaatcagcggaccttcttattttatagtagacagcccgactctttctttcttcgtgcaggctgcccgcgaattggggtattatggatacgatatcgctccttttaaaccttacctttctataaagaccagcaaggattatctgagaagactgatgttgccggaagatatgcggaagatgaaattcgataagacattgagcaataagattgtgcggttcttgaagaagaacgatccgaagatgatttttatctatggtcagaatgatccctggacagctgccggagtaacatggctgaagaataaaaagaatattcatgtttttgtagagccgggaggcagtcatcttgcacgcatcggtacaatgtccgaagatcagaagcagaaagtgatgtctcttcttagagggtggcttgaagaatgacgaaacgagaaacggtgaacaacctgtaatatatgaacaggcggttcaccgttttattcttctgcaagccgatattacatgtatcgggctgcttgatttaggaatctaccgattcgaatagcggtttcagtaattccggtatttccactttttcaagtgctaattgtcggactagttttttaccgctctgactgagatggaactgcatcagtcttcggtcctcttctccgagtgttctgacaatcagttctttttcttccagaatccggagcatctttgaagcgtgagagggtgtcagctccgttcgtttggacaggctcgtggccgtcatattattgggcgaggcttcttgcagggcacataatatcatcgcttcatttaatgatacctgatacactttttcaaatgcatcttcaaatcttgccattgctttgaatacatcgcgcattacacatattgtcttcatatgctacttgtttttttgtttgttctttttctatataaacaggttgatatttgcattatccgcccgttccatgtatgttgctactccgcctattgtcacttcgtccagaagttcttcctgtttcactcccatgacgtccatggacatttggcaggcgataaattccacaccgttctccagagcttgttggcgtaaggactccagagagtcgatgcctttccgattcatgatgtaccgcatcatttttcctcctattcctcccatgctcattttagagagtttcaactttcgggagctggaagggagcatcatgccgaacatttttccaaagatatctttttcgacgttcggcttatgcagcttcttgataacgttcagtccccagaaggtgaaaaagatcgttaccttttgtccggtggcagctgcgccattagcgagcacaaaggtagctaaagctttgtctaaatcatcactgaacatgatgaaagtttttcctttgccttcacaggaggtaacaatattgcaggatttaggttcgcccttttcgatcactactacagattttcctcctgctgtttctttggaaatcaactgatttcctgtcgagttgcaccatgcggcagcatcacgcgggaatcccggatcggttgaggtaatttctacccggtcgccggaaaccagcgaatccattgtctttttcattttcagaatcggccccggacattgcagtccgcaagcgtctacacggattgtcttcactgcttcaactggtgaaactgtcttttgaggttgcgcatctgccggctgttgtatgtttgcgttcggttgtgcaggtacttcgttctcactttcttctctcaggatgatgggtgctgcggcagcgtggtatgttttcaatcctccggaaaggttgcgtaccttttcaaatccatgctgtaccagaatgcgataagcaaggtatcctctgagtccgacggcacagaatgtatagatcatcttgtctttcggcagttcatccagccggtcacgcagttcgtccagcggaatgttcactgcacctggcagtgtattgagcgagaattcgtcaggagtacgtacatccagcaggaaattgttttccatctcgatatccctcaactgtctccaatagacgggttgtactttcccagttatgatgttttcggctacgtatcctgcaacggctaccggatctttggcagaagagaacggaggggcgtaagcctgctccactttcatcagatcatagatcgtaccttcatgcttgatgacaagcgcgatttcgtcaatgcgtttgtctacaccgtcatagccgacgatctgtccgccgtacagtttacctgtcttcgggtcgaaagtgattttaatactcatcggcatggcatccgggtaatatcctgcgtgagaggacggatggatggtcgaagacatataattgatttctgcctgccgcaatcgtttgccgggtaatccggtagaagcaacagtcatgtcgaatacttttgcaatggaagttccgatggctccttcataagggatgtgtgctccctgaatgttgtctgcgacaattcgtccctgacgattggcgggaccagcaaggtaattgagccacggctttccggtgatcgggtggcggaattcgatagcgtcaccgatggcgtaaatcgattcgtccgacgtttgcaggtagtcgttgacggcgattcctccggcttcgccgatcttcagttctgcggcacgtgccagtgtcgtttccggacgtacgccgatggaaagtataacgatgtcggcagagatggactgtccgttcttgaagatgactttcaatccttttccgtctctttcaaaagaggctactgcctgctccagatacaggttcactcctttgtccatcaaatgctggtgtacaagggatgccatggagaagtcgatgggagccatcacttgattgcccatttccacaatagaaactttagctccttgtgcgtgcaggttctctgccatttccagcccgataaatccggctccgatgacaacagcctttcggggagcatgactgttgatatattctttgattcggtctgtgtcggctacattcctgagtgtgaagattccgttcaggtcgattcccggcaggggaggacgtacaggggaggctccggtcgatatcagtaatttgtcgtagctttcctcgtaagtgtctccgctactttgtcttaccgttactgtttttctcttccggtcgatgaagattacttcattttcagttcgtacgtctacacgaaagcgcgtagaaaatgcttcgggggtctgtacaaacagtttttcccgttctttgatcacgcctccgatgtaatacggcagtccgcaattggcataagagatatactttcctttttctaaaaggatgatttcagctgcttcgtttgtgcgtctgatccgggcagcagtggtagctcctccggcaacgcctccaataataatgatcttcataagtttgttgcgtaaatagtttcctatggaaataacaataaagtagggagaattgttctcggatcatagaaaaaagacttatatttgcgcaccctgtttgtctttcttcattttttataaattaattatgagtaaaattcttatcattgacgatgaggttcagattcgtagcctgttggctcgtatgctcggactggagggttatgaggtgtgtcaggcaggtgattgcaaggcagctatcaggcagttggaaattcaacagccggatgtggctttgtgtgatgtctttcttcccgatggaaacggggtcgatctggtgttgaacattaaaaagacagctccgaatgtggaagtcattcttcttaccgctcacggtaatatacccgacggagtgcaggcaatcaagaacggtgcatttgattatataaccaaaggggacgataataataagattatccctctgatcagtcgtgccgttgagaaggctaagatgaatgtccggttagagaaactggaaaagaaagtcagtcagctatattcttttgattccattctgggagaatcgaaagtgctgaaagaagctgttatgctggcacagaaggtttcggtgactgatgttccggtgttgttgaccggagaaacggggaccggaaaagaagtatttgcacaagccatacattataatagtaagcggagcaaacagagctttgttgccgtgaactgttcgtctttcagtaaggaactgctggagagtgaaatgttcgggcataaagccgggtccttcaccggagctttgaaggacaagaaaggactcttcgaagaagccaacaacggtacgatctttttggatgaaatcggagaaatggcttttgaactacaggccaaattgctgcgtattctcgaaacaggcgaatatataaagataggagatacgaaaccgacgcacgtgaatgttcgtattattgctgctaccaaccgcaatctgacagaggaaatcaaagcgggacgtttccgtgaagacctgttttatcgtctttcggtatttcaggtacatctgccggcacttcgcgaacgtaccggtgatatcagaattcttgccactgcctttgcaaagagcttttccgagaaactttcgtatacggtcaatgagatgactcctgcttttcttcatgcgttggaacagcaaccctggaaaggaaatatccgtgaattgcggaatgtgatagaacggagtctgattgtctgcgaaggcgggcatctggatgtgtgcgatcttccgttggagattcagaatactcattatgaatgttcggatgataatatcggtagttttgaactggctgctatggaacgaaggcatattgcccgcgtcctggaatatacgaaaggcaacaagacggaaactgcccgcttgctgaagatcggtcttaccactttgtacaggaagatagaggaatacaaaatataataatatgactatctgatttcttttttaggggtatatgagcgattaatcgttcatatactgatctgtaatgtgaaaaagaaatagaagatatgaatatttggaagactacactgttacttgttttattatttactggtatcaccgttcatgcacaaaaagtaaaaatttcattgaatagtgatggaaatctgacgatatggaaagtgaaagctcaggcagaaattgagcatccttctgatatgatgactacccgatatgacacgagggattgggtcaaagcaactgtgccgggaacggtgtttggttcgtatgtattagaaggactggagcctgatccgaattttgctgataatgcgtataaagtcgataaagcaaaatatgaccgtaacttctggtatcgtacagagtttaattcgccggaggtggaaaacggagaaagggtatggctaaattttgaaggggttaaccgtaaaggagaaatattttttaatgggacgcgtctcgggttgcttgatggatttatgcatcgggggaatttcgatataaccgatttgctgtcaaaaaacggtaagaatgtgcttgccgtccttgtgcattgggtaggcactccggttcccaattatgcaagtcctacttatatgtcatgtgccggctgggattggatgccttatgttcccggtcttttgactggtattactgacgacgtctatttgacaaaaaccggcgaagtgtctatcgtcgatccttggatacgttcgaaagttccttctaaaaacaaagcggttttaagcttgcagttggaactacggaatcatacagatatagagcagaaaggagtgttgaaaggtatcattcagccgggcaacattgaatttaccgaagatttggtaattgaggcaggcaaacagcggacttttcttctggatgatagcaagttcagtcaatttataattcagaatcctgctttgtggtggcctaatggttacggacagccgaatctttatacctgcgaactgacttatatggtgaatggtaaggcttctgataaacagaatattacatttggtattcgtgaatacggttccgagctggttgacggtgtgcttcatcttaaaataaatggtgaacctgtttatgtaaaaggaggaaactggggaatgagcgaatatatgttgcgttgtcggggtgaagaatatgatcttaaattgaaacttcacaatgagatgcattttaatatgatacgcaattggatcggttcggttacggatgatgagttttatgaagcttgcgataaatacggcattatggtgtgggacgacttctggttaaattcaaattcgaatcttccggatgatgtttttgctttcaatatgaatgcagtggaaaagatcaagcgtttgcgtaatcatgcttgtattgcagtgtggtgtggtgataatgaggggtatccgttaccgcctcttaataagtggctggaggaagacgttagaacatacgatgggggtgatcgggcctatcatgccaattcccatagtgacggcctttccgggagtggaccttggactaactctcatcctaactggtattttaccaaagccccttatggatatggtgccaatataaccaaaggatggggattccgtacagaaataggtacagctgtctttactactttcgatagctttaagaaatttgtgcccgaaaaagattggtggccacgtaatgaaatgtgggacaagcatttctttggcaattcggcggggaacgccagtcccgacaaatatttctctaccgtagagttcaattatggtaaagcgaaaggtattgaagatttttgccggaaagctcaattagtgaatgttgaggtgaataaagcgatgtacgaaggctttcaacatcatatttgggaagatgcttccggcatattgacttggatggggcagtcggcttatccttcattggtatggcaaacctatgattattattatgacttgacgggggcttactggggaatcagaaaggcgtgtgaaccggttcatattcagtggagttatgctgataatagtgtaaaagtgatcaataccactttgaaagagcagaaaggacttacggctacaggtaaagtctataatctggatgggaaagaaatggggcgttatagccagtctgtagttttggatgccgccgctaataaggattcctattgtttccatctgaattttacaacagacaaccttgctttcggtaagaaagcggttgcttcctccatttcggcagatgccggagagccaagtgccgcgattgatgccagtgatggcagtcgttgggcgagtgaaccccgtgatgaagaatggatttatgttgatctgggtgaacctactgaaatagcctctgtcatattgaactgggaggctgctcatgcaaaagcttataaactgttgatttcggatgatgcaataaactggaaagaaatttatatcaatgaggactctaaaggcggtgtcgaagagattaagataaaacctgtttgtactcgttatgtgaaaatgcaagggttgaaacaggctactatgtggggatattcactttatgaatttgaattatatggtagaaaaaagaagccaacggatttgactcctgtgcatttcatcaagttggaactgaacgatgaaaacgggcaactgctttctgataacttttattggcgttccaataaaccgggagattataaagcattgaataatttgccgaaagccaaattgcgcacaacatcaagcttagtggatagtaatggtaagaaagtgattaaagcaaagatcgaaaatgtgggatcatcagtcgcttttgctgttcacgtacaggctattcgctcttctgatggtgagcgtatattacctgctttgatgaacgataattatttcacattgttgaaaggagagtctaaagatattgaaatagaatttgattcggatttgttgcctgatggtaattatagtttaagtgtgattccttataataaataatatcgggcggacatttctttaaatgaggtaaacacggttgtagcaacatcggttttatgacttggttttaccagtctttgtgtttgtctatgatttttcaaatgtagtcgtgattcatcataaactttaagaaaagtttattgatgaatccgctacattaaaatgcctcatagaattgtgaggatgccggcagtgacgggagtatattatgataatgccgcaatgcctgtccctatcaggtttgcgttattcatactttttatatccacttcaatatcttccagaccgaataattgaaggagttctctcagtttttccataacgagaatgttatagtttttatccttcctgttttcactccagaaaagactgccttcggctaccaggcaaacctttcgtatatccttattataggatttcagtaacatgataagcccggtcagtgaggcggcaaccaattgtgcggatctgccataaatccattgtgctacctgtacatatacatccttgtagatgtccgggtaattcataatggaagtcagtttctgtgcgtcgaatttctcttcgaactcttccagcggaaaggctgttttcagtatgtctcccagatacataccggataccgctttctcaaaacgttgctttcccggattaccggaaatagcgtcaacggtatcatctaccgcagtcagaaagggcggatggaaattgcctgattccagattgacaggaatcaatccatgtgcattgcatgactgatccagtttttcaattttatcggcagggataaaagttgccatattggttcctgtccctacgatgaggccgatatatgcatcataactattatctgtgagaccggcgaataaactggctatagtatcgtttactaccttgatgcctgtaaacttaattttgtttctttcattcagatagtcgagtaaaggttttccgataaattctccaaccatttctttaatatctactccttttgtccagcgtaacagtttggcgtctccacccggtacggactcggccggataagaaaaacaataaccgataggcatttcttcctcacgtttgattcctataatcatatcggcgagttctttgaataactcttcgcgggtatatccgacggacttcataattgacatgtcttttttccagccattgttcgggtgaacggttggtgttgctttgtcgaaatctacgattgccacccgataattggttcctcccaggtcaagtaccagtgactttcctttaatatgggttgtttttggagcaatgaaagtaggaatgcattgtatctctgcattttccgtttttaacccttcttctgttttatcccgaaatgagcatacaatcgctttgagctgttcattatctaacttaaaaatgtttttttccatgacattgactttttatagtataaaatatccttgtctttgaataacaactgaaggtggattttgctcgggaatgcccaatctttatttgcctgtatctgataattatgtatttgtttttttaattaataaaaactatatttgtttgaaaaataatttgatacatgaaagagcggtctccagttaaaaagaatatactaaaattgattccttttatagagattattgcaggaatcatttttctctgtttggagattcatgactatcgtactttgtattctatggccgaagctgatgcaatgtatgggggacttgctgatttttgtaagtacaaagagaatgtattttgtccggcatttttctggataattgttatactgacaggaatcagttattggaaaaataaaaagttatattggattttaacgcaggcattggtgtttatggtcttttttagagctatgttttcgttttatgccatttttatagagttaaatccagtagtcttttatattcttccacttttgtactctacagtattctttgtggtagaaagaaaattattcaaaatcaagcaaatagattctgttgatattacagttaaaacaaaaatcatggggatcggaataggtatcttatgtactatcatttatttcctgctctttttgaccgttttttgcttaatatgatagccgtctatatttatttctccacagtaattcaacgcgacttttgctctcatgccctaacagattgtctgtatgcctttattcatctta

SEQ ID NO: 4540 - DNA, 1248 bp, Unknown
  gut microbiota DNA sequence
acctcgtctattgttgggagatagtcagattaatggaggatgtaaattaaactgtgtcagcaaggaataaagtattaactttgctaacacagttttttttatgaaagaagaatttgatttcgagagtatcaagaacaaggccattgaacagctgaaagccggcaagcctttgttgggtaaggacggcgcctttgccccactattggaaagtatattgaatgcagccctggaaggagagatggatgcacatttgacagaagaagaacgccagatgggtaaccgtcgtaacggaaagatgcaaaagcaggttcagactcccttgggcgaagtaaccgtttccactccccgtgaccgtaattcgagttttgatccccagtttatcaagaagcgtgagactattctggcagaaggtgttgctgaccgtataattggcttgtatgcaatgggaaacagcacaagggaaatcagtgactggatggaagaaaatcttgggaatcgtgtttcggccgacacaatcagttccatcacagaccgtgtacttccggagataaaagcatggaaatcacggatgcttgattctgtttatcctatagtctggatggatgccattcattacaaagtaacggatgaacgtggctgcgcggtaacccgtgcaatctataatgtactgagcattgacagggagggacacaaggagttacttggaatgtatatatcaaggaatgagggagcaaacttctggctcagcgtgttgacagaccttcagaaccgtggagttgaggatattctcattgcctgtatagacggtctgaaggggtttcctgaagccattcaaagcgtttatcctaatacagccgtacagctttgtgtagtacatcagatacgtaactccatcaagtatgtaggatccaagaatcagaaggagttcttaagggatttgaaatgtgtctatcaggcagtcaataaggaatccgcagaaaatgagctcctcaagctggatgaaaaatggggtgaacagtatcctgtcgttatcagatcctggcaggacaactgggataagctgtccgaatacttccagtatactccggtcatccgtaagcttatctataccacaaataccgttgaggggtatcaccgtcagatccgcaaggtaacaaaaaacaagggcgtgttcccatcggatacagcccttgagaaacttgtttatcttgcataccgcatatacggcactataaaatattttgtgta

SEQ ID NO: 4541 - DNA, 105937 bp, Unknown
  gut microbiota DNA sequence
acatttaatggatggcgtggttatggcaaggacagagttccttccaaatggactatcgaagacggttgcatcaaatttaacggttccggtggcggtgaagcgcaggatggtgatggcggagacctgatctttgcccacaaattcaaaaacttcgaactggaaatggaatggaaggtttccaaaggcggtaactccggtatcttctatctggctcaggaagtaacttctaaagataaggacggtaacgacgtgctcgaacctatttatatttccgcacctgaatatcaggtattggacaatgacaatcatccggatgcaaaattgggtaaagacaataaccgtcagtcggcttctttatatgacatgattccggcagttcctcagaatgcgaaacctttcggcgaatggaacaaggctaagatcatggtttataaaggtactgttgttcacggacagaatgacgagaatgtactcgaataccacttgtggaccaaacaatggactgaccttttgcaagccagcaaattcagccaggacaaatggccgttggctttcgaactgctgaataattgcggtggcgaaaaccacgaaggatttatcggaatgcaggatcacggtgatgacgtttggttccgcaatatccgtgtgaaggttcttgactaatgtaatatatcatgaaaacgaactatttattaatcttattcgcattgctgctggcaattccgcaggcagcagatgcaaaaaagaagaaagacattgccatacaactctattcggtcagagacatcataaataatggaaccgacctcaacgtagttttgaagaatctggcgcaaatgggatacaccagcatcgaagccgccaattatgataatggcaagttctatggcaaaactccggaagagtttaaaaatgctgtcgaaaaggccggtatgaaagtactgtcttcacactgttccagaggattgtcggacaaggaagtggcttccggagatttctccgagtcactgaaatggtgggatcaaagcattgccgcccataaagcagcaggcatgaaatacatcgtaaatccgggaatcggtgttcctaaaacaatgaaagagatgaagatgtattgcgactatttcaatgaaataggcaaaagatgtcaacagaacggtatgaaatttggatatcataatcatgcgcatgaatttcagaaagtagaaaatcaagcggttatgttggactatatgattgagaataccaatcctgagtatgtcttttttcagatggatgtatattggatagtcagagggcagcacagtcctgtggactatttcaacaagtatccgggacgtttcaccgtgcttcatatcaaagatgacaaagaaatcggagatagtggtatggtcggattcgatgctatcttcagaaatgcaaaggttgccggcgtaaagcatattgttgctgaaatagaagggtacagttgtcctgtagaggaaagtgtcaagaagagtttggattatttgctcgatgctccttttgtgaaggcgtcttatagtaaatagaagtaaatacagaaataaggaaacagtaggttcacgcatcattgcttgagtctactgtttttttcttagtactgcccggctattattctgaaagatatgcgaagtatttatataccaaatcatcgatggcactataaaagaaaacttcttcaaaactacatgaacttattattagaactgctaataataaggcaggtatcacaatatgtgtttgggaaagttctaatttttaaaatattagtttgtaaacttgttaacaaagacagaattatcttttaaccaggctgctgtaaagaaaatggggaccccaaaatcatttggactgatatcagagtttatataatccagtaggtactccaaagggttatccggtgttatgttttcattggcaagaggatccaaaattagtcctctgattattgagctagccataattgatttgcttttttctgatatatctcccttcttggtagtggatttatttaagatctcattcaacgcaacctttacatcctgataattaagatccgattcaacaattagaattgatcgtcttccaaattctatagaaccaacataaataagttcgcttaattgctcttggactatcggagagttgctcagttcctcctcaggcatatccatagcaatggaaaaataactctgactaatatctaatactgccactgttttatgaattggattaggagatgttattttgaataagtcggatagatctatttcctcaccgaaaaataaagctagctgttcataagaatctatctgcttcaacgtaaatgaaaactgatagttaggtttcaatacattattttcttgcagcttttgctgaatagccctaagcatattatcgtatgaaggtataatcgtttcggattttaaaggcaaactatagctaattgtaataggattcattgacacattaagaagttgatgtacatcgttaacatcattcgctttcataatactgccaataaatacctcataaggatttttgaccgcaaacttggttgacgtatactgattatgttgagcaaaactgctaacatggagaatagaaaagaaaatgatatatattattactgctttcatgttttctatattaaagtttaacttccgggattaattcaaatgtgtactgtactcttagccacgccacctgattctttagattgttactgtttccacccaaatatgtaaccaattcggaatatgataataatgaatatttctgccctatcaccgataatgaaccatgcatattgttatcctttacccaaaagaaacctgtattaaggataaatgtgatttccccatctttacttccacaatagtcccatatgccagtaacgccattgtataaatataaatcacccttattccattcggctttatactcctgaattaacccgcctcgtttgatgattgatacagaatcatttttgaatataattttttcaggttgaaacattgtcacacgatccccaaaatacagactggacttatcaatatctactaccccaggttcctgtccagctggtttatactgtaattccacaatattcatggatttcgggtaatagctcaaaacgtttattgatggctgctcaatgatcttatggttatcatcagagcaagatgtagccgcaattgacacaaacaatattaataataaagaatttaaataccgcaatatcactttatcgcaccctataatctgcaggcattgcctactttggctcactgaaaaaaaatcaagtgtatttttagatatgctatctaatgttactaatagggataatggtgcttttctttttatcatcgctaatatttttataataagtatattatatataatattttatcctgactaaatatgttttgtttgcagggtttacctcacaaacatataaaaaacaggaatgttctcatacaaacccaatattactcccaaaagctgagatttaacactttcagtatatttgaatctctttacacaaccggacctgaaacggtttaaataaggagcaaacttaccggatttattgatataactgagatcaaaaagcaatagcaagacgactacctaactgagatttggccaagtactgtttaatttcacaaaaaaatagcgcatctctaacgaacgaggtgcgctaataatatcccaccgaaataagcttatagatttatatattaaattcccaatatagatttaagtttctgcagatctgcagcttgatcactaatccgtaataattatttctataaattactcgctaatcattctccttatcaaatctctattcctcggatcatccgcattgatcacctctccatctccacgaccaaactttttacgttcttcctcgctaattttcttgtaagtccagtacttattcttacctttgcatcgtcttaaccgacaagatgtttttaccaattcataaggaagagttaattgtttttcccacacaaactaaaaataatcccttatcttttagcaacttcatctgtatgaattaatctgttacatttgagcaactatccagttacacttgtgcaatattccagttacacttgtctagcaccgaagttattcaactgcatataatcaatggctattcaaaaaaggaattattatgagcatactttacaaaacaacccgcttcgcggatacattcacgggagataaggagacaaatgtccgggcacaactgttatcatgggatacactggacaccaaagcattcgtagaatatctggcaaccaaatacaacctatccaaaggagaagcatacaaaagcctcagcatagtactggaaggaatggaagccgtactgaaagacggaaacatactcaatctggacgacttcggcagtttctctctaaacggaaatttctgtgaagacaaagagccagacgaaaaccacagggcagaatccatccaagtgaaaaacgtagtttttaaagcggacaagaatctgaagaaacgtatttcagctgccggatttgagaagtacaatccaaagaaacacaataaacggaaatattaactgcatggaatacgatcgaatttactccatccggaaaggagaatactttgcggatgcgctaaaacgtgcaggaaaagattttattcctaccaattgcatcatcaacaaactgctgccgggactgggtgccacgcactgtgaactcacagcaccacgcaaatccattatcatcgaaccgaatgtacccgtcatcgagtcgaaagcaagggtacataagaatgcacttgccgtctataaaggtgtaagcatccggcagatcgccgactttctggaaacaaaccgggagaaggattacaaactactgactccccccgaaggcttcaacaagataaaggaagccatgcaaacggtggatatagatatgtatacggaatgcttcatcttgtttgatgaatgcgagaagctggtacaggacgtgcactaccgtgactctatccgcgaaccgatgaacgatttcttccgtttccagaacaaggcactgatttccgctacgcctatcgtacccgaaaaggacagtcgttttgacggtttcatgcgggtattgattcagccggattatgtctatcggcagaaactgaaactgattactaccaacaatgtgctggaaaccctgcaggaagtgattgaagccaagagaggaactgtctgtattttctgtaacagtatagattcgatagacagcttctaccggttgatacccgaactaagcaatgcctgcacattctgtagcgaagacggacaatacaagctctggaaaggaaaccgccgcaaaaaatcaatgatgatcaccgaactggaacgttacaatttcttcacctcccgcttctactcagcggtagacatactctgcaaaaatccgcctcatgtgattttcgtcagtgacttgtatggtgctgcgcaatccgttattgaccctgccaccgaggcaatccagattatcggacgtttccggggcggagtcaacagtgtgacacacatcgcttctatccgaccggaactggaatgtatgtcttcttctgaaatcgatcactggattcagggagcttccaccattttcaacggctggaaagcgcaactggcacggactaccaacataggcgaacgcaccttactacaagaggccatcggagaaaactcttacctcccttatctggacgaaaacggaaagccagattcgtttctgatagccaacttctatgaaaaggaacaagtgaaacgcctgtacacctctgccgatctgctgcaccttgcttacgagcagaccggatattttgtcttctcgcacgaagaacgcctgatgccggtttcggataatgaacgcatggctatccagcatcgtctggcaaagaagaaacgggcagaactgatcgtccggaaactggaagagatggaaaagatgagcagagctaccgacaagaaaatacagaaaaggtatcagcgtatgttgatgaatctgattacttctaccgccgacaggtatatatacgactgtttctgccgcttcggagcggaatttgtacgggaagccgattataatgaaaataaattgcggacggcactaaatgtgagtagcgagcatacgattaagaagtccgggcaaatgcggacatatatccaacgtgcttttcctgtgggtgctgaaatatccgtgcaggaagcgaaaagtatgctcagacaggtatataaaaagatgggattaaacacgggacggggtataacgacgaaagaactggaacaatatgcggaaatagaaaacagcaggaatcgcgaagccagaatgattaaaatactgaaacacaaataaatgaaaaaaatgcagttttgatccggaaaaagacaaaaacatcctatagttttttgcaaacttattttaaaaacaaggcattttcagaggtaaaccactgattacaaacgctgtgacatttttgtttatccccgtataatacttagaataaagacaaaaatgtcacaagcggctaattctattatttgccgaaacatatttaggtaaaacggcaattttcccgaatcatgaatactttttcaaacgcctgcgtgcaaagagagccaaagcaagcacaacgcacaaacccgctccccatatccataacagtaaatctcccccttcggtctttccataagagtgcaagccgctcaggtagtagtttactccaaaccaagtcatgataatggagagaatggagactacggacagcaagttgaaacaccaggttgttttacctttcagcagcggaataaaacggatatgaagtaccagtgcgtagacaacaatagagattaacgcccatgtttctttcgggtcccatccccagtatctgccccatgagacattcgcccagatggcaccgagaaaggttcctgccgtcataaagaataagccgagaatcattgccatttcattcagtaaggtaaactcacggatacggaagagaagcttcacccgattggtggcagaaagcagattcatcaagataagattaaacagtcccgtcagcgcacaaagtgcgaagaatacatagccgatcatgataatggcgacatgagacatcagccaatacgactgaagcaccggaaccaaaggagttatttccggattcagatggttcagtcctgccacgaaaagcatgattccgcctaacagtccggcaagcgcagggagaatacggaaacgccgggcaaacaagaggcctccgccaacgagcagccaggaagtgcagatcattgattcataagcattcgcccacggtgcacgttcggagatataccagcgcagtaagacaccggtcgtgtgcgcaaggaaagcagcgatcagaagaacaatcagaatgctgcttagtctgctcccccatttgaaatccgcgataatctctccgcaggcaatgaaaagtaagattccgcccaaaatcaggtaagccagacgacaccagaagaacaagtttaactgattatagagaagttccgcttttactctctgattgtcaatagcgggagttttactttttgcctgctggaagatatgcatcatatcgacaatcttgtccgcttctttccagttattagtgcggacaccattacccaattcgtagatataccaatccatgattttagaaacaaacagggaatccttatcatgaaagacggtttgttcgtcacctgccgagtaccattttccctgagcgtcgttttcgtccgggaagaggggcagaagttgatgttgcataatacggtagacaatattcaccgattcatccaattttaacaaatccgaatccattcgtttccgttctgaagcggcttttgcatagatggcattcacttcatcggtcagcacataattgccatcggcatcaaagacatcctgccatgcgatgtatttgccgtctcttccgaaccgttgaagaatttctttattatcgaccttgataaaaggatagccaccccactcatccggaaaagcgagaagattcagaaagaactggtctgaattgatgttgttcagcttgtccgctccgtaaagtttgcgcagaatggcggaagtgtaactgttgacaggttcaaggcgaccattaggattgagcagtaccagactgccgaatttccgggcgtgcgaagcagggatgcaaggtagctgcgaagaagaaagcgtttcctgcgcatataacgcctgtgtacccaaagtaccggatagacctaagaagagaagcagacagaaaggagcactctttttcatctcccccagttctctgcgcaaacgaccgaaacgggacttcttactgaacagagtcagcacaaagccagcgaacagcaggaaatagccgatataggtaatctgcataccgggacggtcataactcacggacaacaccgtgccctgctcatccggatcgaacgaagactgaaacaagcgataaccatccacttcaatcaccttattcatccggaccgtagcctgcaaaggagtttcattccccttctttatcaccagatcgctttcgtaagacatcggactgtgagagcccggataacgctttaaccggaaatcatcgagagtgacagaaaaaggcagggaggcatttcccatccctaccccttcatcgcgcatcatgcggtccaccgtttccccctcacggatgtgcatgattcctgttactcctgcatagtgagtaacagccgcccccaaccagataaaaacaaaagccccatgaaagatcagacttcctttactgattcttttgaaataacctccctgaagaaacatggccaacagattgacagcctgcaagagttgcaacaaaataaaccacggagcataataaaagcattcgcgcgcaacggccggaccggacgaattttccacaaaagtggcgattgccagtaccaacgcataaactcccgctaatacgtacatcaaaatcggagaagcgatcaatcgaatcagtttcatcagttttctgtttttacaaataagcaataccttctatttctacaagcagttcttccctgcatacatcggcataaagatagacaataggaacatcgggacaaagtttgtccatatcttcttttacaatctttgcatcctcctcatgcttcagatacacacggagaagttccagcttgccggaatgttccggaagtttttctctcccttcttccaaaccaatcagatgctggatgttctccagcgtgatttccgtctgcacaagcacatcgcccgtcactatactttcttcaccacgaatggcggctgtgccggatatataaatcatctcgcattgatgatcggacaacgatttgcctctttcaaacttgggagttcccttctccgcatccgtccggtggctgatcaggacttcatccgaatagacatgagcagctttctgccaatcattatccaacgggataatctctattcctcctttgacagcattgaaatctaccagtattccaccatgctgtgtcccgattcctgtggccgccggatatccagaagtccattccgaagaagcataaaactgcgaacgtatatcattaaaatcctgataacactgattgccgtgcacaatatccgtgatgcgttccaaataattccactggcggacaatatcaccgaagctcatctgctccgctttcagaatttcttccgctttcccgaacacctgctccgactgttcgcggacaggaagagtcaaatcatcggcatagaatcctcccgctattatttcccgataatgaccggaagtaacccgaaggtagcggacggaagaagccatctgttcttctaccgtcacttcctcaccgacagttgccggcaacgaatggacttccatgaccagttctcccaccaaaggcttttgggctacgagcgaaagaaccggacggggagaaacgaaatgattgtccacccattgttccagaaaagaccgttggagctgatattcccgattatcctcacagaatgtaaagaatacaagacggaccacttttcccccatattcctttcctcccctgcgaacggctgacagaagtaattcttctgccattcgttcccagctctttcctgccgctttatagatttcacattttatccgataatatttcatattgcaaacttcaatgattttttatgccacagacatcaattaatgataagaagctactcccgccggcttatctgtactatatacggaagacatcgtctgtagttccggagtattctccagagagtagagcacattcttctggcggtctaccagcagcagatgtactttctctttcgggttcacgtgtcccgtccagttcgtaatcaggaaacgtccgtcggagaagtactgaaaacctccgagaaacttcaaaggctttccgggaatatccgcattcgatatttcccagatcgtttttccttccggagtcacttctatcaatcttggattctgatctttatcggcaacagctatcagcgtatgtccgttaggcagacgagtcagcgaatgaggaccgccgggaacatccagcttccacaccacctttccgtttgcatcatactccttcacacactggtctccataatgagctacgaggaaatgaccgttatccagccgccgtgcattacgcatgaatgcgaatccgccatccttcacgcctttcggcaggatgcaggtttctttcacaatcttccctttgggagatatctccagcatccgtccggtaacacattcgccaacgaaagtattaccattcttcagacgttggcaggcaaagaccggactttttgattcataatggaaaatggtatcgttctgacgggtcatttcgagtactccgtgtccggtggtgaagaggatattgccgttaggcaatatccacaaatcattggaatcgggcgctttgtgcttccacaccatttggttgttttccatcacaaatacgattccctgcgaataatcggctccggcaaacgtcttggtctgtgcaaacagagaagaggcagagagcagaagcgacaaaaacgcaacactacatatctttatcatattctttatcatattcatattaacaaaaaagagtatccaaaactggagctgacttaaaagtcggtactatctcaaatctcctccttcccgaaggaggagaatgtggatactaccgactttttagtcaccccccaattgaagttagtactgattttcaacataatcttactcaaagacaatatcgattccttacaaagacaatacgtattcttccagttcttccagctccttctcagtgacaggcttatgaggtccgtgaactttcagcatatccttcatcgaatagctacgaccatcgtaaagatagggagctgtacgccagcattcattcagtgccggaacatccatagacagtcccttgtccgggcccgttgtccagcctaccttatactgtttctgatccgtatagtactctccggaatggcagctcgcacagttttcctcaaaaatcttctttcccttctttgccttaccggaaagtttaccgttcacaaggtatgggcttggcaacggtttcagggatttcagatattcatcgatggattcgtatatttcgtcttcaccttccataaacagaatatacttcacacccgaacgtaccgctacttcggcattcttacggataccggtcgccatacagggcggagtctgatgcgaaagcaaaagtgtcttggtattcttcgggttacccataccgtcattcagcaagtcccagttaagtccgtccatgcgggcgtcattcggatgacaggtagcacagctctgccagttctggaaacaaatagtagcgtcatggaaatacatatcaccctttccgactttcgtgaaagccagcggagcacccaaaacctgcttcttcagattcttgccgttcaaatccatagacaccaattccgaagtataatagttggcagtgaaaatcttatctccggtagcaaccaccgaacgggggcctttcccctgtgtcgggataaagtcgcggataccatataagaatcccgcatcattcggaatattattccatgacttcacggaaggagtcaccatctccccctgctttgccttcgccagacgttcgtgcaaagcaatgcggtcaatacgaaccagttcctggcttccggcagcagctacgataatctgtttatcatccggagtgacaatcaccgaccacggattggcggctcccttctgaggagtatccaacaatacggaagtcagcaatttcctcgccttcaggtcgatgatggacagcgtgtttgtagccatccatccacggtccagctgattggtaggcaactgataacgggcaatcaagtgagtgacatacgcatacgtctgatttttatctaccgctacagacttcgcatcggtagcaccgttcggcaacatgatgcgtcctgtcaccttctttgaagggacatctacgatatcgagctgcactgcaataggataagccgtagaaggcatttccggcagattattggctatcagcaggcaagagtctcctgcaaacggagccatagccaccggttcacgaccgattgcaatctttgtctttaccttgcgggttgccggatctatttcccacaactcgttgttgaagcgctgtgtcacccaaagtgatttggacaccggactatacaagatatccgaaggcgtagcaccgctctttgtttttgactgcaccgaaagtttctttccatccagttcgtacatcatgccagtgtttccgtcgcataccacccagaggttgccggatgggtcttgtgtcatggcgttgacgggcgaagaaagggtcactttctgttccgccttctgtccgtcggacgacattttgattaattcattgcctgccctgttcgttacaaacaaggactttccactgtccgccagaaacaaacgatccggcgaaaccgtctttgcatcttctttccaactagcgcaaagaagtatagctatgatactaacaggtatcaatatctttttcattatttctgttgtttagtttgaagagattgaatgtactggcgaatattctcctgttcctccatgcgggcttgtttccgcttcttatcgtagcggtcgtaaaactcccggtcatgatccgaccagttgttcgcttcccgatagtcaccgatctgaggaacgagcaagtcgatccagagagaaactttacgtatctcctgtggtgtcagtttcgtacctccatgaccctcttccagacgcttgatcagattactcttgttggaccctgcaaaataaggaggcaacaaagtaggctgggacaaagcgctgatccagtttacttccggatgatgggcatcccctctccatgctctgtcgggaccatccggacgggcatgagtcagactgagatatgaatccgtatattttcttttactctgtttgtccactaccttcagttctcctttcaggctcatcgggtgtttcactccgtcatgacaagagatacaatttcggtcccagataggctgaatctctttcagatagctgaagttacgttctcccatttcatcttccggagccaatgccttgattcctttgtccattgccatggatacccgatgacctgccaccggaaccgtattcttgtgttcatggcatcctacacaactctgaacttcgttaggctgcaaagtagaccaactgcgcatcgtctgcactaccctgcccttttcgtccaacgcctggaagtaaagcggcctgcgggcaggtactttaaagaaagcggaaccgtcgggatatacatccgtcactccgatcactctcttcacgtcccaagcggcattgccgactcctaccggagaacttgccaatgcaccacctccctcatcattaccattcacttcgcctacaccggctgcacggaattgaatttctacgatacgaagctgtttgatcgttccgggagccactcctttcaagccattcccttcatagatattctgcatataatatactccttcattcttcgtatagtctacagaagacgaacgatggaacggacgtttacggggagcaagcaagatgggctgattgcaggatattttcgaatcggaaaccagcaattcacgttctccgtttgcattcatccagtaaatgccgaactccatcggatgtccgatatgatatcccagcggagtataggaaatcagaaactccgtctcgttcaacgggaaaggatgctgaaactggtcggtaaactgtccgtagctatctatacgctctgcctcgggtttgcgcaccggagcaacaaacatgacaccttcattctcatctcttccggcttcgggatcaataatacccaatttaccgtgctggggattatgatgtcccatgaaaacagtcatcactttacgtgtaccgggaatctgacgggtatgcgctaccgttgtcgggaaccagctgttcattccgtaatattcggcttgtcccgttccgtcaggattcatctgaaacaggggttgcgcccatacttgaccgcggtcattatagtcccaacgagtgtaaactacacgaccgtcatcaagtaaagtcggcgtagtagtatgcacctggtcgaaacctacctgacgcatataacgtccttcacggtcacagaggtacatattgctgacttcggtaaaccagcaatccaccgcacttccgctacgggtagagttgaaaagtatattctcatccggcagatagataccttcgatatcagcgtgtccttttccaaaagtcagttgcttgacttcacgtgtctttaaatccatctcatacaaatggaaatcatcgtcttttgcagacttcttccaggagaaaagcaggtgctgaccgtcaaaatgaagattcggatcacgatatacaccgtcttcgtccgtcaacagtgtttcttcctccgcccagataccattcatcttaatcttcgacagcgaaccgcctgcaaagtagttgcactctgcacgggcatcggaaacgccttcggtataggcaaagaaagaaggacgcaacgttctgaacttcgtaaaaacaatctccggctgattggcagtgaaagtttccaaacgttcggcacgtcttctctcgcacgctttcagataagacaggaaagccgcttcgatactttccggagtatcattgacagcagtagtaatgttcagtttctgcatacgaagggaaagttgccggctgaaagaacctctgaaccagtttacatctttcccgtcctttatgtctttcgcatcatttccatcctgtagccaccagtcataataaaccggataatcatgcatcaacatccggtgtgtatctctcactttacgttccagctcttccctgtgattctctttcttctttatcgtctgaacctccgcaaactgcttctgcatttcggcgataaaaccttttgtgtcggttggctggaaagaagtgtccttcgcctgccaggcgaggaatgggacgagcatgcaacatgccagcccccacttcaaccattttattaatttcgatcttatcatttcaaattcctgtttaccttaaatttacctttccgaaccggacattacagacctttcttcaactctttgtaagcttctacaatctgaataccgcttgaagtaccgatgcgggtagcacccacctgaatcaatgccagtgcagtatcgaggtcgcggataccgcccgcagctttcacaccgatcaccggacctaccacacgacgcatcaattcaacatcatgcacgttggcgcctgccgtaccgaatccggtagacgtttttacgaagtccacacccgcttcctttgcaatgcggcatacggtttctttctcttcgtcagtcaggtagcaggtttcaagaatcactttacagatcacaccggcaggtttgcagatagaaaccatatcttcgatttctttctttacaatgtctgtctgtcccttctgcaaagcacggacattgatgactgtatcaatttcggtagctcctttggcaatggcatcgcgggtttcgaatgccttgcactctacggtattctgtcccagagggaaaccgatggccgctcctacacgtacacccgagccttccagcagtttgacacaggtttccacttccgcagggttgatggctaccatcgcaaacttatactgacgggcttctgcacagagtttttcgatgttctccgctgttccgaaaggtttcagaaaggtatggtcaatcattcctgccagttgttctactgataaatttgcaatcacttcgtttatatttttcttttccattgttttgagtcgtttaatatgttagttaattgttagttcttaaaaagtcaatacacatttcaatacttcaccccgcttcacggcagcgaaggcttcttctatttcttcgattttgaaacggtgtgtgatgaagtcggaagcggaaagtgtgccttcttcaatccattgtgccagcgtggtcatagccgctttctcttccgaacgggtaggccactggtgcatatgcaggtcgaagttgtaaggcgccttcgacaaatcgaatgtcggattcttcgtcatgacaccatatacacagacatcaccgcccatttttaccaacggcaatacggaattgactactacatcgagccctacggcatcaatcacggcatcgtatgaacgaccggcagcagctataaactccggtgtgctgatttcggcaggtgtgtatccgttgtccgctcccatccggcgggctacttccaatttggcgggaagcatatcgacgatgtcaatctgccccaagccgaacagcttgcccaacttgacgaagctcagtcctacaggaccggagcctaccactatcactttctttcccggagtcaggttgaaatccttgaaagcacccagcacttcacgccaggtgcaggagatcaccgcttcttccggctgcacatgagcaggaactgagttctgaatttcaaagctgtcccagcatccctgttcgggggtagccagtccttcttctttcagtacctcgaaatcgttcaccactacatattcgctgaaaccgccccagccgctgttaattccctgcgcgccaaagtcggagatcagaccgccgatagcacggtcgcctactttaaagttgcgtaccttctcgcctacagccactacaattcctgcattctcgtgtcccagagccagaggataagtatctactccgggaaaatgtcccgcaatcagcttgctgtcggtcgcattgcacagtgccaccatttctgttttcaccaacgcctgataagcattgatgacaggagtttcgacctctcgtatttctattttgccgggagccggcacaattacagatttcatcgtattcttattcatttttataggttatagttcagtttttgctatctctgtgtacatctcacacaaggcgtgataagcctgatcgaaaacaggcatccacgcttcgtacttcttcacgttttcgggaataggctgcaccgtctgctcgatacggacaaaacggtcgattacagagaaatcagggaaaacacccgcaccgatacccgcaaggatggccgctcccatcgaagttgcctcttcgagatagttaggcacacggatttccgcctgatagatgtccgctatcatctgacgccagacaggattctgagcacagccgccgatcaccgtcatgcggtcgataggaacatgcttgcggaatatattgatgataaatccgagattcaaggttactccttccatcacggcacgcaacatatcaccatgtttatgtcccagcgtcagaccgatgaaagcccctttggcatcaacgttccagcggggagtacgttcacccagcatatagggaaggaacaggagtttgttcgcacctatcggagaagcaataatctgttcgtcgatcagttcgaacacgctgcgtcccgattgagccgccagtgcctgttcattctggcaaagctggttgatcatccagttgtaggatgatcctgccgcctgcatcgttcccgacgggtgcagcatgccgggcactacgtgcgcccagttcatggtacggcgttgttcgtctacaatcggcttttcgaccgtcagtgctacccaggaagaagagcccagatagttgtacgcagtgcccggagccacacagccgacacctactccggcacagctaccgtcgccgccgccacagatgacgggtgttccggcaagcagtcctgtctcacgggcagcttcgttggtgatttctccgatcacgtcaatcgatgaacggacttcggggaataaagaaagatcgagctctgcggcttctatgatctcttcactccattgccagcggttcaaatcgtaagcattggttcccgatgcatccgaaggatctgtggcgatagtaccgcacaaacggtagttgatgtaatctttcgcattcagcattttggcagtctgcgcaaagatttccggttcgtgattctttacccacatcagtttctccacagagtaagaggcgctgatccgatgtcccgtgatttcgtagaaatggagcggatctatcttttcggtcaactttgcttcttcttcctgcgaacgctggtcgcaatagagcatatgcggacgaagcggattaccgtctttatctacgcaaagacatcccatcatttgtccgctaagagctactccggcaatatcattgggtgataccagttcgagaagtgcctgtgttgtgtctacaatagctttccaccaatggtgcggattctgttccgcccggttgccggaagcatagtcggtaggataagcagcggtacgcgaagctatcaacagccccgattcatcgaacaaagtggctttgttcccgctggtacccaagtcatgtgctaatatatacattttatattttccttttcagttaattgaattagagtgccgcattcgtgtatccggtaaggccgacgaagattcctccgacaatgccgcccagtataataactacccaacggggaaacgcttctttcagcaatccgccgcgtgtgcctttcggtgcgcagagcacgtctgcaaagatgaatcccatcgcaatcgcccatcccatgtctacccagggggcactgccgcgattcccctgatggatcaggctgaattgcatcggcaagccatcggcatcattcagcaatccggtagagaagccgaatccgggcagtttatgattgaccagccagaacgttccgatgataagggcagctgctatgaatccgcctatcggaccgaagtccttcaccagtttgggccagctcatcaatacggtaaatgtcacggcaaaagctccgaaaatagtggtgatgattccggcatgatacataccgaacatctcattataggtttgtaaccattcgctcattgtgttctcctccttattttatctttcgggcacagtcgcacgaacggattttccaaactacaattcccgccagtgcaccgcctatcagacaacagaccagtgtaggcactgcataaaagaaattggtaatgtctccctgaaagcggacgattccccaggttataccggcagaaccgatacaccagccctgatcgagccatatttttcccggaggattcaagatcgctccgttataatgattcatataccacatgatgccgataatcagcgttgccgccagccagccgcccatcagaccgtaagtcttccagagttccggccagatgccgaaagcgaaaccaccacagatggcggagccggcaaaggtcgatagatagtatttcatattatagataatgtgttcttgggttgataatgtgttttcagattggtaatcaaggcttattccagtgacagtttagctagtgtgaaaggcttgtcgtgcttggtatttaccttgtccggtccggtcaccaggtcgaaacaggatacgatcacctgaccgttccatacgatgggttcgcccggttggtccagtccgccatcgcttccatcacaatcggggctttgggcgatacgctgaatctttccgtccttatctacacgggcaacggcatttgcagagaaatctgctacccaaatatttcctttatcatcgatacacataccgtctgtggtacgaagctgagtcgtatcctgtgcccagacatcgttgctgacaacttttccttctgcgtccatcttgatacgatggatagcgccgtcaccgaagttacccacaaaaaggtcacccgcttcgttaaacacgattccatccagtccgtattgtacttcagggttcttggtgattaccgtagtcaacaggttctgatctgccgaagtattggttactgcgatgtcacggtcgttcatatcaaagcaatatacaccgctgacaagcagaccggaagggtctttgatctgtgacaaagagctttgagtcacatataattttccgttacggatacggataccattgggatgctccatgccggatgccaccgtaatagtttccttcaactggtcattttcaaacttcagacgaagtacacgtcctttgttctttgctttctctgcaccgctccagccctgattatcactaatgaacaggtcgccctcttcattgaaggcaagtcccatcggagaagcccatccggtttcttccaatacaggcacatccagccattttgaaacggctccatccttagtaatacgcatcaggcaagcaggctgtgtgatatctgcaaaattgggacatgccagaatcaaatctccattgggagcaatggccatgccatccggtgtcggacaatagtccggcaatgatacaaacagttcactcttttggggaagagtattctctccactcttttgtttgggagaagtacattgaatacaagttgctccaatcaaagaagcggaaatcagagatagtaaataatactttttcatggttagctgatacaaatgtttatgtttataatttgagtccgttagttcggtacgcaaacttactggaaaatctcagcaaagaaggaaaacgacaaatcaataaaggacaaaatttgttcattatgacgcaaaaatgccccttttttcattaaaaaaggatataatccttcaacagaatgattcatttcatttctcgattatccatcgacagggaactcaacaataatagaaatcacattattttatgaacgaatcaaatgatcaaaaccactaaaaagaagagtttatttagaaagcgcctccggtctgaatggagagatttaccggctagtatctgccgaaaaaagagaatatgaagtcatgggattgatgaaacagtccggctgaaaacacaaagcggcgctttgtgtgagctaaagcttagctttaggagtcgtaaagctaagctttagcctccccaaagcgctatgttattaaccgatgcaaaaatgcactttttcgggggcctccctaacacacgcacacacgtaagcgcacgcgtatacacatacacacacgaacataactaaatacgcgcaaactatattatatacgcgcgcctgtgtgtggaaaaattgtggagtgcattttctgcatttttgcatttttcacctccgccaagctgttcataaagaaaagatttatacgcatactcttccataattcatcccctttgcccacgtattccgctattttaaggctaaaaagcacattttctcccgaaaagtttttgtaatatcagagttaatcgtatttttgtgtacaattttggtgtagtgatgacagaagaagaaaaaaagttattgagtacctttgaaacgcagctacggcatttaatgtatttgcacgatgaattaaagcgtgaaaatgccgggttgagaaaacttcttgaaaacgaaaagttgaagaacgagaaggtgcaagctcagtatgatgaattggaagtcaactatacaaacctaaaaacagctacggcaatcagccttaacggcagcgacgtaaaagagacgaagctgcgattgtcaaaattagtgcgtgaagtcgataaatgcatcgctttattgaacgagtaaagaagaaagatgtatgaacgataagataaagataaacctgcaaatagcagactcaaactacccgttaaccattaaccgagaggaagaagaaatggtacgggaagcagccaagcaggtaaacatcaggcttaatgcgtaccgggaatactataaaaaccttgaaccggaaaagattattgccatggtagcctatcagttctcgttggagaaactgcaattaatgcaacgtaacgataccactccgtatacggaaaaggtaaaagaactaacggaattgctggaggattattttaagaaagaataatgccaccgagccattcactgataaagaaaacaccacgcactgcacaatatccgagcaaatgtatgctctgatatttggcggtgcgtttttatttatataactaaattaatgtaagaatgatagcaataatagcaacagcaattgcttgcttcgtcgtaggaggaatcctttcatacgtactgttccggtacgtattgaagtccaagtacgacagtgtcctgaaagatgcggagacagaagctgaagtaattaagaaaaacaaattgctggaagtaaaggaaaaattcctgaacaagaaagctgatttggagaaggaagtggcactgcgtaatcaaaagattcagcaggcggaaaataaactgaaacaacgcgaaatggtgctcagccagcgtcaggaagaaatccaacgcaaaaagctggaagccgaagccgtaaaggaaaacctggaggcacaacttgttatcgttgacaaaaagaaggaagaactggacaaactgcaacatcaggaaatagaaaaactggaagcaatctccggtctgtctgccgacgaagcaaaagaacgtctggtcgaatcactgaaggaagaagctaaaacgcaggcacagtcattcatcaatgacatcatggatgatgcgaaactgactgccagcaaggaagccaaacgaatcgttatccagtctatccaacgggtagctaccgaaactgccatcgaaaactccgtaacggtattccatatcgaatcggacgaaatcaaaggacgtatcatcggacgtgaaggacgcaatatccgtgcactggaagccgctaccggcgttgaaatcgttgtagacgacactccggaagcaatcgttctttccgcttttgacccggttcgccgtgaaattgcccgtctggctcttcaccaactggtaacagacggacgtatccatccggcacgtattgaggaagtggtgtccaaagtacgcaaacaggtagaggaagaaattatcgaaaccggtaaacggacaacaatcgaccttggtatccacggtctgcatccggaactgatccgtatcatcggtaagatgaaatatcgctcttcttatggtcagaacttgttgcagcacgcccgtgaaacagccaatctctgtgctgtgatggcatcggaactgggcctgaacccgaagaaggcaaaacgtgcaggtttgctgcatgatatcggtaaagtgcccgatgaagaaccggaattgccgcacgcattgctgggtatgaaacttgccgagaaatacaaagaaaaaccggatatctgcaatgctatcggtgctcaccacgacgaaacggaaatgaccagtctgctggctcctatcgtacaggtttgtgatgctatctccggtgcacgtccgggcgcacgccgcgaaatcgtagaggcttacatcaaacgtctgaacgatcttgaacaattggctatggcttatccgggtgtgaccaagacatacgctattcaggcaggacgtgaactccgcgtgatcgtaggtgcggataagatcgatgacaagcagacagaaagcttgtccggtgaaatcgccaagaagattcaggacgagatgacttatccgggacaggtgaagattaccgttatccgtgaaacacgtgcggtcagcttcgctaaataagtaaatattcaaaagaagattcaatacaagggcgaagcaattcgccctttttcaatttatcatcattcacttctcatgtttgcagcatcacgcagcagcatacagtctaaaagcatcagcttatgaaaaagtaccaatttgaagtctgtgccaattccgtagaaagctgtctggcagcacaggcaggcggagccgaccgggtagagttatgtgcaggtattccggaaggcgggacaactccttcttacggagagatatcgacagcacgcgacatgttgacaacgactcgtctgcatgtcattatccgcccgcggggtggggattttctttattctcccatcgaagtgagaacgatgctgaaagatatagaaatggcacggcagttgggagttgacggagtggtattcggttgtctgacggcaaacggggagatcgaccttcctgtaatgcaagagttaatgaaagcctcacaagggttatcagtcacttttcaccgtgcttttgatgtatgccgtgatcctgaaaaggctttggagcagattatcgaactggggtgtaaccgtatccttacttccggtcagcaagctaccgccgaactaggaatccccctgctaaaaacattgcagatacaggcttccggaagaattatcctgcttgccggatgtggcgtgaacgaaaagaatatcgcccgcattgcttcggaaaccggaatacaggagtttcatttctccgcacgggaaagcatcaagagcgatatgaagtataaaaatgaatcagtatcgatgggcggcactgtacatatcgacgaatacgaacgaaatgtaaccaccgcccaaagagtgataaataccattcaggctataaaaagctgaaaactgcgataaacagcgatttatagtcctgcaatagcatacctgtttataaataagggataatcgtaatataaataccggtaataatagccgaggtgattactcctgagatattggctcccaaggcatctcccaatacgaatgaatcgggattgtctttgcttactatcttctgggcaacctttgcagtggtaggtacgcaactaacggctgcgataccgatcaccggattgtaatttccccgtttgacaatgtacatgatgtatcctccgataatccctccgataccggaaagtaaaagtgcgacgatacctaataccagcaatttcagaatcttcggatcgagcaacagatgcgcatcgcaaagtacgcccagcaatactcccaacataaaggtcgagccatagagcaacggaccactgacaaaatcataaatatgcttcataccagattcacgaacagcaacccccagaaacagggagaaaaacaatggagaggcaaccggaaacaagaaacaaagtactgcgcagagaacagcagagaaagccagtttcactttggcatcgtaattcttcggtgccttcttggtcaccatcttaatggcacggaaacgtttgggcactaatagcttgaccaaatatggataccctccgtacgtcagccccaaatacaggtaagcgactactgtaataggaacaaacaaatgttttgccaaagccagcgaagtgaaaagcaccatcggaccgtccgcaccacctaccatagcaacagatgcgctttcctttaaagtcagtccgagcgcggaagcgatgggcacggtaaggaacgtaccgagttcggcacataaagcaaggaatatactcgcaaacggtttctggagcaggaagcccacatccagcaaagttccgatgcccataaagacaaagcaggctataagcccgttactgaaagtcagcgtgtagacaggttgcagaaagtctatctgcatcgtattcatcaggtcatccgtatccgaaagcatcggatcgaggaagaggttacctaatgtaccgtccggcatcatcaatgttccgcagttgatggctaccatgcccaatcccatcggaatcataaccataggttcgagcacacccttccaacccagatagataagtaacaaaccgagaagtaccagaaagactctggcagaagccagtaaccagccgctttccatcattgtgccgataccctgaaagagggtggcaaaatcaatattttccataaataaacgtcattttattgtttgttggtagtagatttctttgtatttttcttgttgacatgcgccagttcttcttctttgagaaagaactcacgtgtatcccgcggataataataatccatcaggttctcttccgacgcacccggacttactccatgataataaccggaatagccagaaacattccggttgattccacggctgaaatcttcgcgataatctcctaaggtcccttcgtccggaagaggcatctgtctgacaagcctttctactttctgccggtgttgtcgccagcgatgtaaccgcagcagttccagacggtgagaactataaaaatcaaaagaatctgccgcataagcaatcagtttgatgactgccgcaacaaaaaaaccgatgagaaaggtgagacccatcatagcgaaagtagatagtaataaatcaatcatagcaataaaaaatataggttttataatatagtattcaaaaaaaaaaagaggcgcccaatggtaaatcattattaaaatttagacacacatgaaagttaaatcccattgggcactcctcatcacccatatagaaacaatcggcagatgttatttgcttgaatcacttcggtatacatctttgcttctatacgacgtaactcccgtttcacaacgaaaacacaatatcctgatcccgatacttgattaggtatccgggaaatatatcacacgtttataggaacaataaataaaaggaggggcagagagaaaagatatacctcaccctgccaatggaaaaataatgcagcctaaataagaatatgggctaatgtatagacgtagtatttacacgaatatttagtgtaattgacatcagaacaggtatggctcagacgttcctccggaagcaacgtattcagtgagctcaatatctgtattattgcagtatttgtattaaatctcagattcttgaaaggaacaatgcttctcggaaaagagaggttatcaaaaatgcagtcactgaccttactgccgtaagttccgtcagtcagcaatgaatgagtatctttacatgatttatcgaaaccggcagaagagacactgcaatttactcccgcattgtattgcatatcaattgccgggacctcagtttctttctgaaatccctgcaattctttattggaaatatgagtaaatcccaaagccagaaatgcgcatgctaatatgcaaaaaatgtactttgccataatttgctgcaaacgtaatcattcttttccaaaaacaatgtattaatggtaagaattaacgattattgcactctggctcctctttataatccatgtactactttcatcaattgctctcccagaccgatcgtatatccttgagaaacaaagaccacacggttgaaggtatcggcaatgataaagacaggcagggttgattgattcaacttcatcgcatcaacaatctgtttttgaatgctgttatccacatcaatgccataaacaatggtagagggaagatctttaaattcatgcgtgttgaactttttatattgctcttccgaagggaaaagaaagaccattttacgtccccactgttcaaactcgctgcgcaaagccgcaatatctcttaaagcatgattggtaggctcctgccccactccgagaacagcaaccacaaaatagccgcgtccgcaggtttgcaggatactttgcaggtcagtacctcctaccggacgataggtagcttcggaattgaaattaccgatcacttgcacctgatctttactttcacgcatcacaagatcaacagtagtcgtcttatccggttcgatagtgaagaatgtggtattggagagtaccgcaccactagccaggcgggttccggtcaccatcatataataaccttcgtccagctttactccgtttttcaggagattcgaccacgtagcaccaccacccatatctacatcgccttcgtcataattgagcagttggaacgtgccgttcttaaacttggagatagtgaaatgagaatagtatttaggatcggataaagaacgtatcggagtatagctggctttcaacatgccggtacgaggttgcgtggactgcgaagtctcaaaattgacatcctgcggagaaagtccatcacttgcatactgaaccttcccggtcacttcatcaatccaggctggtatccctatgctccgggcagctgctacgaagaagatatcacgggacttctcatcagctacacgcgacttccatactcccatcggagaaacaggaatctgctgagaattcagttcgttatcgatcttaatctcttttctgcaccattctattaatgctttggcatcatgagcagcatcaacaggtgccgatttcaagactgcttcagaaattgcatcataaagtacctttttataaggagtcaacatctcattcgctatgcgaggattgagcaacgcccttttcaccagatcagcgtccgttttttctccatctgatgtgtttttcagatgatcgttcagtacatcgagtgtcacgtcacgaagatcttttgccgagatattctctaataaccacataccccgcatttcctcccatgaaatatgttttttctcctttctgatagctgaaagaaaatccttcaatgtctgatggtttccgcgcgaagcaaccagaaaagctgccaacttatctttcatagtttcaggttgcaatatatttccgtacagtccgttcacccattcttttgcctgttcatctgtcatcatcgttgccacatatgcattgcggatcgaatcttcctgtgccatccggtggtcattttccgcccgttgttcaggagttacttcgggaaggttagccccttctaccggaggaacaatatccatcggaagtgtatagctttcaccttctttcttatctaaagataacttcaaagcattttcttttccaaatgacagtttagcatatccgaattttccatccctggatgcccataccaacatatctcccttgccggcagtgaggaaggctttaccttcggcatcggtatatttcgtggctaccgtatagaactcagcataattgtatatcttaaattccacttttgcacctgataccggatgtccttccgtatccgtcaccgtcactgtagctttggcagtaggcgcataattgtctatcacattgatctccgtgtaattcggcgtttcaagcataatctcttccggaccggtatagcgaccgaacacctttgtatgcatcagcatcccgcgactggcaggagcattaaaccatccgagattcaaaaccggttccggctcgcaagctccgaagaaataccactggccatccgcccacgcttctacccaggcatgattatcatccgtatgcgcccaacggggagtatatacctgccttgccggaatccccaccgaacgcaacgcagccacagtaaatgtggattcttctccacaacgtccataggctgtcttcaccgatgccaacggcgaactggtacgtgcatcacttggacgatagactaccttttcatggcaccaatgatttacttccagaatagcgtctttcatggacagatgcttcaccctatccttcaattctccataaaacacccgacgcgagtcatccagattctcattattcacccggataggcaacacaaaatgccggaacaattcatccggaatctgatccccccaaggcatctcggtacgcgtctgcccggacaagcgaacattctccaaataataatctcccgaataatccgtcacatcccctatcggcatgtaagcatagagaaacatcagggcttcctgctcatatacagacaagtcaggattcgaaaaaacagtaaacaggtctccatgaggaagtgcttgttttttctgttcaaagtcttcggtcacttgattccgataattctcttctttcagaaaatgagcgttgttgcaggcaaatagcacaacagacaggataagaacggataaaagatgaatgaatgtcttcataaaagtgtttggtttatttttagataataagattgctgattcacaaaaatacaagaatattttctgaatgcctagataagtatataaaaatgtgacagataagaataagattgtcatcaaggaaagaggacgggaaaattgtaacaggtttgtaacatctccgtgtccgaacctcccataaaaagaaaaatcagaagaaaaagaagatttttatgttttacagcatataattcaaaaacattttgtatctttgcagtgttaataaagaaaacaagatgtaaaaccgctcttcaaaacgtggagggcaaaaaaagaggaaacaaattatgaaaaagaatgcaaatgaaaaaatcatgatgttacagtaccgtattaaacgttatcaagcaatgggaaacggtgctatgtgccaaaccttgaatggtaaacttcaaaaactgctgacgaagcagccagccatgtaattaaacacactaatatatatcatgaaaagagcggagcaaccacactggttctccgctctttctttttatttcttcttcaaagtcacatcactgatttctactacaccacccttattctgtccaagaatagccacgtaacagtctttcaggatagcagcgtcatcatccgtatcggacacttccagagcaggatttgacttcttactgctgatagcattcactacctgtcccatgtcatagtaaacaaccaccttcgtccatttgccggcatccttgattttgaagttgtactgtgcaccggaagcattcggctgggcatcagcatcgtaatccctgcgcataaagaaagtagtgttcagtttaccgttatcatttttttcctcgttcgtctgcttgatatatacgctgaccggagttcctgcctcctttgcttttgcataaaaagtcaacacgtagatacctttctccaagccgtctgtaatacgttgaccaagaaatgctttataccaggatgtattcttctcagcacccgaattatctattttcatcgcgttcggatacttggcatctccggtctgctcccaagcgattgttgtcactccgtccgcctcattattcataatgaaccactcacctgccgtagccttgttagggttggttaccttgttcgttacttccgtagcaaacttttcatttttgatcagattctgcgcactcacgcttactcctgcgatagccaaaagactaactaataatacttttttcatcttactgcgattttattgtttatacgttatttcttattttcactctgcttgctgaatcctattttatttgttgaataacaaacttataatttccagattctttcttttcgtttgattttagtgtgatgcgataaatctccttaccccatacattagagaggcgcggatcgtccaattggattgtttccagttcggctttgaactgagtcggatagtccagttccactttctgcccctttacttcaatctgaattttgcccaaggacgggaaagtgacattgccccaagtcatgaaattcacctgattgggagctacggcctcatccagcgtgtagctgtcggtaatcgtcagtttccggtcatccagtgtatacgaccgaatccagcttttcacttttgcttccgacggataggcggcagcaatatcagtagagaacatgcgtttcttttcattgcaaatggtatttgtcgctttgtattcctgtccgtatttctgcggtataccattaatcatcggcagattatgataattactctgcattgtccaaatggtgtaacggtctttaccaaatgtctgcttggtatatgtacctacccctgcatcaaggattacgggaattgtattcacatataaggaaaacgttcccacatcattatgattatgactttcgttgttgaatccgcctttggcagccacgaacattccattcttattcttcatgtaacagaactccgtctcgggataccaagtcacgtccggcatatcatgctttggagtctctttggcaagatcattgcagcaaagcagagactggagcgagcggaatgcatcgtttcccatggtcgcatacggttttctaccattcagcagataagcggcaaaatgcatcatttcattgctgtttaccgctttaccaaaacgatagatcagtagaggatcgccaccaccttgcgcggaagcatcggcaaagttcaccacccaaccattaccgacataagaacgggacatatactctcccatacgccggatcatcggttcattcaacagggatattttaccacctgtaccatcagaaagtatttgcaaataatcataaagtttacctgccgcgtgtccccaataagaagtcccttcttcgcaagcgccgtcagacttcacaaagttgataaacttatctaccgatttcatcgaacggtatacagcttttgccaaacggtctttattgttctccatcaaaaggaaacactgcaaagcattggagttgcaccaaggattccagttattgataatctcacccggttgccagttgaacgccatccaccacatatcgtcatcgttcatataagggtcgaggatacgttccttaatagctttgcgcatttgcagagaaaccaccggattgattttgtcgaaaggcttacggaagaaatagtgcacccaagccatcaatgcaccatatccgccggaaccaagatcaatgatctgttcgcggaaatcaggaagagaacgtttgctgctttgccggggcaggtgagcagacagtacccatgaattcatttcgcaactcatgtaagccccgttgagtagctgatcgatgaagcgtcctttgccttccgccagttctgccagcatcagcgtattcaatgcctgacgattggcgtcatagggaacttccatgattttacgattaccggtccgctcatattcaagataggcggtggcaggaatcagttgccatttgtagtcgaggagcttctcgcctgccgcgataagacgctgcttgttggaccccatcaatgagtcccaagcggcacggtcagtataggccggataaggtacccatgcctgtttcattaccagcacattcttcaacgtagtttcatctgccgctttttgcagcatatcgcgttctgtataggcattggctttgaaagagaaacttccaaaggtagctaacagaaaaacacaaattaaatgcttcattcgattcatggtattttgttcgtttaagtatggcaaagataacgcatctctcaaaaagtaaggtgagcaaatcatacgaacctcatgacaaaaaagtacagacttcaaaaaaagtacatccagaagctctcagccctctcgtgaaacagacgctctgttcaaagcaaacagaccttctatttagggcaaacagagccttcattcagagtaaacagaggttccgtttgaaaaacatcctgttgattataaacagaaacttcatttgagcttctataaaatttccaccgatggtaaaacctgaactttattcccaatcgctaaactcaaaactgagctgctcccaaactccatgttgttcatccgcctcctctttcggattggaaacagaaagcccgatcaagcggataggatgctgttcgtactccacacttttcaataactctttagcgagtggaagtatgcgatctaatgtatacagctcctgcgactgcgtaatacttcgggttatctgactaaaatcatgaaacttaatcttcagagtcaatgtatttcctttaaactctttacgttgaagacgttctattaattctaccgctacatgatacaattcgatgataacggaagagtgaaccgatatatctctttccagcgttcgttcacaaccgatagacttccgaatacgaactgcctcaaccggacgctcgtcaatcccccgcgaacattcataatagagcgcccccacctttccaaagtgggccgtcagcatttcgagcgagcatttacgtaattgaagaccattgtgaataccaagcaaatgcatcttctttgctgtcacaggtcctactccccaaaaagattcaatcggaagtccggcgatgaagtccagcgcctggtcaggatgtatggtacatagtccatccggtttccgatagtccgatgcaatctttgcaagaaatttattataggagactccggcagatgcaaccaagttcaactgttcccggatacgaagttttatctcctttgcaatatcaactgccagagagattcctttcttattctccgtaacatccaaaaaggcctcatccaaagacagaggctcaattatatcggtatactcatgaaagatttcgtgtatctgacgggagacggacttataaacatccattcttccggatacaaaaataagctggggacataaacgtttcgccttctgagaagacatggcggaacggaccccgtaacgacgggcttcataactggctgctgccacaactccccgctcctcggcatgtcccaccgccaagggtttgccacgaagttccggatgatcacgctgttctacagaagcgtagaaggcgtccatatcgatatgtattatcttacgctgaaacacttgtattcaaattccatagcaaacttactataattttccgaataaacagcctctaaaataatacgcgcctatttttttagaagcacaggacataaaaaagattcgatatcatagcgattccatttctaataatactatatttgtatattgttatctataatctatcaacaggaaaatatttgaaatacaaaccataaagtaaatttagtattatgaaaaaactactattctatttattcattctatgcagcacttccatagttgctcaaaatggaattacttttgaagttgaacaactctccaagcccgaaaaattatatcccgtgacttcccctgatgaaatctacagatatctgatgctatttgacaatgaatcaaccattcgaattacagaaaaagacatctggaaacctccatttaatgtaatagccaagagtgaatctcctgacagtttattatacttcgggtataattcttttttctgcggtatgtatcaggcttatgcagatcataggccgttcgttttatctccggatatgatttggctactgattaatcaaggttttgcccaacatgtgaatgccaaccatgagtctttgagaaaatattttgtaaatttctccggaaaggaatctttaattgtacaatcccataagaaactgaaagacccgagtcttttatgggaagaaattttcccgcagtttacggaacagataagaaaagaggtaggaggccatttggttgaaacactcacttgtaatttctctacaacgacctctttggaaaagactgtttctgaaataacaataatggaaacggtaaaatcatacttcgagtttatcaccataatgattgtttgcggtattccggaaatcacgcttgaagggacaccacaagactgggaaaaagttttaaataaagccagaggactaaaagaatataaactcgaatggtggatttcacaacttgaacctcttttggaggagtttgtgaaggcatcaaaaggaacaataaaccaagagttttggcgcaatatgtttaaatgtcattcgccaaagtcatgcggagctcccgagacttttgatggatggatcattaaattctttccttacgacaatgaggggaaaagaaataatctaaaacagattgtgggtcgtaaaaagcttccgagcgagatagtaaaagttgatttaaagtatattgaagcatacaatgacaccgtaattgaaacaccactggagttgtggtccggtttcatcggactcaaacaaaacaatgagaattttgcactgagaccacaaattggctggatggtcaaaaagaaaaacacagacaacaccggactcataaacagattgaaagccgatgccaaaggcaggggtatcaaccttagagtgaaagagttcccttccgtcctgctgaaacttgaagaaataaaacagttggagcttacctttattaatgaaattgatataccggacgaactgtcaaaagtgaaaatcgaaaggttgaagctatccggcagaattactaaagaagagatgcaacgtatcaaaactttatttcccaataccgacattaagataaacggaagtagaatataacaaaaatattaccgagtaattcacagaaacataaaagaaataatcaggatttcatataaataaaaaataggggctgaattctgcattgagaattcagcccccgctatttaatctacctagaaaacaaacctatatttattcaagccgaaccctcatatctactaccgtcggctctacaaaagactgactaccaccggtttcaccacgcaaaccattattggaagttgcgtcattatgattcggtgactggtcgagcacataccacactccgtcccgttgttcgatatcttctccattcagtttccaataaccgaccagaccatctgaacctgaatcgacaaacatcatattttcacgaatctgattcgcagtacgggctaccgaccataaacgaacctcactcataaatccgttccatttacgattccggtcatagtcataagcataaccgatgcagaaacgttcgttcaagtcgaatgtcagtgagcctaccgtcttttctgctattttctctccattgagataaagagtagccattcccgcagaagcatcgtaagtgaacgctacatgataccactgattcaacaggaatatagatacatcgggcatctgaagtgcaacacttccggccatttgaagctcgttatcaggatgattcaagtcaccggtacgcataatcaaagtaccttcattgcccataatggtgcccagattcttccaacgttcggcataaaccaatgcttcgtaggtgacagaacccattgttttataagcagtcggcagacgtacatcaagccagcccggattgatacggtataccttatcaataataattggtttccttactacaatataagtaacgctcgaactgcttatcttttcaatgtccgtactgttcactattacaggcagaatatacgttaccccgtcttcccccttggtaatgttctttaccgacaatccgcagggatcagcatacagttcgcctgctttaatggtcgaagaagttcctgtcatttcatagttatcagtcgccagaagctgtccggtcgtcccgtgtttatgattgtagtcatccacaaggtcctgccctcctacctgatagttcacatttacattactcttcaccatcgttgaaagccgcgacaccaattcgcactcgtaggtatccgcttcaacttccactcttatcacattactttcaaagtaaagtttcggttccaacagatcgctttcgctgtcgttgcaacccacactagagaaagacaatgcaactagtgcacctgcatataagattttgatacgtttcattgctgttctgtattttcattagattgattgtccatatattcctgataagcctgcagattgatctgtatagcatgacgcacaaaattgtaatcacgggcattatcatagtcattatcaagtcggaaagcaccgacgccacctttcggaccattggcatggttataagcagcctgagtcaaaagtacaccaccggtagtccaggatgactcaaagttctctgtaaagatgtgcttacgatagtcgtaatattctccacaccagctttgcaaggtactcactcttcgatcgagattggagtcaccatatgcctgagtgatgaaatagtcaaaataaggagcagattctttgttagagttccatatttcaccgtcaatcataaaatagtagtacttaccattcggacgctcggttgccatcggaccaaagtattttcctatctcttctaccagataatgcagaaactcaccacgcggaccacctctgcggtctttcagactgcctacatatcttccgccgtcaccaccattatcgggttcccagtcaatgtccagaccatcataatcagtcgcaacaatcgtgtctaccaatgctttggcataacgttgaatggctgcgatatggtcttcagcacctttctctccactggtaaatccccaataagcttctgttgccttattgaccagttccgtgatttcctcactggaagcattcgggttttccgcctgtactttttctgaaacggaagcaggcgtaataccagttccaatattatgcagaatgtaacaaaccgtgatcttaccgcctttcttcttttggaaaatctccttatcagccagtttcgcttcattcaagccgaatggaccactccacatcgataccatgtcgatgctgtccggcaaagaagccaaatatcctttacgaataggtccctcgggagaccagttgctgaaccatccgaagaaaataggacgtccgtaaccctgactggttgccttccatgcacgaagatcggcataatactgtgcactttcttcattgtccatcgtgttgtaaccgccgatatgttcaaagtccttgctctctatatcgacacacgacgcaatcattatccctataacaggaagtatatataataatcgtcttaacattttcatatgaatcatagtttaatagattttatttttacaatcccaccacaactgagtagttgctttgtctttatcaagaccgcccaagagcttcaatgcttcttcataattggctctatcctctgccgactgatagaaacttacaggatacaccatacgacgaataccaccttcacgagtaacgccctgtccgcggttggtctgcacctgattcagtttcggataaccggttcttctccactcagtccatgcttcgtgaccgttcggatacaatgcaatccacttttggatcatgatcttctccagtttttgttccgttccaccgctgaatgcgggtgttgcagtagtaggagccgcagcattgtaactgtaataggaggctctcatattatgggcaatcggagtcaatccggaagccagatagtcgtctacagacgaactgataccattttcatcaaatgacgtggcaactccttgttcgtacagtgcttccgcatcaccaaattcgcttccccatctcaacgcagcctcagctctcaggaaataaacttcggaagcacgcatccagtaagtcggagtattcgaggtaatattgggcttggagaaatcggtataaatcgtattctgctgattggcattgccgggaggcaccgcctgatagttttttccatcaaaagccgctaccgcatacgcactgggagaagcttcaaaataagcactcaaacgcgggtcctgatagcccaacaaataagaaaacatggaagagcccatgcggcactcattgtattgattggccagccaatcgatgttgttacgaaataccattccggctccggtgctcatctgtgcctcgtccgatttggaagtcatcactccaaacggatgattcaaagcctgacgggcatatttctgtgcagtcgtttcgtccgcataactgatacgcattgccagacgcaacatcagcgaattggcgtatttcacccattttctcgtatcaccggcatatacggcatcataatcggcaacaatagttgccccttgttccgctctcactgtcaaggcttcgatagcggccgtcagatcggcaaacatggcattgaatgcaacttgctcgctgtcgaaaggtatcaccagtgcaggttctcctgcatgggtgtaaggaatgggaccgaaagactcaagcgttttgtgccaagcagatattttcagaatctgagccaaagcaaagatttccggtgtttcgttcttttcggattcttgttttatcttcttccaagaagacagcagtgtcgtatatgagttggtataggtagccgccacccaattgtcctgtaagtaataggtagtattgttgctaccgctataccagttattattctgtccgaaaaatccgctccacgaatcggctgacagattgtatgcaacctgatactggttgatggcctccgtatcgtcagcctgagttcctacggtgattacagctctttgcatcgccataacagcacctccgacagcaacaccatctcttatacccatttcgtcggtcatctcgaacggattggtgtttaactcttcgaagtcacaagcagtaaagagcgacaaaacgcaaattcctgctaatagtttatattgatttatctttttcatgggtcagttataatttaaatttaataccgaaaccgaaacttctcacactcggctgcataaaatagtcattaccttgaccgtaagttcctacggacggagtcagttccggatcgtgcggagctttgctatagagcatccaggggttattggcaatgaatgacaaagtaacatctttcagtacattcttaaaccaaaggtcggggaacctgtaactcaaagtcagttcttgcagacggatattggttgcactatatacataatatccggaagtggtatagtcacccgtacctatcagctgataatacgattgtgcatccactctcccttgtccgggcagtaagacaccgcctgcatcgcgtgcttcggcagacgctttggatactccgaagcggtcgagaatagcctgagtagaagaagttaccacaccgccgaaacgtccgttaatcaggaagctgagtccgaatcctttgtatgacagcgagttgctccatcccaggttaaagtccggtgacgtcttgcccaagaaaaccggttcaccttgttcgagtccgtacgagccgtcttgcttgatttcaacatacccctgactgtctttcttcaggaaagtattggcatatatatcgttgatgctgccgcctacttttaatataacgcgtccgttgtctttccttacttcgggtacgttgatgggctcggggctcatgtcagtacgatagttttccaccatttctttgatttcgttgacattgcgcgagaaggtcagattggaggagaagctaaagtctccgaagctgtctctgtatcccaacgatgcttcccaaccgtgattttgtacattaccagcctgcaaatagatttgtttgtaacccgaaaattccggcaaatcgccaataaaggtctgattgtatgtattcgatttatagtaagtaacttcggcactcagtttattccataaacgtacactcaatcccaattcataagaacgggtacgttctgccttgaaatcagtaaaaggatagatgcctgtgggagccagtgcaccaccgataatcggagtggtcacagttcccggagtaagtcccgactgtgataccggagaaccgacttccgtataagacccgcgtacctttaaataggaaatgaactcgggcagtttcaccatttcagagataataccggacagacctaccgagggatagaaaaaggattcttcgctggtgtttaccaaccgggagttccagtcattacgacctgtcaatgtaagataaagcatacttctccagcccagttcgacgttggcaaagatagcgtgattacgtacgcgactgtcacctccgtcttccgagatacgaccgttggaagggtcgatgttgctggcggcaaacaggtttgttactccgagcaaggttcctttgtagcctcttgccagcgaccagtagttagagtagctataacccaagttggcagaaatattaaaatcgttgaactgcttgttgatatttaacataaagtcggcatactcctgacggtctttgtaattgctgtaatcatacagacctttctttccttcggcaaatttctgatcggaagtagcataaaccttacgttcaaactgaacatgagtatcgtccatacgataacgtccggcaagattcatccaatcggtaatcttatagctcagaccgacattaaacatataacggctcttctcgttcgttgcgatgttgcgataagcagtccagtacggattctgcgaaccataggttgcatcggcaatcggccaatactgtatcggaatattgcggctctgatcataacgctcgaaagtcttgatatcgtcgaagtcttctccacgggggaaaaggtaggcagaaatcaccggattccagtattgtccctgcgataccatgtttttatcttcctgtttcacataggacgctcctaaatccaactgcaatttatcgtccagaaaagtggctgtattgcgaatggtgaagttcagacggtcataagaattgttgggaacaataccttttgaattggtggatgaaaccgaagcaaaagtttgattctgctttgtaccggtagacaaggtcaacgagttgataaagttggttccggtgttgaagaaatcactcttgggatcatacgaattcggacgggccagtttgtcaccccagctttcgaacataccttctttatttccatacgtgttctggaattcgggcatcatgtacgctttgctgaattcggatgaagaagaaaatgatatctgtaatttaccttcctgccctttcttagtagtaatcagaacgacaccatttgccgcactactaccatacaaagcagccgccgaaggtccgctcagaatagagatactctcgatatcttccggattgaaatcagcaataccttccgttccggctttgccttcacccatgataccactatctgtgtttcccatattagtattaaacaaagggataccatctactacatacagtgcattgttgtcgccttcgatagatttagcgccacgcataacgacacgcgtcgcaccaccgacaccactaccactcttgttgatacttacaccggctatcttaccattcagtgaattgatgaagttggcatctttaatgccggttatatcctcgctttttatctgctgcacattgtaagacagtgccttttctgcccgcttgatacccaatgccgtcacgactacttcgtccagcacttccgtatcttgtttcattgtaatcgggtaaaagtccttattggaaacagcaatcagttgagttgcatatcctatataagatattttcaaacgggcattaccgggacttttaatcgaaaagtttccgtcaaagtctgtaattgtccctgtagaactgccgtccacagagatatttactccgatcaggggttcaccattctcatcggttactttccctttgatatctttgacagattgtgcagctgccggtttcttctccgtaactataatataattaccttgaatctgataagagaaacctgttcctttcaagattgcatcgagcgcagtagtcaccgatacgtcttccaagttaagatcggcaattttctttcctttcaattcggaatcactataatttatagacatcttcgactgtctttccacagttttcaatgcatctactacagtgatatctttctgctggatagtaattttactatcactttgagcaaaagcaagggtctgcatcaataatagacctaaaaaaatgagaaagactcgcttttgaacaacattatctgctcttttttcgtaaatttgtagcatctttttagtattagttaattggttattattctatgatcaattgaaatagcgtcgagatacgctaatattagaaggacaatgatttcacatccgggagaaacggccatttcttccggatacttttttgcatagtacattaagttaaaaaaggttcaacaatcgtttttctatattttatcagttatatagcatttattccccttaattatatatttcacatcccctgccacctgtgttattatcttcatcacctcttccaaagtggcttgctgttggaaacggaaactatacgatttattgttcaggctgtgaaggctataaacaaaggtatagggaaatttgcgttcgagactcgtaaaaatctcatcgagatgcatatcactgaaaaccagctctccacgctgccaggcagtcacatcctctatccgaggcgattggaggctacgtttccgggtctgtttattatacgttatctgctcattgggtttaagtattacattagatatcagattattaaattctaccttcacactaccttccagcagagttgcaatcagttcattgttctccggataggcattcacgttaaactctgtacctaaagctgttatttgaaaatcattggctttcactataaaaggatgtttttcatccggctttacctggaaatttgcttcgccaatcaaatatacacttctggtcttaccggcaaactgctccgggtacagtaaggtgcttctcgaatttagcatcacccgggtaccatcgggcaatgtaagttctcgtatttccgccgttggtatgaaacattctaccaagtctttttgcggtttgtctttctccaacataagatagatagaaacagatgatactgccaacaggaaaatagctgctgctctccatataagtaactgatactttttaccggaaccgacagactgcattcccagattttgttgcatccgtaatatggactgttgcattccgcgaggtactttctgttctcccgcttgttgccacaacgtgtgaagtgcttcttttttttcttccgcatgattgtcgtcagccaaccatcgctgcacttttctacgcgtagccaatgaatactcattatgcccgaataactctatgatctgttgaatatagtttttcatcattaatttcttcctttatacactaaatacaactaaaagaaaaacactacttaaaggaaaatagaaaaaataaaaatagaagcactttttttagttctatcagtgctaaatacacctggtgctctaccgtacggatggaaacattaagcttttctgcgatttctttataacttaatcccttaaaacgactcagctcgaatattaaccttcgccgttcaggcattttttccaaagtcaggcgaacaaccagcaacatttcttcataatatatattattaagggcatcttccccttctatcaattcatgaagcactgttttctcaaggtatccttcctgatattcccgttcgatttgctgatgcttgaagatattcagaataatgtttctggtcattataaagaggtagttatctaattcattttcattgtcaagccatatttccggttgtaaccaaagcttacagaaaatatcttgagcaacatcttcagcatcaacttccgacttaagcaacagctgggcataattctttactttcggaaaattagaaataaaaaaacgctgaaacttcagctcaatttggttaacattattttccatatccgctaagattattatcgattacaagtataaaagtagacattctcaaagattagaacataataaagatatattattaatacttgtttgcatatatttataattattccgtatataaaacaaaaacacataaatattgacaataccaaatagccatattatcataccaaaagagaatagaatgataggatgtataagaaattgactttgtatctaaaaagagataaaataaaggatcaacaataaaaaggggagtaaaagagaaaaactgcaaaaagaaaaagctctgataatcagagctttcatttgtttttaagtggagctggagggaatcgaaccctcgtccaaacgaggaaatcataagctttctacatgcttatctttgcctaaattttcgtgcaggagcagaaccaaagccatcaattcctgccttatcctctaaagtttcatcaaaaacgcgaggccgcttctgactatccccgatgttactgcaccactgaaccggaatgcttcggagcaacagcttccgagtgatgtctcgtcctggcacctagtgcctggattaagctaatctactgtgattcgattaagcagcaagagcgtaattagtttcgccagataaagttttgataactgagatttaagtggaaattaccgacccactgcatgcttacctaccatttctgcccgctgtcaaatccagtcaaccccatgactttataacggtctgaaaatcaaaagagaacaatcgttattttatatttgagaaacaaataagggataaataatacatcatatcctttcaataatcctgttttctttggcacaaagatacatattcttttgttactaaccatcatatatttgcaaatattagccgatgatatgctatccggtatacagagatatatcatgagcggaggcagacttggttcccagacatacaacatttgtaggtccggttatttccaacttaccaacattatccgtacatttgtggaatataataaatactatcaaccccaaaaagcaatggaagaaccatttgattattctcaagtacctttcacattcggaatgtgcgctgccgaaaattgcccgcaagcctcgacttgcctgcgacagatagctttaaaacacgcccctgcaaacaaagtttttctgccaattatgaatccaaaccatataaagggcataaaagaaaaatgtgactatttctgttcgaacgaaaaggtgcgttacgccaaaggattcatgtgcacaataaatgcactcacagtgcgcgtggcaaacacgttccgctaccggatgatcggatatctgggacgtaaaaactactacttgaaacgcagtggcaaactggcgctcactcccgccgagcagcaatggattataaataccgccaaagaactgggagtcattcaaagtgagtatttcgacagttatatagtagagtataattgggacaggtaagggagatttccgtttcaagtaaagaaacgacagtttcctcgtagagaaacgcaagtatccccgtagagaaacgaccgtttcctcgccgggaaaccatcgtgtcctcgtaagggaacgacaaggaaactgcaatcatctattatacaacacattagtatagactaaggaagttgctatctaacaaaaagaacctatatatgctaaaaacttttgcaaccatctgtattatcggtatgttcacatctagttgtacatcaaaaaaggcttcccggaccgaaggctcccatgaagcagaacaggaactgacaatgattgtcggtacttacacttcgggagacagtaaaggtctctatagtttccgattcaatgaagaaaacggaaccgcaaccgcactcagtgaagcggaagtggaaaacccatcttatctcgtaccttctgccgacggcaaattcatctatgcagtcagcgaattcagcaacgaacaagctgctgccaatgcgtttgctttcaataaggaggaaggaactttccgactgctgaatacgcagaaaaccggaggcgaagatccttgctacatcattaccaacggaagtaatgtggttactgccaattacagtggaggaagcatttctgtcttcccgatcgataaggacggggcacttctccccgcttctgaggtggtgaagttcaaaggttcgggagccgacaaggaacgtcaggagaaaccgcatctgcattgtgtccgcatcacgccggatggcaaatacttatttgcagacgatctgggcacagaccagatacacaaatttattgttaatccgaatgcaaaggcagacaatgaagatgtttttctgaaagaaggaagtcccgcctcttataaagtagaagccgattcgggtccccgccatctgacatttgcaccgaatggaagctatgcgtatctcatcaatgaactatcgggaacagtcattgcgtttgaatatagcgatggagagttaaaagaaattcagacaattgctgccgacactgtgggagccaaaggaagtggtgatattcatatcagcccggacggcaaattcctgtatgcaagtaaccggctaaaggctgacgggctggcgatcttcagtatccatccggaaaacggtatgctgacgaaagttggttatcaactgacaggcattcacccgcgcaatttcattatcacgcctaacggcaagtatttgctggtggcttgtcgggatagtaatgtgatacaggtttatgaaagggatacagatacaggattactgacggatatacgtaaagatataaaggtggacaagcctgtctgcatcaaatttgtaccgtaaacaggaagaagtacttggttagcaccggacagaaacaagagtacgccggtcctaaccaagaaccaatacttcctaaccaatcagactacgaaaagcctgaataccctgatgattgatatccaatctttctacctcactcagcaaccgaacggatttctctttttcgttcaatccccaatatcccaatgccatcatatatttgcagtgaatgacgtttcgtatggtcaggtcatcttcccatattaacaaatcgggtagtgacactgcaaaataatccattttaaccttgtcaaaaagatgtttctctccataagttgtcagtttatggaagcgtccgttagcctcatccatgcggttcagtttcaacaatgccagtccctgatagaaaatcttatctggttttgcatcattgtagtacatggcagcagccggttcggtaggaccgacaatcgcttgttcccagcattccaccgctttgtcattctgccccagaccttcataagcacaacccatgaaataatagaaatcattttcctgtgcaccgtgcaacttaccttcacccaagtgatgcggatattcaagacactctgccagcaacgagacagcttcactgtaattcccggcttcaagtgctttcttcgccagttccacacgggcaaactgatattgtcccggtacttttccttcgccgccttcccacggatggaagatatgcgcatcaagtaacgttttagccttttcatactcgcctgtctgattcagcaaagtgatctcttccagtacgaggtcgtcacgttgcgctatcaatccggggtattgctgcaagaacgccagacgttcggaatgcggacgacggacacgtttatagagctgatccaattccatcaacacacgtgcatcggtcgtatcgagttggaaagcacgttccatatattcgatggctgttgcttcttcattctttttgttaaagttagccaaagccagattacgccatatcgtagggaacttgtcatccagtccggcggaagtttcccatgcttcgagtgctaagtcgtactgacgtttgtcgtagtacaaattacccagataataaggtgctttcgcatcattcgggttttgttccatagcacattgcaaagcaagaatggcttccaggcggttagggaaacaatagtccggacaagcgccggcggcatcggcaaatgcctgttccgcaccggataacttaccctgaacaagacaccaacccaagtaataataagtcatcggtgttacactgtcctcagcgatagctacattccacaaagaagcggcttctgtccagcaaccggcagcacaataatcgagtgcgatttcatcatagttgtgagcttcgccacgcatcatcgtttttaaagtaagcaggtcttcggcagcattggttatcagatatttctcataacggcaaccgaagttgaatttatcaatagccaatgaatcttcaatcacttgcaaggcttcttccgctttccccatctgacggagaatggtcgttttcagagcacgcgctttatgattatgccagttgcggataagcgaacggtccacttcatccaaagcgtcttccagacgtccttgcatcgtagcaatctgagcacaggcaaaataaccggcatcctgccaggctgcattccagcatgatttatagaaacggtcgtaagcctcattatagcgtccctgatatttcaaggcaagtccgagattatagataggttctccatcatacggattcgggttgcgcttctgcaaggtcttcactgccgtaagcaagtattgttcagctttccggaaacggcctttacggatataccataatccgagtgcattattgctacgtacatcgatcgggtcacggcgcaaggcttcttcgtaatagtctaccggattataggtggcgtgtctgtattgttccagatgtaaacctgtcagatagagttgctcggttgtttttatttcttccggcaacaaagcagcttcggcagcatccggaatcggttttacttcgtccggttcggcatgccagtaaagcagttccttgccgtttgcggtgatttcaagattcagtttgttcaacttctcccctgctacgtctaccgtttcattcaatagttcttccggagtaatggtcacttgcctgctataatacacttttccatcgtcacttttcagcactacattaaccacctgcttagacgttgcgaatatcttgaaacgtacctccttttcaccttccggttctatgttcatcaacaaatctttgcttgcattcttcaccactcccagttcacggtaaggcaggaagtactgtacgaagctcttttcttcgtaaggttgcagccatgtaaagtccggttggttctcggtatagacaccagccatcagttcgatgtaaggtccgtcctcgtcagtcagattacggtcccatgcacggccgaaatcaccgttcccccatgtccattgctttttacccggagaaatatgatgatttgccacatgaagcatacctgcacaagtgtcgttttcgtagccaccctcaaagttgtaacgggagttgacagccatatacgaagtaggaactttgatattcttatagttcgaaatgtctactccggcagaatagtccatcttataataagtacccgttgctatagggaagctggatacggcacgctttccatgatcgaacaccgcattgatgtcgggcggaaatacactctgatagtagtcgttcaccgctacggcaggattcgcccaccacaggaaggtttgcggcacttcggtacggttgtagagcaccccttttatttcgagaaaagcatgtcccggacgaagcgtgaagcccgccatccctttctgatgaaacatccgttccatttcgttcacccatacagtgacgctgccgtcagcattttcttcaatcgtcgtatctacaggcatataagtactgggacgatgatgctgaggccaattaaactcaatacctcccgaaatccacggacctgccagccccaccaatgcaggtttaatcacgtgattgtaataaataaaatgacgttccctgatcttatcataagccatttgtacacgaccgcctaactcgggcagaatcatcaccttgatgtattcgttttcaataaagatagcttcgtattccttatctactttttcatcggacatcgattcgatgacaggataaggataaactaccccactactgccctggtagacacgtttctccaggaaaataggattcttttccggtttacctacttcataagtaggaattacaaccttttctctccatgcttttaccatgatattattaattatatctttttattttatcagatctttctccaatgtctccagcgatttcccttttgtctcaggcaatgcacgcaggaagaaaaggaagccgaagacgcagatagccgaataaatccagaatgtgccgtaactgcccaatgcagtattcagcaacggaaatgtgtaggtaagcgtgaaactaccgacccacaaagcgaaagtacaggttgccatagcgacaccacgcacgcggttggggaatatctcagcaagcagtacccacgtgataggccccaaagacatggcataacaagctatcgccaacactaccagcactaccataaagaaaccgctgacctgaaaaaagtaacacgcaccgagaaccagataaatacccgccagtcctccagcccccaaaagcatcagagcacggcgccccaaacgttcgaccgtatagatagccacaaacgtaaagatcacattcgctacaccggtcactacaatattaaaaagtacatcacccagcgaataacccgccgactggaatatttcctgtgcgtaattgaaaatcacattcgtaccgcaccattgctggaacacagccacgataacacccagtacgagcaccttacggaacggacgactgaacaacaatttcaatcctccttccgacttggaagcggaggtttgttccaccatctgaagttcccgctctgcatagcggtttcctcctatccggctgagcacactccatgctttctccctcttgcctttcattgccagccaacggggactttcgggaataaaacaggctagcagcaagaataccgctgccggaaatgctgctccccaaaacatccagcgccatcccatctgcccgttccatgaagcacagatatcggcaggcgtaaagtcggcaggtataggctcggctatcagccagttggctatttgtgcaccaaggatacctaatacaatagtcagttgattgagggacaccagtttcccccgaatggaagtaggagctacttcggcaatgtacatcggagacagccccgaagcgataccgatgccgatgcctcccaaaaagcgtgctgccagaaaccagctgaatacggaaaatgcaccggtagcgtatgcggaagataaaaagataaatgcggaaatcagcaagagaggtttcctgccatagcggtcagccatcataccggctaccatagcaccgatcagacagccaagcagggctacactcatagccagtccctgcatcgtcggcgaatcggcaataccgaaatagagttcatagaaaggtttcgctcctccgattaccacccagtcatacccaaagagcagaccgcccatcgcagaaaccaaacaaatggaatagacaaactttttattataacttttcataccactagaagattgattaattgatgttgcaaagatagagcgtatccaaagcacaaaaaatagaatttcattttataaagatggacaatcttatttttaatgtattatttgacagatcgcatacattattatatatttgcgcagaataaccaattatgtactatggtaaaactaaaagatggatttaccggggaaagagccttagtattgccccgcatcatcgttgataagatggaagaggacccgctgacctccatgctgcatatcactgacatcggatattatcccaaagccaagcatcattttcgggaacggaaagagcccatcaatcaatatgtcttcatctattgtattgatggcgccggatcttaccggatcggagaccaggaatataccgtctccgccaatcagtattttattcttccagcaggagtcccgcattcttatgcttccaacaaatcgacaccatggactatttactggattcacttcaaaggtattcttgctccgttctatgccaaagacgccaaccgtccgatggatattcagcccgaacaacactcccgcatcagtacgcggatcaacctgtttgaagagatattcaatacactcaaaaatggttatagcaacgagaacctgcgttatgcgttttctatgtttcacttttatctgggaacgttacgctatgtccagcaatatcgtaatgcaggcaccaatgaggcagaagacgagggaatagtgaacgttgccatccactatatgaaagagaatatggagaaacatctgagtctggaagagatatcgacacaaatcggatattctccgtcgcacttctccatgttgttcaaaaagcaaacgggacacagtccgcttacttactttaatctgctaaagatacagcaggcctgcctgttgctggataccaccgatatgaagataaatcagatatgctataaaataggcattgaagatacttattatttttcccgcctgttcagcaagatcatgggaatgtcaccgcgggaatatcgtaaatcaaaaaaaggctgactaaaaagtcggtggtaacttccaactctcctccttcgggaaggaggggaattgtgggtagttcagactttttagtcagcctatataatcattcttatttcttctctatagtcagaacaaactggcgcaaatagacctgctgttcttcatcactcacattcgtgaagcggacaaacttcacaggagctttctgcaaaccggccgacaatctgctttctttctgcttcagatccaccgttttccattccttaccgtccgtagagatctcaaggcatccccatgtgcaaggagcatccttaccaaagtttatctgaatattctctcccggatagatagcatccagttctatttcaacactgtttcctgctgcccatttcacaacttcattggcaggagaaatgagcacacggttcgctttcacctgcaacggcaggttcttgatctgctccacattactgatcatcttatgcggcatataatcggtagtggcatccagatgagcattaaacttttgattgaagaatttcacaactgtggcaaaagtctggtcaattaatggttttatcactcgcgtagctgtctttactcccggttgataaggattctgattactcgtctgatcgatatagaacatctgttgctgcaaagccttcacatgattgtatttccgcagaaaataagattcattccggccttctaccatcttcagcacttcttctcccatttcagccgtcagtttaaactgatgcacccaaggagtgatttccacaatcaacggtttgttctccgtattcatcaacaggatatcggcggattctttcatacgttcgaacgtatattgaagagtctcgaaatctgccttatcgtaatttttgccttctttgaacgctttcaggaaacgttcggcagccggttggatatccatagattcttcgcggcggtatccatgtccgttaggtcccaagtcggaattgtgcattgcaaagcattcaagttcttccgctgcacttggcagaatggtacggatcgcatccttccacgtctgccatgtatcatacttggcaggattccaggcataacttgccacactataaatcgctatctttgacgattcggcatgttccattggattggttacaaagcccgacatctctttggcaatcgtagtatcgttgccatacacaggaccgagaagcagatgatcgcgcacataatcggacaccgggaagttccaccagatataagccggacgcttgattcgttcgttaatccatgaaatgccgtcacgggtaatatcggaaatgacacggtctcccgtccacatgatctgaatggaaggattgagtttatcgcccagcgtagtcagataattgccattagggttcgaccagcttttattatattccgtagggcacatcaccagttggtttatatccagttttacctgtgcgaatttctcatcaatgtagttcagtagttccgcttgtttctgcggattagtaccttcaccggagatatcatcaaagaatacggcgaacgaacggacaccgagctgatacatcttctcaaatttagcgagcagaagatcacgatcttcctgattccatttgatatcctgtcccggatggatcgcccatacaaagtcaacttcattttcgttggctaccgccaccaattcctgcaactgggcagcttctttgtcgggataaggcaaacgccagttgggagcactatgatacggatcatctttcggaccgtatatataagtgttcatcttgtttttaccgtaaaacttcagttggctgaggcgtgcctgatggctccagggagttccgtaaaacccttctaccactccccgataccgtacagaagggtaatctttgatttctacttcgggcagctttccgtctttcagcaattgcgcaaaagtttgcagagcgtaataagtacctcgttcgtcgtttccggccagtacgatttccttctcattcacagacaggtaatagccttctttgtggtcaggaatctggcggctatatttacgcacactcttgtcacctttctcaccaatagaaataagcatccctttcttgctgctttgcttaccggaaagcagttctttcagtacctttacagcatgcggattggcttcttccccgccattcagctgatagacagcaggcagatcgatggtcttgttttgaacaatgagttgttgaggaggaggttgcagactaacattctgcgcaaaggtagtaacagcacacaggaggcaggctcccaacagataaatcttgttgtttttcataagttgtaataatgggggttagttatcatgacttatatcatggtgcaaagaaacactaatttatcaaattaagcaaatttatgaggaacctagatcaaacaaatcaaaaagagcaaacaaaataatcataaagacatacttttctgatttattatttctatcttcgtccgctgttatactttttatttaaatacccccaattaccatgaaaatcaaacattttctacccctgctattgctactcggtagcaatgagatgcttacagcacaagaaatcgctctcaccccacaaccggctcaccttaccgtaaaagacggccgctttgagtttggcaaccaacttaaagccaaagtcactccttatcagggagacagcatccgtatggtctttgaatcattcaaaaaggaattgcaagaagcaaccggcatcaaggtttcatctactcaaaaagaagctaaagcaaggattatcttagatttgaatccacaacttcccgctgaagcttataagctgaacgtctcgaaaaaacaagtccggatcgaagcctcccgtccggcaggtttctattatgcgctacaaacgctaaagcaactgatgccccgcaacgtaatggcaggcgtagcaacgtccgaccattcacaatggagtctcccatctgtcgagattgaagatgctccccgtttcgaatggagaggttttatgctggacgaaggcagacatttcttcggtaaagatgagataaaacgagtgatcgacatgatggccatctacaaaatgaatcgtttccactggcatctgacagaagatcaaggctggagaatcgaaataaagaaataccccaaactgacggagacaggcgcatggagaaacagcaaagtacttgcatacggtgacgtgaaaccagacggtgagcgttatggcggcttttatactcagaaagatatcaaagaaatcgtagcgtatgcaaagaagaaatttatagaaatcattcccgaaatagacattccgggacattcacaggcagccgttgcagcttatccggagttcttggcgtgcgacccggagaataaacatgaagtatggctacaacaagggatttctactgatgtaatcaacgtagccaacccgaaagcgatgcagtttgccaaagaggtaattgatgaactcactgaattgtttccattcaattatattcatttaggcggtgacgaatgccccactaataaatggcaaaagaatgacgaatgcaagaagctgctgagtgaaataggttcttccaacttcagagacttgcagatttatttctacaaacaactaaaagattacattgccaccaaacctgccgatcaacaacgccaacttatattctggaacgaagtgcttcacggaaataccagtatccttggcaatgacatcaccattatggcatggatcggagctaatgccgccgcaaaacaggctgccaagcaaggaatgaacaccatactgagcccgcaaataccttattatatcaacagaaaacagtcgaaacttcccacggaaccgatgtcgcagggacatggaacggaaactgtggaggccgtttataactatcagccgcttaaagacgtggatgctgccttgcaaccttattataaaggtgtacaagccaacttttggaccgaatgggtgaccgaaccttccgttctcgaatacctgatgttgccacgtcttgccgccgttgccgaagccggatggacaccacaagaaaaaaggaattatgaagactttaaagaaaggattcgtaaggatgcagagctatacgacctcaaaggatggaattatggcaaacatatcatgaaataagcaaacgctttcatttgactgccgataactggggagtgactaaaaagtcggtagtatctcaattctcctccttcgggaaggaggagtacccgcagggggaggtggtaggtgaatacgcagtccacttattcactgcaaattatagacaaccctattttacctaccaccccggctttcagccacccctccttcccgaagggaaggggagatactattgtctttttaatcaatccccttccgtctttttcagaccatctcagttctttcactttttattttgtgccacacgattattattcgcctgtggcttcaccactaccccatttccattcttcgtacatttaatacattcctttcgtaatgtaccctccttcagattgaaaataagattcggattaaaatgctgaccgttaatgcgggtttcaaaatgcacatgctccgtagtagcacggccggtacgtccggtcagtccgataggttgtccggctttcaccgtatctccgctctgtaccaaattcttgaagttatgactgtaaatcgtttccagcccgttcgcatgacggactacaaccaaatttccgtaagcataatatggcttcgacatacgtacgactccatcaaaagcagcacgaatcgtatctttggcacacgtctttatatctgctcccgaatgtcctccgcgagttccgtaagcggaaataactttggctcccggtaagggaaaagcatattcatgctcttgcaaagaatccaaatgcagatatatatgattgcttttcgcaaaaagtccgggagtagcaacccgtacatgattcacctccatagaagaaaaagaggatttactttgcgcataagcaagaattggtaaaagcaggactgtcaataaaataagtatgttcttcatgtattcctttattattcaaaatagataagctcgccgccatccgatccggcataatccctcagtaaggattgaatcatttcagcagcttcctttaatccctcttttccgttatacccgttgactatcgcgagaatatgagtagtcccgacatccatcttcgtacgttcgtggtcacttgtcggtgtcccgattcctccaaaagaatctctgtacaccggcaatccttcaatgttcaaaatgccccgaccgataccttcgaaaggttcttccgctttgccaatgccaagttcaagatggttaccctgtatcttatccgcatcgaagccaccgatagaatgtccggtacggagagaaaccagattgataaggtcaaccaaagtatcaatctgatacaaagggatgccacgcatcaggcgacggcgcagcgcttctgccgacggacgataacgccccggatcttttccgcaacgcttataagcctcacgggtagcagcaatcacaggttgcaacttaatgtctgccatttgggtggtggtagtcaagtcttctgtgaaagtatttatttctttccaaagtccatcgcagtaagcagtattcttcactgctgcatatacggctgctccggcaaaaacagggcaggcgttctttatttcctgagatacttttatttcaaacatacttttattcaagtttatatcaacttacgttcaagtctattatttatgaatcatgatccccgacagaatccgtccggacttaatgcccaaacgccttgccgagaaaaactcgtcgtgatgaatatacgtacatatccgggcaagctccacttgtccggacggcacaccgaaagcaaggatttgcatccggttcgcttcccacaagtcgatatgatgttttccggtttcctctttcctgatagaaatacgaggcatatcaaaaccattcttctgaaatgcttcatacacttcctcacccacttcaaaagaagccaatgagatactcggaccgatacaggcaactacatcttctccacttgtgccaaactccttttccatccgcaacaaagtatcacgcacgatgtatgctaccgtccctctccatccggcatgaatggcagctatggcactatgtttcttatcatatatcaacacaggaacacaatccgcagtagaaatacaaagacaatatcccggctcgcgggtaatcaaagcatccactccgtgcagcatctcctgtcgttgttgagacgaagccgataaataagcatccccgatcagcaggcaattcgtctcatgagtctgcacaggaatcaccagttcttcgggtgtctgcgacattccttccatcagaagcgtttgattccgccggaccttttccgcctcgtctccactgtagggcgtacagttgaatgacgcataatttccttcgctgcaccctccctgccgggtagttacaaaatgagaaatgttggagtatgagcttaacgactcataccccaacattcttttatctcttgtgattgaaatcatttttcttcccaatcctcttcttcgtattcgtagtcgagatcatcatcgtcgtcgtcagcgtcttcctcatattcatagtcgagttcttcatcctcgcccatgtccttgagttcctgctgcagacgggtcacgtctttcggacggtgaacaatgtcttctatcttattactttccttgttcagttcctcccacagaatgtctttcaacactgagattcccaaaccggaaacagaagaaatgaatatatgcggaacaccctcgggcaatgtcggttcaatctcgtccatcagctcctgatcgagcatatcgctcttcgtgatagccagcacacgttgtttgtccagcatttcgggattgaacgtacgcagctcattcagcaatacttcatactccttgcggatatcatcgctatctgccggaaccatgaacaacagcaacgagttacgctcgatatgacgcagaaaccgcagtcccaatccttttccctgactggctccctcgatgatgcccggtatgtccgccatcacgaatgactttccatcgcgataggaaacaattcccagattcggttcgagtgtcgtaaacgggtaatcggcaatcttcggtttcgcagccgaaatggcagaaagcaacgtagactttcccgcattcgggaaacctaccagtcctacatctgccaacagtttcagctccatgatcaccgtcatttcctgcatcggttcgcccggctgcgcaaagcgcggagcctgacgggtagccgtcttgaaatgactgttgccctgaccgccacgaccgcctttcagcaagatcacttcctgtccgtcgtccgtcacatcgcaaaggtattctccggtttcggcgttatacactaccgttccgcagggtacttcgatcactttatccgcaccgtcttttccgaaactacggttcttgctgcccgattcgccatgacctgccatcgcatgacggtcatacttcaagtgaagcaatgtccagtaattacggttaccgcgcaagataatatggcctcctcttccaccatcgcccccatcgggacctccgttaggacaatatttctcgcgcctcatgtgcgtagagcctcttccgcccttgcctgagcgacagtatatctttacgtaatcaacaaaattcgattcagccatattttttatttattataatttgtctactgcttcgcagatatcagcgaagataccatccatagtacccagaccgttgatgtgctggtatttcttttcgttcttgtaccagtcgatcagcggagatgtctgtgaatgatatacatgcagacgttttttgattgtttcttcgttgtcgtcggcacgaccggagtctttgccacgtttgatcagacgtaccatcagttcatcttccggaacttcgagatccaacattacagaaacatcctgtcctctttccgccaacatcttctttaatgcttccgcctgtgcaatcgttcttgggaaaccgtcgaaaattacacctttgctgtctttgaagctatcgaatacgcttgccagaatatcaatcatcaattcatccggaatcaactgcccctggtcgatgtaacctttagcagttttgcccagttccgtgccgttcttgatttctgcacgcaatacatctcctgtcgagatgtggttgattccatacttttctacaatacgttcgctctgcgttccttttcctgaacccggagcaccgaaaattacaatgttcaacatctttttaacctaaaaattaatttgtatttgaatttaatctactacagtataaatatcgggataattgcgtccgaaaccatcataatccaatccgtagccaacgataaaatcattcggtatttccatcgctacgtattctatgttcagattgaccttcagcttttccggtttcaccagcaaagaggcgatatgaatcgcttcggggttgcgtgtgcccagtgtatccagcagacgctgcatcgtcagtccggtatctacaatatcttctacgatcactaccgtacgtccggcaatgtcttcattcagcccgatcacttctttaattactccggtggaagtcaccccctgataagatgccaacttcacgaatgaaatttcgcacggaatcgtaatatgcttcagcaagtcggcggtaaacatgaacgagccgttcaacacactgaggaagagcggattcttacctgccaaatcacgattgatttcgttcgctacgcgaatcacttctttttgaatatcctgttccttaatggaaacagtaaattgcttgtcttttatctgtatggtatccataaccggtcattttaaaaaagttgtcgcaaaaatacaattttttattctaccccgtgcatcatcttctgtaatttcttcgagagaaggaacagaatcagtgaagcaacaccggacataatgacgaacagcatgaagaagtcatacatggtagcaatctgataaccaaggattgatttcacttttccgtcttcgggatagaggccactcagcatacctgcaaatttatttgcggtggcggtagaaagataccagatccccatcatcaaggaggcgaaacgtaacggactcaacttattaaccatagaaagcccgataggtgacagagcgatttctcccattgtatgaataaaataaagtcctgtcagccagatcatgctcacctttactcccggaatagcatctttcactccaaaacagatgaagagataaccaagagaaagcagtaacagaccgattgcctgtttggtaggggaagccggttccatgtttcgcttattcagaaagctccatataccgggcataatataggcaaggatcactacaaaaagcggattgaatgactggaaccacgaagccggcatctcccagccgaaaatgctgcggtcagtctgttcggaagcgaataatgtcagagaagctcctgcctgctcgtaagctgcccagaagaaaatgacgaagaaagctacgatatagattacgaaaatacggctacgttctactttggtcaatgaaccatccagcagaatgagcactggaaagacaatacaagccgtaaagatacccacactaatccagtcatcgctaaaggcatagctaaaaaaggctattaaggcaaccgtaagggcagtaatgatgatgatattacgtactttggtacgtttgtccatcttcggatgtgaaatatgttcggctttatcctcctttttttcacgtctggcgtcggggacgataccaatcggttcaccggaaggagagaaaaggtatttattcttctgagtttcaaagaggacaacagtgaacagcgtcatgattccggatgcgaggaatccccatttaaagtcctgcggattccctgtgtctcccaagaaaccgcaaatcaaaggagcggcgaaagaacctacattaacacccatatagaaaatggtgtatgcagcatccaaccgtttgtccccgggttcatataattgcccgacgagcgaagaaacggtaggcttaaagcaaccgttacctaaaatcatgaatccgagcccgccatacatcagccagtgggcaaggtctgtattgttcagtgaagaggcactcataaacatcaggaactgaccgactgccatcatcaccgctccccaaaataccgaacgacggatgccccaatatttatcggcaatgtatccgccgatcaacggagtcagatagaccagtccggtgtagctaccgtagatagaggccgccgcttctttatcaaaaagcaatgcctgcgtcagaaagaggataaagatagcacgcataccgtagtaactgaaacgttctgccgtgctcgttgcgaaaattaggtaaaggcctttcggatgccctttcaatgaactcatgaattatgtgtttagtagtttatggggcgcaaaggtactaaaaagtagattaaatgcctcaaaaaagaagattcttatggaatagaaaaatacaggatggcgtgcaagaagtctcagttacccaccttattatgttttcaacagtgtaaataatcaagtggatattctccttaaatgtgggtcagtccccatttatccaaaggtaaattcaacattctcaatactggcatagagcattccttctttttttctaagcaggattttgttttcccttgccagccaaccgatagcaatcgctacatcctcgaacgtcaaacctaactcatggcacaaagtgaacatagactgttcgcccttttcatttaagatgcgccatactttcccggcattcaagccaattcttttcttttccatcatgcaaactttagaagattaaacaatttatatttataatctaaacattgtgagcacaggagaataacgtaaagcacattactgcactacaaagatatcatttttttcgaaaaaagcaaataatcaaggcattagctgtttatattgtaccatatctactgacagctttattccaaacgccgaagacactcataaaggaagcagttctatagcaggccggagaaggcgtaactatctctcaaagtatcggaagatcaaggagaaagcagtagaatagttacatcaaagcaccgatatcattaactgaccacggtcgtgacaagcattgttcacgaccgtgattagcattgctcacggtcgtggcgaggtcttgtcacggccgtgagcaactaaagaaaaaggcactttaagagaagaatgcctgcatcttagccgaaaagtctccgcatcttatctgaagaatgcccgtacctttgcagagaaatatccgccccccaactgaggaatcacagacagacaggacaaagccaccccaagataacttctgatttcccctgcatttttcaatttgccactttatctaaagccgaaaaccaaccggaataaaggattaattcagagtttttgtgtaagtttgtgcgtcgaaaactaaaagaatatcgcaatgaaaatatttccaagcagcagcattaagaagttagatgcctataccattgaacatgaaccgattgcatccatagatttaatggaacgtgccgcacaggcgctgactaaagccatcactaacagatggaatccggaaacacctgtcaccatctttgccggaccgggcaataatggcggagacgccctcgccatcgcccgcatgatggcggaaaaaggatacaagatcgaagtatatctcttcaacacgaaaggcgaactttcgcccgactgccagaccaacaaagaactggtagagatgatggaagaagtaactttccatgaaatcagcacccagttcgtacctcccacactgacaccggaacatctcgtgatcgacggattattcggttccggactcaacaaaccattgagcggaggattcgctgccgttgtgaaatatatcaatgcctctcccgccatggtagtctccatcgacatcccttccgggctgatgggagaagaaaatacattcaatgtaaaaagcaatattatccgtgcggacgtcactttcagcctgcaacttcctaaactggccttcctctttgccgaaaatacagaatttgttggcgaatgggagttattggacatccagctgagcgaagaaggaatcgaagagactgaaacaaactacgaaatgctggaaatcgaagaaatccgttcactgatcaaaccacgccaacaattcgcccataaaggaaacttcggacatgccctgctgatagccggctcaaaaggaatggcaggtgcatcggtactggccgcccgtgcctgtctgcgatcgggagtaggtctgctgacggtacacgcgccgttatgcaacaacgatattctgcaaacgtccgcccccgaagccatggtagaaacagatgtcagcgaaacatgctttgccgtacctaccgatacggacgattaccaagctgtcggcatcggtccgggactcggtcgcaacgaagaaacggaagccgccctgatagaacaactggaacattgtcagactccgacggtactggatgccgacgcactcaatattctggccaatcaccggcatacgctcacccatctgccgaaaggttccatcctcacccctcacccgaaagagctggaacgcctggtcggcaaatgtcaggactcatacgaacgactgatgaaagcctgcgaactggcgcacactgccaaagtacatatcattctgaagggagcttattccgccattatcacccccgaaggcaaatgttacttcaaccagaccggtaatcccggtatggcaacaggaggcagcggagatgtactgacaggagtaatccttgcactccttgcgcaaggctatcccgccgaagacgccgcaaagatcggtacttacattcacggattggccggagacatcgcccagaaaaaacagggcatgatcggattaatcgcaagtgatatcgtgacttgtctgccgacggcatggcgacttgtaagcgaataaaagttaagaacttacggtttattcaataacttcattaactttgtttttcaaaatcagctaaaaagaaccgaatatgaaaaagttaatcatagcaacaggactactaatggcaacttccgcctatgcgcagaccgaagtgctgacaggagtgacgcgaggaaaagactacggagtagtgtacgccctccccaaaacccagatagaaatagaaataaaagcaaacaaagtcaactataagccgggtgaattcagcaaatacgccgaccgctacctgagactgaccaacgtctctgccgaacccgaagaatactgggaactgaacagtgtcaaagtgaaacctgtaggtgtaccaaacagcgaagctacttatttcgtcaaactgaaagacaaaaccgtagctcctcttatggaactgactgaagagggtcttatcaaatcaatcaatgtcccctacagcagtaacaatgcaaagaatgcagcaaacaatgccgttgctccccaacgaaaagccaatccccgcgactttctcacagaagaaattctgatggcaagttcaaccgccaagatggccgaactggtagcaaaggaaatctataatatccgcgaaagtaaaaacgcattattgcgcggacaagcagataatatgccttcggacggcgcacagctcaaaatcatgctcgacaacctgaatcttcaggaagaagccatgaccgagatgttttcgggagtccgcaataaagaagaaaagacatttactgtccgcctcactccggataaggaattcgacaatgaggtagctttccgcttttcaaagaagctgggtatagttgccaacaacgatttggcaggcactccattctacatcagtctgaaagacctgaaaacggtgaagattccgcaagaggacgggaaaaagaagaaagagatggaaggcattgcttataacgtaccgggacaggcaatggtgacgctgacggacggcaaaaagaaattgtatgaaggagaaatacctgttactcagttcggtatcatagaataccttgctccggtattattcaacaagaactcgaccatcaaagtttactttgatccggtgaccggtggactactgaaagtagatagagaagaaagcaaataaaacctctaaaaaaacaaaacgatgggtggcgaaggacatatgctcgacatgatacgtcggctgaaagacggcaaagaagcctcccgcttacgccgtgaacggagaaatgacaagttagggcgacttagaagaaacaacgacccttatcttctgccggatacgactccggaagagatggaacgcatcatcaaggattcggaaaagaaaaaagaaaaagataacagctatttcgtatggggaacgcttatcattatgggcgtactgataggatgtgctgtcctcctgtgggcaatcttttttaatggataattatccatttaataaatccgtctttctgtaattgggaaagataggtagatacacgagactcgtagcctgcttcatattgaaagtggtctgcgagtttttctataatctcacgaaccgtccgctgcccgtctatcaggttccatacggccgtaccgtgttcttccagacgcacatgaatatctttggacattcctttcggcaataaataacgactcatccacgaacgtttaaaacgagggaaggagagcacaatagtctccccttcctgttcagctttaatatgttcgttacgacaaggtatcacctccaggaggtttattttctctttcgtagccatatcttttctcttttatatcttttcagatagaatatatactgtgattatttctgaatatttgcttcttccagtccgtagcctttcttcttgttttccactttcagcatcaaggcaacaatcagggcaagtacaccgaacatagcaaaaatagccatcggcaaggtataatcataagtctgtgcaccatctacaaccggacctttgcaataagagttcaacacccatccgatcagcaaaggcacgcccatcaatccccagttctgtacccaaaagatcaacgcataagccgttcccaactgtttctccggaataatcttcggaaccgaaggccacattgccgaaggaaccaatgagaaagcaaatcccagaataatcatgatcaccgttgcaaaccaccatatattcagaataggaagagcgaacatcgtgtgtacgaaaatcagcatcaccgacccgatcaccatcagcgtggctcccttaccgatacggtcatataatgaaccgaacaatggtgtcaggatgatcgcgccaatcggcagcaatccgggaatcgttcccgcaagtttcggatcaacattgtacttctgtaccatcaaatcggccgcatacttgatgaaggggaatacagccgaatagaacaatacgcacagtaatgcgatcagccagaatcctttgttggtaatgatatagacaatgtctttcatgcggaaaggttcttccggttccagtccttccgcatccagtgaagcatccagtttcttatcgtagaaagtatagatgaagaatgcgatggtacctacgcacaacatgacgagacagaacagaatcggagcgggaatattggtatggaatacgccgctctcatccgtagacccgaagaagtctgccaaaggaacggtaagcaccatggccaaagttgttccaatacgcgcggtcgccatttccagtcccatagcgagagccatctctttgcctttaaaccacttcacgataatcttcgaaacggtgatacccgcaatttcgactcctacaccgaaaatagcataacccaatgcagccaatgtgacttgcatcttgaatccgaaaagcatcgcaccttccgggaaagtagtagtaatagcataatatttcaatccacaaccgaacaccatcaataaacaggcacccattccggtgaagcgtactcccatcttatccagaatgataccaccaaagatgagcatcagcaggaatacattaaaccagccataagcactggtgaaaaaaccgtaatctaaactgtcccagagaagttctttttcaagcatgggtttcagaggagacataacgtctgtgaggaagtagccgcacaacatggtaaaagcgactaatgctagaacactccaacgcagcactgcggagtcattcagcttttgtttcaattgttctgtcattgtaatatttaaaaggagttaataatctcgtaacgggcaacaaagttaactaattatcatttgttttactaaaaaaggagaacattttataagaaaaaggacatctgaccggatattcctgtatgaagaagagcagaccgggcccaataataaagacaggcgcgaactacacgtattacacgattctattagaatctcttgtaattcgcgtaattcgcgcctataatgaagagaacgggtcaaaaagcccgttcactcaataagtttaaaccgaatatcctgtcactgaattattctgctgcaggagcaggagtttcagtagccggagcttccgttgctggtgcagactctgcaggagcagtagcatctgtctgaggagcagcagtaccggtaggcatattatacgggttggtttgttgttctttctgtgcttgttccaacaatacatctttagctgcagaagaagaaggaacaacgtaagcagtagcaacgctcatcacaaccatgaagatagccagaccccaagttgctttttccagaaaatctgtagtcttgcgcacgcccatgatagcgtttgatgaagaaaaaccagaagcaagtccgcctccttttgaattctgaatcagcacgatgaagcacatcagcaaggctgcaatcaccattaagataatgaataataagtacatttttagttattttgaattagcgttaataatcaatttctccaaaaatctgatttggtctgcaaagtaagcatttttttttggatatttcaagcttaattttttaattatttcaagagctttcgaatatcgttgctgttttacgtagattttggccaaagtttctgtgaaacagctgtcatcttcctcttctatggtgttggtttcagttgtttcgtctgttctgcccgtttcgtttgtttcagcggaagaagctgcctttgctttctcttcttccctcaaaggtttcaggtatacgactggatcagtctcgcttttttcgataaagttgtcaatcagctcgtgtcctttcagcttgggcattgcctctgccggctcgtcggcgacaagtgtctcttcgagaaggtatgccgtatagtccatggagtaatcaaagcttgtctgactggttacttcttcgggagccgtcgaaagaaaagcatcgatcagagccagtgtccggtcgacggtaggctcatctttcaatacttcagagagaggcaaccctttcttctgggattcgacagcgaagcgttcgccttcgatcagatgaaacagtttccgtcggtcggcaatatacagaacggctttccgcagttccgcaccgaaattaatgtcgtggagaatatacaggttcttgagatacaacaaccggagcgactgaaaatacggatacctcgcgagctggttgcgcagttcgtacaaagtatccctattcagcgtctcgggatgctgaatccattgttgcaagttaacagaagtcattaaattaccagtttgctacagttgcattaaatatttggtcggttatctctttactcatttccgctattaatccatcctgtacggctgtcagcagctggctggaatcataggtacggaaagctgagaattgttgttcgaagtcttcggcgtgatttgtgttgttgacaaagcgtacattgaccgtgatggtcagcttcgtttccgaagagtaaccatcggcagacactgcctggttatactggttgtagcccgtaatttcaccgtcaatctgcagatccgcattctggttcggtttcagcagttgcagacgggtctgtctgatgaagatatctttcaggtcttcattgaacttggtagccagcggagcatacacatactccgacttaatcgggaaatcagcaatcgaaatagtcttcaccttatcgtaattgatagaggagccattaaacttataggacacactacaggcgatgatgactgccggtaaaacaaccaatatcagcggtcgtgctattttcttaatccaattcatattcttttatttttctgtaaagggtacgctcggagatattcagatccttcgccgcacttttccgcttaccatgatgcctctcaagcgctttacgtatcatttctttttccacttcatcgagcgaaagggtttcttccacatactcttccgtgtcctgaatatcgtcatcgtcttctttgggacaaacagacggttgctgcacagcatggattatggccggcacggaaggttggtgcgtcgttgtcactaccggagtagctactacctgtcccatctgtccgacttgtcccgcacgttcggccatcatattgtgcaccatcttcttcagttccgccacttcctgacgcatatcgaacaagacagaatatagtatttcgcgttcgctctcaaagctcttgctctcgcgtgtgccgaacagtgccggaaggcgttgggtattctgtgccggaagataggtctgcagaatcgcagccgttatctcacggtttgtttctataatcgaaatctgctctgtgatgttcttcaactgccggacgtttcccggccacggataagcaagcaatatcttcttggcatcttccgtcagctggatagccggcatccggtacttttcggcaaagtctgcggcaaacttacggaacaacaacagcacatcatctccacgctcacgcaaaggtggtatctgaataggcaccgtgttcaaccgataatacaaatcttcccggaagcgtccttcggcaatggcttgtgtcaggttcacgttggtcgctgccacaatacgtacatccgtcttttgcactttggatgaacctaccttgataaattcaccgctttcaagtacacggagcagacgcgcctgtgtaggcaacggcaactctcccacttcatcaaggaagatagttccaccgtcagcttctccaaaatatcctttccgctcaccaatagcaccggtaaatgctcctttctcgtgtccgaacagttcggaatcgatcgtaccttccggtatggcaccacagttgacagcaatatactgcccatgctttctccggctatattgatgaatgatctgtggaaaactttcttttccgacaccactttctccggtaatcagcacagacaaatcggtaggcgctacctgaatggcaacatctatggcacgtgataaagcctcggtattgccaataataccgaaacgctgtttcacttgttgtatctccgctttggtcatctatcttaatattaagtaataggtaataagtattaagtaataagtattaagtattaccatcattatcatctcgcttccatccgcatggctaatacttaatacttattacttaatacctattacttaatcttcgtctactgtatccagttttagtttatcactatcgtcccgcttctcgtaatactgcttccgcaacgggtttacccgtgccgctttctcgcgctggcggttgcggaatacatcaatcgctacataaatagcctggcggaaagagtcttcgctggccagtcctttaccggcgatgtcataggctgttccatgagccggagaggtacgtacaaccggcagtccggcggtatagttcacaccgtcttccatagccagggctttgaacggagccagtccctgatcatgatacatagcaaggattccgtcaaagtgagtataattgcccgaacccataaaaccgtccgcagcataaggaccgtaacagatgatccctttctcttccatttctttcatggcagggataatgatttcctgttcttccatacctagcagtccgccgtctcctgcatgaggattcagtgaaagcactgcaatacggggcgcaccgataccgaaatcctgtttcagacaacgatggaaaatcatcagcttttcctgaatcagttccttggtgattgttgtagcaatctcccttaccggaatatgcgtcgttactaaagccacacgaaaatcgtttttcatcaagatcatcagtgacttgtttccatggcccagacgttcttcaatatactccgtatgcccggggaaagagaactcttccgactgaatggtatgtttgttgatcggagctgtcacaatgacgtcgatcagcccctcacgatactcttctatggcacgctccaaagcacccaatgcagccttacctgcttcgggatcgggtttggagaattccactttcacttcgtcatctgtacagttcactacactcagacggttgtatccggcttcggaagctgtgttgacaatgctgaaattagcctgtacatccagtgctttacgatggtaagccgctactttaggtgaaccgtagataatcggagtacatagctcaagcatggtagggtctgagaatgtcttcaagatcacttcataacctaccccgttgatatctccttgggtaatgccgattcttattttgttttcttccatgtttttatttattagttggttccgcttctctggttacccccagtggaatctgactctgctgaccttcttgcggaagtttcagcgtataaagagatgcttccatctggcgaaccagattgcgtttcattttatcgggtgaatatacaaatatttctgctgtaataatacgttggttcttctgatccagacgagtatgggaaacgaacgggccacccatgaagtcacccttcatgcgccacaatccacgagcttccatcgtgtagtcattgtgcacgttgatcggacgaacatcggtcagtaacgagtctgtcgacatatatacgccttctttatatccggggatattggctttcatcacagaatcgcgcttatgaacaaagtattctttggtgaatgtatccttgtcagtataaggataagaatacatcacgaaattgcgatccgcgctgcctgtattggtagatgcccaaaagaagtcctctcctgtcttggagttattcagttcggaaggtatccagatatcgcagtcaaacagactatctaccttatttgagataaagttgttgtgcttttcctccagcaaagtaatctgacggttcatttcagcgcgagtgaagaagtcgataatcgtctgcttgttttcttcgacaaacttctcaaacacttcttcgttcggagcctgaatggtcagtatcatctgtggagaagcataaacgtctttcgcatacttgaaagtacctttggtataaatatcttttatatctactatcacaatattacggatcaacttcagcgtagaatcatagtccttcggtgaagtatacataatccggaaagaaggttccgactggggcagtcccggcatgtcagaatcaagcacatcatgcaaggcccttccggcggcacggtcccacactcccgcatctactacaaccaacagttcatacggacgaccgctagaggtatgattcccctttaatccacaagaagcaactacgaaggctaccaaagccatgcttaaataaaaaaagtactttttcatgatgttcgatttttatattaacttttattattttcctcctgtttcgcagtcgacagcataccgcatgccgcaaaaatatcctctccccgcgaagcacgaatggtagtgaaaagcccgtgcgtagtcagatagtcacggaaacgggtcatcatatccatatcggctccttcaagggctactcccggaatagaatggaaacggatcaggttaatccggcaatccagtccgcgaagcagtttgagtaactccttggcataaacttgcgaatcattaagccccttaaaaacaatatattcaaacgaaagtcgacgctgtttgctaaaatcatagttttttaacagttccaccatttccgtgatagaaaaggctttctccgccggcatcagttccgcacgctgggcggtcaccggagaatgcaggctgatggcaaggtgacagtcgctttcttcgataaagcgccgcaatcctttccgcaatccgacagttgaaacggtaatccgcttcgggctccatgcataaccataggaccctgtcagtatgtccaatgccttcaacacctcttccagattatcgagcggttcgcccattcccatcatgacgacattcgtcagtttgtcccgttccggcaaggagtgaatctgattgataatctgatgggcagtcaggttggcagagtagccttgtttcccggtcatacagaacttgcagttcattttgcagcctacctgtgaagaaatgcataaagtcgcccgttcatcatccggaatatacaccgactccacaaaatgattctcgcccacagggtacaggtatttcaccgtaccgtctacagagcgcatttcctccaccggagcttcagctcctacctcatagttctgcttcagtaactcccggtatttcaacgacaagttagtcatttcatcaatcgaagtcaccttcttatcataaagccaggatgcaatctgtttggctgcaaagcccggcattcccagacgtttcaccagtgactgcagctctataagcgtcattcctaagaggggatatttagacatcattctttctgttcatggtttatatttgcaaatgtaaggaaataaagtcgatttccgtatagcaaggatgtaaaagttagcaaaaaaggtcgttccaaagcatggaacgaccttttgcagttatcgtttttacgactaatcttagaagaacaggtaacgtgtatccttcacttttcctttcagatacagatcgttcatcagacggcttgcgaagcgtgcgtgcatattagccaatgtagcttcttcatctttagcgttaaaagtatcgctcagtttgtctttgccatacatctgaagcacaaatacaccggcattacctttgattggagcactcagtttgttcatttcagccacagaagcataagcacctaccagcggttcgctgctgcgcaattcagagacataagcgggagcggcaaatgtaaccagcttcaaagaatcgctgactgcgccgggcatagccttgtactggtcgagagaagttgcattggcagctttcatatcagccatgatcttttcggctttcttatctttaacgatttcagctctcaactgatcctgtacagctttcagcggacgatatccttccggagtaacaccaaccagagctactgcaaccatatggtcgctttcgccacattcatacaaaccggaaacatcacccggtttagcggcaaatgcccatctcaatgcttctttagtacctcttacaccaccgatagtgtgttctgagctatacaagtctcttctgtcaagcagtttgtatccggcttcttcagcgttagcgatcatcttttcagcagtaggattggcagcgatgaactggctgaagtcattgtaagcacggttataagtttctttactgaattcaacttcacgtttcacaacagctactttatatttatccttcacagctttcttgttagtcacctgcaggattacattagcttgtcccaacggcaggtttactacttcgttcacgcctgtattattgatagcagagataaacttcaggttgtcaccatcgatctgtgcgccttcatactgtgcagagctcatccagttagtctcacccgtctgaccgtatttcttagccagatctgcgaagttagcaccgcctttgatagcagtatagatactgtccgccaaggcttttgtcttcaaagcgtcttctgcaaacacctgaatctgacggaactcgattgagtcggcagcagctgtttttgcaaccactttgaatgaattaatagtattgtcggcaccattatagtacggaccataaacagaaccaacggatgcagagtccagacgggcaactacatctgacgggaaagctgttttattatagaacaagtctacataaggagcttccgaacctacagaacggatgaaagaagtataatcatctgttgtagtagccagctgtgcagtagcttcgtctacttcctgctggatagcagctctgtcttccgcacttgcagtcacctgaacatcaatgtacttgatatcacggctttcctgatattgcttgaactgttctttcttcttgttataaaggtctttcagttccgattctttcacaacgattgtagaatctactacagaagaataaggaacggcagccatcaacaagtcatattgattcactcttgcgtcgaaagcgtcctgtgcttctaccgggttagagagaagcgcttttgctaccaatgcctgatatttttctgccaggcggctctgaaccaatgtcttctggatgaatgaccagtatttgtacatgttgttgtactgttctgcatactgagccggcatctgagattcgttcattttagcgtaatctaccagaaacttattcagcatatccttatcgaaagcaccggtctgcgggttgcggaaaggagtctgttgcaacaacggatgcacgcctgctttcaggatatcctgaatttcagcagcagagactgtcagtcccaatgcttttgcttctttctcaaccagtttgttattaacgtaggaacgccatacttcgtcgcgcacctgattggtctgttcgtcgttcagtgcagtcactccgcgggaaagctttatcacttcggtatattcttctaccagattctgatactcttgagcggaaagagcatctccgttcacctcacctacgtcatgtgcctggtgcggttgcatcaccttccacgcgtcacccgcgatgaaagcaaacagcgccaaaccgataacaatcaccaatagaggtcctttcgacctaatgttttgtaatgttgccattttgattaatacgatttatgtttattattatttctttctattgtcattttagcgcacgaagatacaaaaaatgctaatatgcttctatttattagctaaaaatttcacggttatcgccattattccatgacttttaagcgtacaagttctatttttgtcgctgtcaccttgattattttaaactgataacggccgacacgtaccaattcgtgcagtttcgggaagctctgatattggttcagtatcaatccgcctactgtcagatagtcgtccgattcgggcagatcaagtccgaacatttcattgactttttctatctccagacgagcggacaaaacatattcatcttcgtcaatcttcttgtagatataggaagtattgtcatgttcatcttctatatcaccaaatatttcttctaccaagtcttccaacgacacaatgccggatgtacctccaaactcatccactaccacggcaatcgtcctcttttgcaacataaacagcttcatcagtttgtgggcagacatcgtttcgggtacgatcggcacgtctttcacgttatcgcgccagtctttcggatcacgaaacatttccgatgaatggataaaaccgaccacattatcgatatttccgtcatacacaatgatcttcgagatcccggattctataaaacggctcttgagttcatccaacgaagtagtaaggtcgaccgcaacgacttcggtacgtggaacgatacagtcacgtatttttatgtttgagaaatcaagtgcattttgaaagattttcacttccgtatccaattcttcttcattcgcagcattatcgatgctactctgcacgaaatagtccagatcgacttttccgaaagccttgtccgaagcatctttgttaaccttcataccgaatatacgaagaaaaaggcaagacaaaccggaagataacttcgagacaggatataaaatgacataacaaataaaaagcggaatagcggcaacattcaagaccagattgggattgatcttaaacaatgttttaggaagaaactctccagtcaccaaaataatcagagtagagatgacggtctgcgccaacaccatcagaaagtggttatcaataaaaccagccaacagattatcaccgatgatctgtgccatcaatataccatagataaccaatgctatattgtttcctaccagcatggtagagataaattcgttcgagttcttgaaaaagatggaaagaatacgggatgtgattcctcccttacgttccatttcaaagcgcaacttatctactgagacaaacgcgatctccattcctgagaagaaagcggagaaagccatagtgatgagtaaagagatataaatattcatagtttatttcacagaatcttttttcgtcgaatccggcggcaatgcttttacttccgattgagcagttcccccattttcgtcaacatagaaaatgccctcaatattctgaatgacataaacggtcatatcttgatttgactcaaaaccatgcccggtaatgactcggtccggctgttggatacgtataaatttatcagaataaactttcttggttgcttggttccaaaagagcaactcggtattaaaacgttctcctttccggttctgtatatcaacattccctattagcttccaaagttgttgtttatcataaaagtaggcagtatctgctttgatgctggcttcaatattaaagattgagtcgaactgttccaaataaactcctttttcaaaagcccaataagaaggcttcttacgatcgaacatcaaccattcttccgtcttcacccgataacgtgtcactcccgaatcagaaataagggttgtaactcccaacgttttcatcattggtaatgagtcacgctcagtaatagcatcacctacagtcttcttcttaccgccgcaggaagaaaatgaaagaagcataacaattgccccgaaggcaattgttatgcttatgcttttatgcaacaaacggttacttcgttttcgcaacataaattttatctaatcgttgtagtctctccgatccagccaccgatagtgatgcggtcgccttgtttgtaacctaacataaataggtctttagcctgtggagtatgaccggaatatgtaccaatcaacttgtttgcttcttcagccacacttgggtcaacagcttttgcacgttgcagtttatcaattacagcgaagtaagtacacttattcaatgcagactcatcactccagttaggactcattgcatacaagttagcaatcaggatataaggagcaccatagttctcgttgaagctaattgctttctgacagtatgatctggcttgagacaatttcttagcagaagccaatacagctgcagcagcatatgccttttctgctttcttcacgttgtcagtttccaattggattgcttcgtcaaagaacttcacagcaccatcaatatcacctttcttgaatgcctgataagcacatcctgtagcagcttcagctgttggctctatcttataagcgtagaaagatgcttgcaaataagcttcgctttctgtacatctcatcattttcatgatatcgattacttttttcagataagccaagtctgtctggttagcttctactttcgggccatagatactttgcagagattcgcagtcagcagtaccactgtttacgaacaaagccacgaggttatctttgatacccataaagtttttcttttttgcttcattagtttctgcagcaatagcagcgtcagcatattctgaagcaagcagataatcctgaataaattgttctttatgattaggatcagctttcagtttatccaatgacatctgaaggaaataaaaaagcgtagcagctgccgattcgcctttcactgcatttacagactggctcaaccattgataggcttggttagcgtctactttcggagccaaagcaatatagtctacagccttgatacccagtgcttcgtcagcagaagacactttagttccttttgcaaggaattcttctgtgtatttcatacgcaaatcatgcgtattcatcaattcatcaaaatacttctgatattcaggattattcttatccttaatctgagccatcaagcctttaaggattttatatccgtcagtaaaagtgtaaaaacggagtgtgggacaattttccaacacagctttccagggagtatacgcatctttaaaatttcctgcacgcacagcctcatgcgaaatactactgtttgagttacagttagacgcatcctgtgccaccacagtggttgctccagccgaaaggaacaacatagccacaagcgttttaattttcattgtatctaaattttagttgtttatataatatcgtctattctctctctcacttttattactctaccctacgcttgaagaaccaacgttcgttgaacgtaagcccgatactcacgcggaagatattttcattcaccatgttcgtctccagtccttttacgcggacaaactgtccactgatactaagtatggaacgcgaacggggaacaggcagaccgaaaccggcagttacaccatattcacgtgaagcctttttcccatcaatcttataatacggtgtcgtataataagctcctaaacggtattttatgtgggcgaaataggaacgtcctatcaaattaggaatgtattccgcacctactgatatttttgtacgatcacaataagtgaaagtttcattaaagtcctgacgtacatcttcgtcagtcgttgctacaccaaaattagtttttgaccattgctgtaagctataatctgcaccaaccgtcaaacgcttgtcatagttatatgtaaatccgactccaaaggtattgggtaattcgaacgtagcgtcctgtgcattcttatattcagttccataattcgtgttggctcccatgattacaattgccgtataatcattattcaacttatgtttaggagaatatacagcaccaatcgtcaaagaactctttttattcaaagcctgtgtatattgtgcaccgaaatccaatttataatcagaaatcgaggttaccatttttcgctgataggaatcataagaagatgttcccggatagaacattcctcttgtacgggttatatctccccaaaaataagatgcattcacaccgacagagagatttttaagcacttttacaccagcaccaacgtacatttgatgcaaaccaccgtcgccggtaaaacttctgctatatgccaaaccattgtccgtagtctgactatcagacaccgtataccccacattagaatatggcaacaatccgacactcatcgccatccacggagccaatcggaactgcatagcgagataatcgaaactggcgtttttggcattcaacttcaggccaccaccactaatattcatattctgtaaactgacacccccttcgaacaggaacgtcaacgaatcaatggccgtataggaagcaggattcgttggattgatctgtgctccatccctgagtccgaaagcaattccacccatcgccttgctatttccgaaactttgatcggacaagtcgccatagccatatcgtgtgtaaggagagtttgtattattttgagcgattgccgttccggtaaccatcatgagcaaaagcgcccaaatcgtgtgtttaaatcctaccattattatagtttaaaattctatttaatcctttcaacactaaaaatctatctgcaaagatggcactttttacgctgctatcaaaagaaaagtcatctccgcccgttaaaaaaaccaaaagttcaggatatttatgcttcatagcctcaatataacctgaaatttcatattccattcctttcagcacccctgcacggatggcagtttccgtatcccttcccatcggcagtttgcgcccgttggagtctatcagcggcaagcgtccagtaaactggtgaagcgctttatagcgcatctgcatgccgggagaaatattaccgccatgatattgtcctttcgagtcaataaactcataagtaatgcaagtgcctgcatcaatgaccaagatgtcattatgaggaaactgctcgttggcccccactacggcagctatccggtcgtatcccaatgtctcgggagtttcgtatagattacctaccggcagcggagtctcatggttgagccataacagagggaacggcaaagcagccagttcggcaagtatccgttcgttcaaatcgacgacagtagctacaatcccccgctcaatccggtatttggagcaaagagcctccaagctatccaatgattgattggattcggtcaacacctccaccatctcacttccattgaagagggcaactttcgctgtcgtatttcctatgtcgataattaagttcaatacttttcgtctttagcggcgcaaaggtaaagtaaaaaaagaaaagttgaagcatacaggaggaattatcttcttttttcatttcaaatatcgtcccaaacgccaaaatcgaactatatatttttaaatatataatttattagttatcccttattatggtaccgctttgcgtttcatagttatttttccttacgcgacatttctctatgtatcaatcagttacaagaattttaaagtgttccgctcagcgttccacattttataaggaaaaaagaacgcttttagaggccctatttaccctaatcagaggctctgtttgggtgaaacgaagcctctgtttgggtaaaacaaagcctctgtttggataatccaactattcttcgtatattcgccaccaaaataataaacgggcatttctgatgaaacggacaattctatatccattactgactctttatctgcttatcttttcaaacggacaagccatagcttctggcaacgactccatccgcctcagcctgctgacttgcgcccccggtgaagaaatatactccctgttcggacatacagccatccgctacgaagatccggccaacggaatagatgccgtattcaactatggactattcagcttcaatactcccaacttcatcctccgtttttcactcggtgagacagactaccagctgggagctaccgactacgcccgtttcgcggcggaatatgccttcgacgggcgcagcgtctggcaacagacactcaacctgagcaaagaagaaaaagcggaactcatccgactactgcaagaaaactatcttcccgaaaacagagtttaccggtataatttcttttatgacaattgcgctacacgcccgcgcgataaaatagaagaaagcattgacggaaaggtaatatatcccgcagagccgcaagacggttcgctatctttccgcgatatcgtacatcaatactgcaaaggccatccgtgggcccgcttcggcatcgacctctgcatcggtagcgaagcagaccgccccatcacgcaacgccaaatgatgtttgcccccttttacctgatggatgctttcgcaggcgcccaaatcgtccatgattcggttcagcgtccgctcgtatccggcaaggagctgatcgtagacgcccttcccgaggaagaagaaggcggttggatgcccaccccgttccaatgttccctcctgctttttatacttaccgcagctgctactatctacagcatccgcaaaaggacaggactctggggtgtcgaccttattttattcggtgccgcaggcatcgtgggctgtgtgctggccttcctcgccctattctccgaacatccggctgtcagctccaatttcttattgctggtattccatccgggacagcttctgctccttccatacatcatttattgtgtccgaaaaggaaagaaatgctggtatttgacgctgaatatagtcgttttaacactttttatggtgctttttccgctaattccgcagagatttgacttagctgttgtacctttggcactctgtttgctgatacgttcagcgagcaatttgatattgacctctaaaaagaaataatgaaaggactactaacttccttgattaccgtactgaccttcaccgggctacaagctcagtcgttgcctactgcccctaaacttgtggtaggactcacgattgaccagttgcgtacggactatctggaagctttttcgtcgctctacggcgagagaggcttcaaacgcctttggaaagagggaagagtattccacaatgcagaatatacattcagcggtgtagaccgtgcctctgccatggcagccatctacagcggatcaacgccttccgtcaacgggatcatttccaaccgatggatggatgtagccaccctacgccctgtcaacagtacggacgatgcggccttcatgggttattacaccgatcagacctgtgcccctaccaaattattaacctctaccattgccgacgaactgaaaatagcgacacaaggcaaaggtatcgtatacgccatcgcccctttctgcgacgcagccattttcgctgccggacatgcaggaaacggagcgttctggatcaatcccacgaccggaaaatggagcggaacgacttattatggcgaattcccctggtgggcaagccaatataacgaccgtcaggccatcgactcccgcatctccagcgtcacatgggaaccggttttcccacgtggtatgtacactttcctgccagattggcgggacgtagtgttcaaatataaatttgacgacgaccgcaacaataagttccgccgtttcatcaccagcccgttcgtcaacgatgaagtaaatgccctcgcagaagaagcaatcggcaaaggttcggtcggcatggatgacattactgacttattggcacttacttattatgcaggcaactatgagcacaagtccgtacaagagtgtgccatggaaatacaggacacttatgtacgcctcgaccgcagcatcgccaacctgcttgacctgctcgacaagaaagtaggcttgcagaatgtgcttatcttcgtcacttccaccggatatacggacagcgaatcgacggattcgggactgtacaaaataccgaccggagagtttcacctcaaccgctgcaccgccttgctgaacatgtttctgatggccacttacggtgaaggaaaatatgtagaagcctatcacgaccagcaaatctatctgaaccacaagttactggaacaaaagcaactgaacctgacagaagtgcaggaaaagtctgccgacttcctgatgcagttcagcggagtaaatgaggcatattccgcccaccgacttctcctgggttcatggactccggaaatatacagaatacgcaacggctatcaccgcaagcgttccggcgacctcgtgatcgacgtgttaccgggatggactatcgtcagcgaaaacggcaacgagaacaaggtggtacgtcattcctatatccccgcaccgctgatcttcatgggtcactccgtgaaaccggccatcattcagacacctgtaacaatcgaccatattgcgcctacactggctcatttcatgcgcatacgggctcccaatgcttcttcttcggctcctattaccgatcttcggtaaaagattcctcacaaaaaccatgcgaaaaacataaataaatcagcattttaatgtaactttgcgcggatttatatatggaaaaagcaccgtgcagacaatcaagaaataataataaactaaataatacaacatgggatttaatgaatttttaagctcgattttcggaaacaaatccacacgagacatgaaagaaatcaaaccctgggtagaaaagatcaaagctgcctacccggagattgaagcactggacaacgatgccctccgtgccaaaacggaagaactcaaaaaatacatccgcgaatcggctactgacgaacgcgctaaagtggaagaacttaaagcgagcatcgaaagcaccgaactggaagaccgcgaagaagtctttgcacaaatagataagatagagaaagaaattctcgaaaaatacgagaaagcactggaagaagtattgcccgtagctttctctatcgtcaaagcaactgccaaacgatttacggaaaacgaagaaatcgtagtaaccgcgactgaattcgaccgccatctggctgccaccaaagactttgtacgcattgaaggcgacaaggccatctaccagaaccactggaatgccggcggcaatgatacggtatggaacatgattcattacgacgttcagctgttcggtggtgtcgttctgcacaaaggtaagattgcggaaatggcaaccggtgaaggtaaaactctcgttgctacccttccggtattcctgaacgcgctgaccggaaacggtgtgcatgtagtaaccgtgaacgactaccttgccaaacgtgactccgaatggatgggcccgctttatatgttccacggtttgagcgtagattgcatcgaccgccatcagccgaactccgacgcccgtcgtcaggcataccttgccgacatcacgttcggtaccaacaatgaattcggtttcgactacctgcgtgacaacatggctatcagcccgaaagaccttgttcaacgccagcacaactacgctatcgtcgatgaggttgactcggtattgattgacgatgcccgtactccgctgattatttccggtccggtgccgaaaggcgacgaccaactgttcgaacagctccgtccgctggtagaacgtctggtagaagctcaaaaagcattggcaaccaaatacctttccgaagccaaacgactgattgcctccaacgacaagaaggaagtggaagaaggattccttgccctttatcgtagccacaagtgtcttccgaagaataaggcattgatcaagttcctcagtgaacagggtatcaaagccggcatgctgaagaccgaagaaatctacatggagcagaacaacaagcgtatgcacgaagtgaccgaaccgttgtacttcgtcatcgaagaaaaactgaacagcgtagacctcacagataaaggtatcgacctgatcaccggtaactccgaagacccgacattgttcgtgctgccggatatcgccgcacaactctccgaactggaaaatcaaaacctgaccaacgaacaactgctggaaaagaaagatgagctgctgactaactacgccatcaaatcggagcgcgtacacaccatcaaccagttgctgaaggcttacaccatgttcgagaaagatgacgaatatgttgtgatcgacggacaggtgaagattgtagacgagcagaccggacgtatcatggaaggccgccgctactctgacggattgcaccaggctatcgaagcgaaggaacgtgtgaaagtagaagccgcaacgcagacattcgcaacgatcactttgcagaactacttccgtatgtatcacaagctgtccggtatgaccggtactgccgaaacggaagcaggcgaactttgggacatctacaaattggatgtagtcgttatcccgactaaccgcccgatcgcaaggaaggatatgaacgaccgcgtttacaaaaccaaacgcgaaaagtataaagccgttatcgaagaaatcgaaaaactagtgcaggcaggacgtccggtactggtaggtacgacttcggtagaaatctccgaaatgctgagcaaaatgcttaccatgcgtaagatcgaacacagcgtactgaatgcgaagttgcaccagaaagaagctgaaattgttgcaaaagccggtttcagctgtgcagtgaccatcgctaccaatatggcaggtcgtggtaccgacatcaagctgagcccggaagtaaaagccgcaggcggtttggccatcatcggtacggaacgtcacgaatcccgtcgtgtagaccgccagttgcgtggtcgtgcaggacgtcagggtgacccgggttcttctgtattcttcgtgtcactggaagatgacttgatgcgtctgttctcttccgaccgtattgccagtgtaatggacaaactcggtttccaggaaggcgaaatgatcgagcacaagatgatctccaactctatcgagcgtgcacagaagaaggtggaagaaaacaacttcggtatccgtaaacgtctgttggaatatgacgacgtgatgaacaagcaacgtaccgttgtttataccaaacgccgccacgccctgatgggtgaacgtatcggtatggatatcgttaatatgatttgggaccgttgcgcgaatgcgatcgagaacaatgactacgaaggctgtcagatggaactgctccagacattggctatggaaactccgttcaccgaagaagaattccgtaatgaaaagaaggacacattggcagaaaagacattcaacattgccatggaaaacttcaaacgcaaaacggaacgcctggcacaaatcgctaatccggtcatcaaacaagtatacgaaaaccagggacatatgtacgaaaacattctgattcctatcacagacggaaaacggatgtataacatctcctgtaatctgaaagcggcttacgagtccgaatcaaaggaggtggtgaaagctttcgaaaagtctatcctgctgcacgttatcgacgaagcatggaaagaaaacctgcgtgagctggatgagttgaagcactctgttcagaacgcaagctacgaacagaaagacccgctgttgatctacaaactggaatccgtaacactgtttgacgctatggtgaacaagatcaataaccagactatctccattctgatgcgcggacagatccctgtacaggaagctccggcagacgaacaacagccacgccgcgtagaagtacgccaggctgctcccgagcaacgtcaggatatgagcaagtatcgtgaacagaaacaagacctcagtgatccgaaccagcaggctgctgccagtcaggatactcgcgagcaacaaaaacgcgaaccgatccgtgcggaaaagacggtaggacgcaatgatccttgcccatgcggaagcggtaagaaatataaaaactgccacggacagaatgcttaacagcagtccgatgtaagattataatctaaaagaaagcctcaaacggttaaaaactgtttgaggctttcttttattcatccaaaatagtacttttgcttaaactactaaagatatcaagactatggcaaaattctattcactggcatttgtttctctgctactgttggcactcggcagctgtcagagcctggagcagatttctattgactatatgcagcccggagatatgactttcccttctcaactccgtaaagtggctatcgtgaataacaccagcaccgaaccggataacaagctgatcacacagaccgaaaagccgaaagaaaacgtacccgaaataagccacgccacagcgtatgcaaatggtaacgttaagattgcggctgaatcgctggcggaagaaatcgcgcatcagaactattttgatgtagtggtgatctgtgattccgctttacgggccaatgacaagtttcctcgtgaaagtacattgagtcaggaggaagtccaacagctgacatcagacttgggagtggactgtatcatcgcaatggaaaacctgcaattcaaagcgaccaaaacggtttgttatatccgtgattttaactgctacctggggacagtggatgtaaaagcctacccgacggtgaaggtatacctgccctcgcgcagcaaaccgatgactacgctacaccccaccgacagtatcttttgggaagaatacggaggatcggtaacagaaacatttgcacacatgatacctgatgcacagatgttacgggaagcttctgaatttgcagggactatccctgtcaaacagttactccctttctggaaaacaggcaaacgatacttgtacaccggtggctccgtacagatgcgtgacgcggcaatctttgtccgtgaaaattcatgggacagagctttcgaactttgggaacaagtgtacaacggaaccaagaaggaaaagaaaaagatgaaagctgccctcaatatcgctgtttattatgagatgaaggacagcttggcaaaagcagaagaatgggcagtcaaagcacagcaacttgcccaaaaagtagataagaaaaacattcccgaaaatgcggcgtacgccaccattgacgatataccgaattactaccttacaaccctttatgcaaatgaattaaaggaacgtaacagtcaattgcccaagctaaaaatgcaaatggagcgatttaatgatgatttttaaggaaatcatgcattgattattattttttttatacctttgaggtaacaaaaaggaagaacctatgaaactgagccaacaatctctgtctaccatcgaatcggctatccaaaaggcagccggcaaatatgtatgtggctgcgaccagacagccgtaacagatattcatttacaaccggaccaaacatcgggacaactcactatttataacgacgatgacgaggaattggctaatgtaatgattgaagagtgggcaacttacgatggagatgatttcatggaaaatgtagagcccaacctgaaaagtatcctttgcagaatgaaagatgcaggagacttcgataaagtaacaatattaaagccttattcattcgtactggtagatgaagataaggaaacagttgcagaattgttgctgatagatgacgatacattgcttgtggatgacgaactgctgaaaggactggataaagaactggacgagtttctgaaaaatttgttggagaaataaatatgttcgattgcccggcatggccttgctgaagcaattatcatttataaaaagcataatcggaagtaaaaggtattcccctgtttacttccgattattcttttttcgttttatatgattcgtacaaacccaagtttccctatcgacttttagtcactcccgtttaaggcagcactaccgactttttagtcagccctctagctgaaagccggagcagtgtaggtagataaattactttgcttcaatcgctgtccgataaacagattttgccgtttcaattacattttgtaacttatgatctgatgaatcagctgttttgtttttctccgcccatgctttctccatgccatagaaattaatcggttcttccgctgattcaccaagtttgccgtccaactcccgttgtttctgctcaaagaaagttttccaacgttgataatacaagtctttcaaaatcccgctccactcccgatgggaataatcatgcagacctccctgattagcagctatactgtctccccaaaccgtgatcagcgcagaagcattccattcgtaaagtttcttttcttcttccgtggttcccaaagaacgtgcggcattcagccatgaagacgccgagaactcctttcgggtggacagcaaactgtcctgagctaatattaactccagaaactgttgtgtctgtttcccgaagctatccttatctttccgatcataactctgagaaatttcttcaagcagcacattccccttatctgccaggctctgacgcaccacgtccaccaaatcatattcaaagttattatttcccttgtactgatctgcaacagaaagtaacaagcgggctgcctttgccgttgaatcaggtgaatagaataacttggcatatccccatgtcgacgttctgtccagatgaaatcccggacgggcgcacaacaaggattcgactgtcccttctccctgataattcttcggagcattgtaaactgtatgttccaacgcacgccatgcttccgctacttccggtgacaaatcatttccataccgcgctttcagatacgcttgcagccattcatccggtgaaaaacgttcttcccgccaaggaagctcatacagcaattcaaacatcaccggattattctcgattccttccggagtagctcctaccccccgcaaggttttcccgttgacatgtgcacaggcgttataatatccattcaccaactgctccatccgtccatgcagaccgacattaccgccaaagttaagcaacatacaataaagccagtcatgcttgccgaaacctttctcccgataccacatcgactccggatcaccccattgcgggagcttttcactatacaaatccagtaccagcaaatcactggaatcgagcgtgttgaccatcgcttcccgcggattcgcctgccatgcctgcatcacccacacagcctccggattcgctttcttcatagcactcataatagaagttcccgcctttgctaagtctactccttccgtatttcctccttcatgaaaggggtccatactgtaatactttgcttttccgtacagtttctccaactcctcataatacatggcagcaaatgaatcgaaatgttcatcttccgtagaaagaaaggccggacgaggaaaaccgcaccatttaccgggatcggcaatctgataccccagtttctcgccgatattacgggggaccattcctgcatatccggggaataccggttcaatgcccagctccctcattcgggcaatgatcttcttttgcagtgcttcctgttgccgataccaactgtcgggattcggtccgccccatccttccagattattcatctgccaccatgccataaaggcaggaccggaaataaactcattgatctcctccgtcgtatatccgatacgcttcagcagattataccagacaacctccatccctgttatactcaaaggcatattgatgccgtgcatcgccatccagtctatttctttctcccagcgttcccagtcccagaaagccatggagtaggaataggtacagtaattcaggtaatatcgattcttcatagccgtcgcctgtcggattttcttttgaggcagaggcagtacttccggcaacttctgcgagggattattccacgaaagatgaatacctgccacgtatttcaggtaccaattcaagcccgtagccagtgaaagatcggagtttccggttatcagtactttgccatccttggagtctatctcaaagtagtcttttgccggatcggtttcatcagtaaccaaccggaaaaggatttgatctttcgacgtattctccgtcacacgtgctgccaatgaatcgattggagcagacgtggactggcaacttgtatacattacaacagaaccgaataataaaagtaatagaaggcgcatgttcatagtcattattttttaagggtcatcaaatgtgtttgagcgtttgagcctctaaatatatttcaaatttccgattactgaaaataaaatgtagttcttttatactgatacacattaaataacctccaatatatgaaaagtcggaaagattcggttgactcaccgactgtttccgacagatagcattggctctaataaagaaagaagatgtgtcaaacagttatttgcacatcttctttcaatttgtgtttcagttaattattactcccatcccggattattgggggccagttctgggtttaatgcgatttcattagtaggcacctgatacagataatacttatctaaccaacctttacctgctaccaaaggatcattatacatatagataaaaccttctttctttcctgtcgtatcggcgtatcccttttcaagatcaacaaactgtccggagtcgccaatctgctctttagtagcccattgaccatactgtatcttattgataaaccaaggtgcttttttccaacggcgcacatcgtagaatccaaaaccttcacccatcaattctaccatacgttcacggcgaatctcccacaatacagggtctacggtctggtcgcgcttcggatcaaatccggcatttatctcggccactttcatatgggcaactcccacccgatcgcgtaacttattgatagtaagatcagcaactgtctgattgaagccttcggcacctgtaccacctttttcaaatttagcctcggcataattcaacatcacttcatcaatcttgaacaaaggtacatctgaggtcccttcattctctttcgaattatcccaaacattatagtatctgtacacatagttaccgctacgggctacgaggaaaccttgtccaccattgttggtgaagaagtgaggcattcctttcaatatagcagcagaccagttcatcaatgggaacactttatgtttaccggcttccccatttccacccccgaagcctgtgtaacgggtaatgcccatgatatccataaactcacggtctttaggatcggaggtatactcccaactggtattatcggcacttgggatcaccttataagggggagctacagtctccagcagacgaaggtcacgattgcggaaggtagcattcatactattatccccgtcctgcgaccattcatattccgagctgttatggatcgttttaccatctttacaaagatacatgtcgatgatgtgttgcggcatttccacattatgggtggatgtccgttcaacatgcgtcagtacataattagtcagttctttttctacatattccttatacagaatgatgcctttcattcctttcaggtcagatgtcagcatctctccccagtcactgttcagttcgggataagaatccatcagcttcttggaataagtgatacaagcatcaaagtacttatcttcgtcccccaaagcatgatatttacgccaagtaccttcaaaaaggcagaaacgggaaagaagagcacggacaacatgcacattgatcgtattttcaccgtcaccttcttcttttatatgctcttcagcgtatatcaaatcgttcaatacatgatcggcaacttctttgcgaggtgtacggggaccatatgctatttccttatccgaatcacccagtacacgatctacccaaggcacatcaccaaaacgagctatcagttccgaataataataggcacggaaaaaatatcccaccgaacgccaatgttccttgtccgcatccgtcatccctgagttatcgatatttgccaacatgacattgacccgatagacgaaactgaatgcccatccattgcccgatgacgaactggatacattttgaaaagcatacggattaccgtcaccctgacgacgcatcagataacctgcataaatatcgcttgtataggatgtggcactggcataggctccgtttgttccgggaatacgcaggatattagtatttgtaaatactccatataatccccaggcataggtcttgaaagtattataattactgaacactgtctgctccgtcaacgaagtatccggatagcgttccataaaactatcgttgcatgaagtaaacccgatagctgctgccgcaagcatagtatatattatttttttcataaccaattataaattaaagagtaacattaaaaccaaaagaaatcgtacgatagaaaggatatccccaagacaggcgttccgggtcataacccttcatcagcttagtaaatgtgtgaaggttctcacaacttacgaacgctttcaaactcgttaatgtaataggtgctaaccagctcttcgggaaattataactcaaagtcacattcttgacacgcagataagagccattcatcagatacttcgtttgcgcacgtgtattgtaaccggagttgtttccttgcccgtaaatacggaaatattccgcattcggattggctgccgtccaatcaccattggcagaatctaccggtttccaataatccagctggtctttaaagagtgaaccaaactgtccggaattaaacggccagcggcgtgcatcactgatccatacatcacgtttacctactccttgcagcaaaacactcagatcaaatcctttgtaattgactcccaggtttataccatactgcaaacgcaaagagttattaccgattatcttgcggtctcccggattgtcaaaggttccgtctcccgtatcaatgcgattcgtactcgatccatcatcacgcaaattctggtacttgatgtcgccgggacgcggacttactccatccactgtcaccaccccttctttcaatttccaggtatttgtatcttcaaagtcatcggctgtatagtaaccatccgttacatacccccagatagaaccgatttcatatccttcataataattattcgtgccatcacttttcaggataatcttggattcattatggtatttggtaacgactgttttagagtcataaagattgaagcctacattatagccccatgcaccgattctatctctccaggtcaatgacaattcccagcctttcgtacgcaagtcggcggtattctgcaaaggtgcggaagcacctactactgacggcagctcagctcccggagcaagcatatctttcgtatcacgccgataccagtcgaaagtactttgcagacgtccgttcaaggcagttatatcaaaaccaaagtccaatgtttctaccgtttcccaagtaaaactatcactgaccagtcccggagcattcaaagtcagcggcttcgctccattcaccagccacgccacatccttcttttccacttgcgacatggtcggaacgaatttataaggatcaatgccttgattacctatttgtccccaggttccgcgaagtttcagatcgcttagccagtcacctgcaaccggtttcataaagttctcgcgggcaatgttccaacccacagatacagaagggaagaaaccgaaacgatttttcttcgggaatttagacgagccgtcataacgaccattggtctcaaacagatatttgcctttataatcataattaatacgatagaaagcgccacgcacagtatacacacgatgatcgtctgtaataaccttattctcaccggtagccgtactatgtgacggatacttctcgttaatcatatcataagaataagtatacaatttcttccagtcactggattcctggttgaagccgcccattaatgacaagttatgcgtatcattccatgaatatctataattagcatacaggttgatggcattataatcagtactttggtgagtcgtctccagagaagaagtagtggcagtctgtatttttgccagctcaaccgttgtataatcaatggaagccttattcacattctgattactccatgtcttgtcaaatgtatattcaaatgccacttcaagccctttcaatggtttcaataccgtttttgacaggatacgggcattgtctctgattgtattgttatccgttgccattctcaaaacgttggaaggcgtattcgtcatcaggctggtgccgtcaggcaaagtcagggagccttcgggatatacaaccggcaaacgcatatcatacaatccggtcttatccgaagtcacaggcatattcttgtcactctgagcatagcgtatatctacagactgagtcagccacgaggtgatttcggcagaaatataggcactacccgacaaacgtttgtagcggtctttatcggtgatcaaaataccttgctcgctattataaccaagggacagacgataagccagcttatcagtaccaccactcaatgacacattatgtgcttgcagaaaaccgtaatcatcaagcatattggcatacaggtctttctcattcagataataattcaatcctgtttccgggtctacatataccccgtctccggtagtctggaatttacccggattcttacgatattcggtcaggtagttcatccatgttttgatatcttgcccggtgtagtatttaccggcattgaactcgccgtccaggtaagcctgcatccactccagcccgtcagcctgttccggacgattgatagaactctggaaaccaaaattattattataattgacatgaaacccgtcacctttcttcgccttctttgtagtcacaagtattacaccgaaagcggcacgcgcaccatagatagcggccgaagcagcatctttcaacacagaaacactttcgatatcttcgggattcaacatatcgatatcccccggaacattatctatcaacaccaacggaccaccgccattgatggaagtcgtaccacgaatattgaatgatttgctctgtcccggaccggcagcatcattattaggagtaatctgaagtcccggcatcgcaccctgcaaagcactcatggcatttacaacaggacgactccccagtacatcatccatctttacctgagataccgcgccggtcaggttcgctttcttctgtacgccaaaaccaactactaccacttcgtccagactctgtgtgtcttctttcaatactaccgacagcgtctttcccggagttactttcagggactgtccttgataaccaatataagaaatttcaagaatggcgtcttttgaaccgacattcagggtaaaattaccgtccatatcagtgatcgtgccattggaggagcctttttctatcacactggcaccgattaccggttcacctgccgcatccacaactcgtccgcttacttttaccttttcctgatgcgcctgttcgacagatgccaactccgtggacagaatgatctttttatctattaccttatattctacattcgtatttttaaatacttcgtcaagaactttaaagatatcattacggttagcggagattgtcaccaaccgtttcaaatttatatgagcattgttgtagaagaaactaaattctgtttgcttctctatcgctcttaatacatcctcaactgtctgattacgtacattcatcgtaacctttgcagattgggcataactatctgtcgcattagttaatccgacaaaacaaaataaggataaaataaccagtctcatagtacgtgggatttttttcgaggttagccaaaaagactttaccacccttaaaacttggatgctaaaattgttttgcataattttgtattgatttaagttgaaaatgagttaactatgcttgtctgccaacaagcattttcaattgattcattttagtatggggagatctgccaaaatcttcccatacttttttctaagtgggttttgccttcatattattaaattgttaaaggttaatcaataaatttctattatctcttttttcctgtcacttccatccttatcatcattgatatgttgccaacgtattttagaggatactttaaaatattccagaatcttctccaaacgttgatttgtaaaggttcccgtaaacgaactattcttcagtttttcgttcttaataacaaatttcacactatatcttttttccagcatccataatgcttcttccaaaggtgtattatcaagaacaacttctccatctttccaagccaattctgattttcccgaaattttataaaggtggactttatcagtctccgaatcatacaccagcttctctcttggagataagaacacatgtttcaccccagcgtctttctcgaacataaaatctacttttccttcaatcaaagttgtaataacctctgtattctgttcatatgcttccacattgaaacatgtacccaatacttctatctgtgattgatgtgtagtagaaaggataaatttcttttccggatctttggccacttcaaagtatgcttcaccacttaacgtcactctacggaaatctccattaaagcgagaaggataagacaaagaagattccgaattcaaataaacaattgtaccatcgggtaatgtcaacgaagtgatcattccaggactagtcttaacttccatcatctccgctacctcaccagtatcccctttccaattctgccatataaataaggtaagaagcggaataaatagaattgcagcagcacgttgtgcccactcccaccacactatccttctcacttcacggtccgacatttttccctttactttcagtaaagctttctccgtatcaactttcttcattacctgaaccgtgtccacagccaaataaagggcaaaagtctgagtagcaactcgtttattctcctccgactcatctatccacgcttccacttccagacgttccccctcgctcaatctcccctcacaataacgaggaagcaattcttctattctattattatctaattctttcatcctttattctaccttttattatatgacaagaccaaaccatgacattcctaaacgaaaaccttatttttttcagaaaatctttattttattataaaaaagctatatttgcagcaaattagaatttaataaatgaaggaactacgcataaagaggaatgaccctcaattatctgaaatacagcgtggaggcctaaaagcctttgaaatgctattcaggcaatactatgcagtgctatgtgcctatggtcataaatatgttgactttcacgatgcagaagaaattgtgcaagactcccttctatggatatgggaaaaccgggaaaacctaattattgaatcatcattaagttcttatctctttaaaatggtacatcacaaggctttaaataagcttgcacacattgatgccatcaaacgtgctgatacgcgtttctatgaagaaatgcaagagatgatacaggatatggacttctatcaaattaaagagctaaccaaacgtattgaagaggcggttactgcattaccggaaagttatcggcaagcatttgttatgcatcgtttccgggatatgagctacaaagaaattgcagaaacattggaagtgtctccaaagactgtagattatcgtattcagcaagcactcaaacaattacgcatcgatttaaaagattatctgccattgctgcttcctttactgtttccttaatataagtgactccttccaataaattggattcgtacctattaaatctataccatccttcaactaaatagagaaaaacggtctctttttaggtaaagttcttttttgctctatcaattaaagctataaaacagaaaatagtaaatctgtatttatctatagtacaagctgatacagatcataaattctcaaccattctcatcatgatgagaattatttctcaccacagtgagaactttttctcatcacagtgagaatcttttctcattgcattgagaatttttctcattgtggtgagaatattgtctcatcgtaataagctgaccaaagtcttggaagtctgcaatacataaaacaaacaatcataaaggataagaagacagatacaatcctattcttgccgataaggtagcgtaaaccagaaagtagaacctttgttttcctctgattcaactccaatcgtccctcctaagcgatcgataatcatctgacaaatggaaagtcccaaacctgttccctgaacaaaaggattgtatttcacaaacctttcgaatacatgcttgcattgctcttctgacatgccgcagcctgtatccgagacataaaagcaaattgtatcggcatccttcagacgatatcccattctgatagaacctgtctgagtaaatttaatagcattgatgacaaaattagaaatcagttgtatcaaacgattcttatctgtataaagggtacattccggcagacgttcggtaaagataagagtgacagtttcttttttcaagcgaagcctcatactctgttcgatttcttccatcgtctggttgacatctatcaatgacgggcagaagtcaaaagtgccggcttcgatcttggacatgtccagaatatcattgatcagttgaagaagcaagtcggtatttgtttcgatgatgtctgcatattcgcgcatctccttacgatcttctatatccggcaacatattcgagaagccgacaatcgcattcaacggagtgcggatttcatgactcatattagccagaaaggcggatttcaactgattcgcctgctccgccttttccattgcctcactcagacgagtgtatgccttgcgaagaatacgtatataataggcgatcgctgctatcaaaataagaaggaaaatggaacaggaaaggatttcaacacagtattgatgaaatatacttttaggttcgttgacataaacagctcgttcaggataaaggtgatagggaatattgtaggattccagcaccggataacagaggtaggcactcgccttccctcctatactttcggaaatgtcctccgcctgttctccatgcaacacacggtcaataatttcaagtaaggaatcgccgaatgattctgcagaaacgtaatagcctcctgcaaaagtattattggacaggtcttcggaagaaagcaggaacaagggagaggacgtaaaattggtgataatctcttgaatatgatcaaaaagataattattatcttctttattatgcgactcaaaccaggaataataaataattccggtgtttgctttatagctgcgcaaggtgtccagaagcatttctgttgacaagtgagtggtagaaagcaattctaaaggcaggtttgggaaatgcttttcaacagcttctttcacgtctccgcgggtttcttcactgatgtagcgatcgtccgagataaatgccaggcgatccatatcaggtatcaggctatagatcagttcaacggtttccttcacatagtaatgctgtttcagggtagtcaggttgtagccttttctccattcttgggcggggacgctgttggtttcattcaacggggcatgagagagcagaatctccaaggtagcaggcaggcggtcacgggagttcgttatgatcaccggaacatctttccacaggtcatcaaataaaggacgacagacaatccagcccggatcaccaattatcacaatagcggcaggaggaagcggatatttctgacgcagatgctcgatgaccgcatttacctccatcgtatcctgcaaggccgggacagacaatgattccgctctggcggttatcccctgttcctgaaggacatcgtgcacataccaatagaagtttttggcccagggaaggttgaagttgatggaatttaaaaccaatatttctttatctgatttcccattacctgccaacataggggaaaggagtccttcgaaaagaagaaagaacgcacctgttaagcatattcgcagtaattgtttcattttgctgtgtgattaaaagtggaagcaaagataatattatttttatcttttaaaaagaaaggcatcccaaatctatcgggatgcctctctattacatatttttatgtatcagttcattatgccttttttaaagctgcgatgctttctttcaaagaactgataatactttccgcatcggcctgttttttacgttccatttcgagaacggctgccggggcgttattgacaaatttctcattgctgagtttcttcaatacaccttgcaggaatccttccttatgtttcag

SEQ ID NO: 4542 - DNA, 87271 bp, Unknown
  gut microbiota DNA sequence
ggcttggttattacatttagctggcgagttgcatataaatgatattcggaagctgcagtcttcaccctgtcagccacgtctgtcggtattacgattgtaaaagtaccctctttcttcaataaatcagccacacccttcagcaacttttcataagtcagagaatcgttatgtcgtgccatgcttctctgttggtccggacaactaagcgaatccacaaagtaaggaggattggaaacgatcacatcaaatttatccggagactgatagaacagaaaatcttgcttcaccacttctatccgatccttccagggagaacgggccacattttccttagcctgcccggcagcggcttcgtcaatttccagcgccacaatatttgcatccggcagactacgttgagccagcatcaaagcaaccaaccccgtcccggttccaatatctaaaattcgatgtgccccttgaacagaagcccacgcccctaaaagtaccccatccgtacctaccttcatggcacatttgtcatgccatactgtaaactgcttaaactgaaagaaaggattcgccattttattagccatctaaacctgttttttattgatctttgctgaaaaccgtcaaaaataaataattattatggaataaatccattactgcccgatattttggcattgtttttgtgtttttattccacactgtgctttattattaaagagaatcaattaactttgcaaacgatttatgcatattatgtatgacataaactaaattaaaacgaaaagatgaaagaaagatacttattggaagaagaagttggtgagaacggcttctcactgattaccgactatgatggcaatgacgaacatgtgtttgatgtgaatataaaatccggtgatattcttccggttctcccccttcgtaatatggtgttgtttcccggagtatttttacctattacagtaggcagaaaggcttcattaaagctggttcgcgaagctgaaaagaaacacaaagatattgcagtgatttgccagagatcggcacacacggaagaccccaaactggaagatttgcacaatgtcggcactgtcggacgaattgtacgggtactggaaatgcctgaccagacaacaacagtcatccttcagggaatgaaacgtctgcgtctgaaagatattgtagatacacacccttatctgaagggcgaggtcgaacttttggaagaagatgtcccaaacaaagacgataaagagtttcaagccctggttgaaacatgcaaggacttgacgatgcgttatatcaaatcatcagaaatgcatcaggactcgtcatttgctataaaaaacatcagtaatccgatgttcctcattaatttcatttgtgccaacctgccattcaagaaagatgagaagatggatttattaagtatcaactcattaagagagcgtacttatcatctattggaaatcttgaatcgcgaagtacagctggcagaaatcaaggcatccatccaaatgcgtgcccgtgaggatatcgatcagcaacagcgtgaatacttcctccaacaacagatcaaaacgatccaggatgaactgggtggcagcggtcaggagcaggaaattgaagaaatgcgcctgaaagcagttaaaatgcactggaatgcagaagtaagagatactttcctgaaggaactggcgaaactggaacgtacacatccgcaatcaccggacttcagcgtacaactcaactatctgcaaacaatgctcaacctgccttggggtgtttatacaacagacaatctgaatttgaaaaatgcagaaaagacgttgaataaagaccactacggactggaaaaagtaaaagaacgtattctggaacaccttgccgtattaaaactgaaaggcgatatgaaatcacctattatctgtttgtacggccctccgggagttggtaaaacatccctcggaaaatccatcgcatcggcactgaaacgaaaatatgtccgtatgtctttgggtggtgtgcacgatgaagcagaaattcgcggtcaccgcaaaacttatattggcgctatgcccggacgaatcatcaagagtctgattaaggcaggagcctctaatcctgtatttatactggatgagatcgacaaagtcagtgccgaccgtcaaggcgatccgtcatcagctttgctggaagtacttgatccggaacagaatacctctttccatgataacttcctggatgtagattatgacctttccaaagtactgttcattgcaaccgccaataatctgaatacgatccccggcccgttgctcgaccgtatggagctgattgaagtcagcggatacatcacggaagaaaaagttgaaattgcccgtaagcacctgttgccgaaagaactggaagcaaacggacttaaaaagacggatatcaagattccgaaagatactttggaagcgattatcgaatcatatacccgtgaaagcggcgtccgtgaactggaaaagaaaatcggcaagattctccgcaaatctgcccgtcaatatgcaacagacggttatttcgccaaatcagaaattaaaccgactgatttgtatgaattcctgggagcaccggagtatactcgtgacaaatatcagggaaatgactatgcaggcgtagtcaccggactggcatggactgccgtcggcggtgaaatactctttgtagaaacgagtctgagccgtggtaaaggtgcgcgtcttacactaacaggtaatttgggagatgtaatgaaagaatcagctatgctggcactcgaatacatcaaagcacatgcttccatcctcgatctgaatgaagacatctttgacaactggaatatacatatccatgtccccgaaggtgctattccgaaagatggaccgtcggcaggtattactatggctacttctttagcttctgctctcacccaaagaaaggtaaaagcaaaccttgccatgacgggagaaatcactctccgtggcaaagtgcttcctgtcggtggtatcaaagagaagattcttgccgccaaacgtgccggaatcaaagaaatcatcatgagtgccgaaaataaaaagaacatagatgaaattcaggacatatatttaaaaggactgcaattccactatgtaaacgacataaaagaagtattcgcaatcgccttgacaaacgagaaagttgcggatgccattgatttatctgtaaagaaacccagccaggaatgacatttgagttacaatatacagacactaaaagtaatgcccgtgcaggtctgataacaacagaccacgggcagatacaaacacctatcttcatgcctgtgggaacactgggcactgttaaaggagtacatgtaacagaactgaaagaagatatccaggcacagattattctgggcaacacctatcatttatacttgcgtccgggactagacgtaattgaaaaggcaggcggactgcatcgcttcaatggttttgatcgtcctatgctgaccgatagcggtggttttcaggtattctcattagcaggaatacgaaaacttcgggaagaaggagccgaattccgctcgcacattgatggcagcaaacatatctttaccccggaaaaggtgatggatatagaacgtaccattggcgctgatatcatgatggcttttgacgaatgtcctccgggagattcagattatgcatatgccaaaaagtcattagggctgacacacagatggcttgatcgttgtattcagcgttttaacgaaactgaaccgaaatacggctacaaccagtctctcttccccatcgtgcaaggatgtgtttatcaggatttgcgtaagcaatccgctgaattcgtcgcctccaaaggagcggatggaaatgcaatcggcggtttggccgtaggcgaaccggtagataagatgtacgagatgatagaggttgtcaacgagattcttcccaaagacaagccccgctatctgatgggagtcggcacccccgtaaatatccttgaaggtattgaacgcggagtcgatatgttcgactgtgttatgcctacccgaaacggacgaaatggcatgctgtttaccaaagacggtatcatcaatatgcgaaacaagaaatgggaaacagacttctctcccatcgaggcagacggtgcttctgctgtagacacgctatacagcaaagcgtacttgcgtcaccttttccacgcacaagaactactggcaatgcaaattgcttctatacacaatctggcattttacctgtggctggtaggtgaagcccggaaacatatcattgccggagatttctctacctggaagccgatgatggtaaaaagagtgtcaacaagattataaagaatgaaaagcaatcgattaataaaacggctggattggtatatcatcaagaaattcttggggacatacgtatttgccattgcattgattatctcaattgcggtggtattcgacttcaacgagaagatggacaagctgatggagcatgaagccccttgggacaagatcatctttgaatactacatgaacttcatcccctacttctccaatctgttcagtccgctgttcgtattcatcgccgttatcttctttacctccaaactggcggagaactctgagatcattgccatgttctccaccggtatgagtttcaaaagaatgatgcgcccctatatgatctctgccgccatcattgctgcggcaacattcatgatgagttcgttcatcattcccaaaggtagtgttacccgtctgaactttgaagataaatacatcaaacccaagaaagtcaactcggtccgaaacgtgcagttggaagtggacagtggtgtcatagcctatatcgataattacaatgacggaatgaaaaccggcaaccgcttttcattggataagtttgtcgacaagaaacttgtctcccacttaacggcacgccgtatcacttacgatacaacaacggtcaataaatggaccattcacgactatatggtacgtgaactggacggactaaaagaaaagatcaccaaaggagaccggatcgactctattataaatatggacccatcggacttcctgatcatgaagaatcaacaggagatgctgaccagtccggaactgagcgaatatatcgaaaagcagaaacgacggggatttgccaatatcaaagagtttgaaattgagtaccacaaacgaattgcaatgtcatttgcttcgtttattctgacaatcatcggggtttctctttcatcacgaaaaacgaagggtggtatgggacttcatctgggtattggattagggcttagcttctcttatatcctgttccagacaatcacttctacctttgccataaacggtaacgtgcctcctgcgattgcagtctggattcccaatatcctctatgcaggcatcgcattctatctgtatcagaaagcacctaaataaggaaacataaaacttagatcaaggagatctaaaatagaagttccgcctattcttgccgaaagcaagtacaggcggaacttttttgttgtatccatttcctcttttgtctattctccattttaatcaccaaatgggtgattcggaaaatccctctttctccttactcttttcgagattgtcaaccaatctcacttacataagcagaaagatctgcagcagagatgtttttggctataatcacaccatttccatccaataaatagtttgtgaacccccgattcaaacggtactttttaaataatctggagtcctcgccttctgtttccacgaaacaagtgggcgtaactatttggtccttacgaacggtttccttaaagattgactggtattcgtcaaacgaaacagaaaccatttccacattacgggaagaacgaagcacattgctcaaacttacgttttgcatccgggattgcgcgtcataacttgcccaaaaactaagcaacacatatttacctttcaaattacccaacttaaaagccggttgcccattcgacgcagattcgattttaaaatcaggggctacgtcaccctcactcaaacctccggtaggtttgtctttctcaacgaaagcggtcaaggaacaaatcagtaatacaacaaaaatccattttacataagaattcatgtaatgcggttttagttaatactatccgggactgtccttaaacagtggtttcttcccgaaacgttgtcttttcaggcatcaggcgaagaggaatccgctgattatcagtgcctttaattttgaaaccgggtgcaaaggtaagtaattattaaattaacttccaaaaaaacaagccattttcttacttttggggtataactttttatgttatttagcataaaaacgaacttttttccctacttttgcagcgttaaagtctatttttttatgcaaccatcaaatactgaattgattctgattcgagttaccggcgaagatcgcccgggacttaccgcttccgtaactgaaatacttgccaagtatgacgctactatccttgatatcggacaggcggacatccataatactttgtcgttaggcatccttttcagaagcgaagaaaggcattccggattcattatgaaggagctgctgtttaaggcatcttcattgggagtaaccattcgtttcgaaccgataggaaccgatcagtatgagaactgggtaggtatgcaggggaaaaaccgctatatactgacggtattgggccgcaaactgtccgctcgccagatctctgccgctacccgcgtactagcagaacaagacttaaacattgatgccatcaaacgtctgacggggcgtatccctttggatgaggacaaaacggatacccgtacccgtgcctgtatcgagttctccgtacgcggtaccccgaaagaccgtatcgccatgcaggagcgactgatgcagctggctagcgaacaggagatggacttttctttccagcaagataatatgtaccgccgtatgcgtcgtctgatctgtttcgatatggattctaccttgatcgaaactgaggtaatcgacgagctggctatccgtgcaggtgtaggtgatgaagtaaaggccattacagaaagcgccatgcgtggagaaatagactttacagaaagcttcacacgtcgtgtagccttgttaaaaggactggatgaatcagtcatgcaggaaatagcagaaagccttcctattacggaaggagtagaccgcctgatgtatgtactgaaaaaatatggatacaaaattgctattctttccggaggattcacctatttcggtcagtatctgcaaaagaaatacggcatagattacgtatatgcgaacgaattggaaattgtagacggcaaattaaccggacgctatctgggagacgtagtagacggcaaacgaaaagccgaactcctccgtctgatcgctcaggtagagaaggttgatattgctcagacgatagccgttggagacggtgccaacgaccttcctatgctgggaatcgccggactgggaatcgccttccacgcaaagcccaaagtagtggcaaatgccaaacaatccatcaataccatcgggcttgacggagtgctctatttcctgggattcaaagattcttatttgaatatgtaattgagaccaaaaattattttatctttgtcggcaaataaaaagaagtaatgaagttttccgaactaaaactaaatgcaaatgtgcttgatgcgcttgacgccatgcgatttgacgagtgcacgcctatacaggaacaagcaattccaatcatactagaaggtaaagatttgatagcagttgcacaaacgggcactggtaaaacagcagcattcctgctgcctatcctgaataagttatccgaaggaggacatcccgaagatgccattaactgtgtcattatgtcccctacccgggaattggcacagcaaatcgaccagcaaatggaaggcttctcctattttatgcccgcatcgagtgttgccgtatacggtggaaatgacggaatccttttcgaacaacagaagaagggacttacgttaggtgcagatgtagtaatagctactcccggacggctgatagcccatttaagccttggatacgtagacctttccaaggtttcttattttatactggacgaagcagaccgtatgcttgatatgggattctacgaagatatcatgcaaatcgtgaaatatttgccgaaagaacgacagacaatcatgttctcggcaactatgcctgccaaaatacagcaactggcaaaaacaattctgaataatccggcggaaatcaaacttgccgtttcaagaccggcagataaaatcatccaggcagcttatgtatgttacgagaatcagaagctaggtatcatacgcagcctttttactgacgaagtacccgaacgtgtgattattttcgcttcctccaaaatcaaggttaaagaagtaacaaaggctctgaaaatgatgaaactgaatgtaggagaaatgcattcggatcttgaacaggcacaacgtgaagtggtcatgcacgaatttaaagccggaagaatcaatattctggttgctacggatatcgttgcccgtggtatcgatattgacgacatccgattggttatcaactttgatgtcccccatgacagcgaggattatgtgcaccgtatcggacgtacagcacgtgccaacaatgacggagtagcactcacctttatcagcgagaaagaacagagcaacttcaaatccatcgagaactttcttgaaaaagaaatatataaaattcccgttcccgccgaattaggagaagcaccggaatacaagccccgctcttacaacaataagagaggtgacagttctaaaagaagaagcttcggaggaaaaaggaataacaacaatggaaaaaaaggcaataaccgcccctcttctcctgcaagaaactaaaaaacatttggctatttcgtcggagtaatagtcaacttgccgctaaaactgacagtcaaatttgctatactgtaaatagaactttccggaatggataaaacagcctgataatggaaaccattccggtctacctttacaaatttagtatcagataaaattgcctgcaccaggaaatccgcaggaaccacactttcaaacatctgcttggtaatatcactggcaaacaggctcttcttgccttcatacacacaaatgtgcatcacattatcgtagtacacattatccatactaataccgtcttcagtatatatagtcttgatcaccctcattttggatggattgatatacacataagcacgatagcggctaccattatagttcacaatactatcgcgcttcgttacttccgtataggtgggaataatcatttcctgaccgacaaaagataacgaatcattaggatcttcagatttatgcaatctgatcatattatctgcaatcgaatgaaaccagaaaatatgctccccctgcttatctatcttataataggtagtatcattgccataagtataaagagtatcccgtataattttgaatgtaataggagcgctctgcgaatctgcataatagatggtatccccttctatacgcatcaacgggctctcagtctcatcatccagccagattccttgcagcagttctttcgcactcaaatcctcctcttgtccggaggaagagtgcggattcttactgctgttacatgctgcgagcaagatcgctactaacgatatcgctacatatttcgtcatttgtctaaattttgtgtataaagatactctaattatcttatttaccaatgcatgaataaataaatccgagctcttccatttcttttttatcatagatattgcgtccatccagcacaatttgctgattcatagtctttttgatgacagcccatgaaggcagacggaattctttccattcggtaattaacatcaggacatcagcatcaagtaccgcatcatacatatcgcgggcgtaataaataacatcaccgatacgacgtttacactcattcattgcagccggatcgtatgcgcgtatctgacaacctgctttcagaagtttatcgatcaataccaatcccggagcctcacgcatatcatccgtttccggtttaaaagccaatccccacaaggcgatggtcttacctctcaaatcaccattaaactgcttcatcagtttttcaaacaagactcctttctgcgcctcattcacatcttccaccgcacgaagtacacgcatagtatacccgttttgctcggcagtcttgatcaatgctttcacatctttaggaaaacaagagccaccatatccgatacctgggtataggaacttgcgtccgatacgagtatcagaaccgataccgctacgtaccatatttacgtcggcacctaccagttcacacaagttcgcgatgtcattcataaagctgatacgggttgccaacatagagttagccgcatatttcgtcatttcagccgatgggatatccatgaaaataacacggaagttattcaataaaaacggcttatagagtttcgacatcagtttctccgcacgaacagactccactcctaccactacacggtccggactcataaagtcgctgatagcattgccctctttcagaaattccggattggaagccacatcaaactcaatgttcactcctcttttatccagttcttcctgtatagcggcacgaactctgcgcgcagtacctacaggaaccgtgctcttcgtcactaccaatttatattgattcatattacgaccgatggtgcgggcaacttccagcacataactcaaatcagcactgccatcttcgtccggaggcgtaccgacagcactaaatataacctcaacatcgtccaggcaactctcaagcgaagtcgtgaatttcagtctttttgccttgacattgcgaagtaccatttcttccaatccattctcatagatcggaatcattcctttctgcaaagattctattttctcgctattcgtatctacacaagttacatttacgccaatttcagcaaaacatgttccagttaccaaaccaacataaccggttccgacaatcgctattttcatatctatcgtttgttagagtttattcaaaatatacagcatctctgaaagccatgccctctttatccttgggcgacaaaagcatctgcgactccccaagcatccagtcgatgcctaacgtttcatcattatatactatagacgcttccgcttgcggagcatatttattgtctaccttatacatgaacacagcttcttcgctcaacaccacaaagccatgagcaaaaccacggggaataaaaaactgccttttattttcttcactgagcaatgcgctgacatgttttccaaaagtcggtgacgaccggcgcaaatcgacagcaacatccagcacctttcctttcagaacgcgaactaactttgcctggctgtattcacccttctgatagtgcagtccccgcaatacgccaaaggacgatttcgattcattatcctgcacaaagtctaccggaccgatcttcgcttcaaactcctctttcttaaaggcttccataaagtagccccgttcatcagaataaacattgggttctatcagccacaccccatctatttctgtctgtatatagttcatcgttagtagtaataagtaaaacgatgcaaaagtagtgattttttcgaagttttctgggatatattcaattaatctcttaattttgcactatgattgaattagcacaacacatagaggctctgttgttagagaacgattgcgtaatcgttcctaattttggcggattcgtagcacactacgctcccgcaacctatgtaaaagaagaaaatctttttttacctcctacccgtatcatcggtttcaattctcagcttaaactgaatgacggcgtgttggtacagtcctatatgtctgcgcatgacaccagttttgccgatgctacccgtatggtggagaaagaagtgaacgccttcgtcgagattcttcatgaagaaggtaaagccgatttggaaaacgtgggtgaaatccgttataacatttacgggaactacgaattcactccttatgatcataagataacgactccttcattatatggattggattcttttgagatgcgtgagctctctgcgttgcagcgaaaagaaagaatactggtacctgccagtctgacgaaagaaaagaaaacgtatgaaatcagcatcagccgtacccttcttcgtaatgctgcggcaatgattgccgttatcgttatgttcttcgcattctctactcctgtagaaaatacgtatgtcgagaagaacaattatgcccagctgctgcctgccgagctttttgagcaaatagaaaaacaatcagttgcagtcactcctgtttctgtagaaacaaagcataatcaaaagaatgcgactggtcagacgaagaaagttaccgcagataaagccagaacttcaagacctatcgctgtcaaagaagtcaaggttgccaagcaggaaacaacaccggccgcaccgacagcaacaataccgactacgaccgcagtgacaactccggttgcacccgcagttcagccacaggccaatcatccctttcacattatcgtagcaggaggaatcggtctgaaagatgctgaagcaatggcagaacaattaaaggcaaaaggatttgccgaagcgaaagccttgaacagcgatggcaaagtacgtgtcagcatccgttcattcggaaatcgcgaagaagctaccaaacaactactggagcttagaaaaaacgaaacttataagaatgcctggttactggcaaaataaatccccttttgaaacatgaaacgagttctttgtcctaaatgtgagaattaccttttttttgatgaaaccaaatacagcgaaggtcaatcgcttgtattcgaatgcgaacattgtggcaaacaattcagcatccgtctcggaaaaagcaaagtaaaagcccttagaaaggaagagaacctggaagaagaagcggaggttcataaagaagaattcggttatattacggttattgaaaacgtgtttggtttcaaacaagtacttccgttgcaagaaggtgataatgtgataggccgtcgttgcgtgggtaccgttatcaatactccgatcgaaagcggtgacatgagtatggacagacgccactgcatcattaatgtgaagcgtaacaaacagggaaagcttgtctacacattacgggacgcccccagcctcacaggtacctttctcatgaatgagattctgggagataaagaccgcgtccgcatggaagacggagcaatcgtaactatcggagctaccacattcattcttcatacagctgaagctgaatagaaagaaaactgtttttctcctttctatcagaactatctttgatatcatatatacacataaaaacagcgtcaccattcacaacgaacagtgacgctgtttttatatgatattacttacttaaaggataccctttaccgtttcaagcatacctttctcctgaatagaatccagatcagcctttacagctgctgccagtcccggaatcttattcaaatcttcgccccagataaactctgctgccagtacaccttcggtaaccttcttcgtgcaaccggtagcccaaagctctttcagcaagttcatgatttcaggagcatcgttcggtacaatttcagccccgtctgcacgtacaccagctttataataagtgataatagcagccaatccgagtaccagtcctttcggcagttcccctttacgttccagataagtcttcaatcccggaagatcacgagtttcatatttcgggaatgagttaagcataatgcttgttaccgcatgatcgacgaatggattgttgaaacgttccaatacatcctctgcaaacttcttcagttcctctttcggaagattcaatgtctccatcaattcatcaaacatcactttatgaatatacttgccgattacctcatgttggcaagcatcacgcacgatattcacacccgacaagtatgctaccggagaaagaaccgtgtgaggaccattgagcaaagttactttgcgttcgtgataaggagcttccgacggaacaaacaatacattcagccctgccttatcagccgggaattcttttgccacttcctgcggagcttcaattacccacaggtggaagatttcagcctgcacaacaaggttatcatcgtactgtatcttttccttgatagcagcaatatccttgcgaggaaatcccggaacgatacggtctaccaatgtcgcatatactccgcaagcttcctcaaaccaagtcttgaattcattgccaagattccacaggtcgatatactgataaatcgtttctttcagcttgtggccattcaggaagatcagttcgcaagggaaaatgatcagacctttcgtcttgtcaccgttgaatgttttaaaacgatgatacagcaattgagtcagcttgcccggataagatgaagcgggagcatcttccagtttgcaagtcggatcaaaggcgattccggcttctgtagtgttcgagataacaaagcgcatttccggttgttcagccagcttcataaactcgtcattctgcgtataaggattcaatgcgcgactgattacatcaatcattgtcaagctgttaaccacttctcctttatccaatccttgaaggttgacatggtacaaatcatcttgtgcattcagcatatcgaccatacctttatcaatcggttgaaccactaccacactgctgttgaagtcagtcttctggttcatgttgtaaataatccaatctacaaatgcacgtaaaaagttaccttcgccaaattggataatgcgctccggacgttgtactttaggagctgtttctttgtttaatgctttcatgttagttgtaatttataaagttgatattatacaaattcgaaataaaaatcaatattttcctttatcataatgtcgataggcatgtactttaccggttcaacggatttcttgaaaacgacgtggtcgcaaagagcttttacgccacaatatccctgcagccccgggcgttgtccgatcagataatgcacatcaccggatttcagcaattccacgtttgctttcagaaggtcatatcctatcagccccttcatgctacgtcccgcactacggagatattcgcccagctgataaactctggaattgaatacgacacccaacgtagctttcggatgcagccggaaaaattcatccaatgtcttttgattattttcctgattagacttgttcagtaccacttcatgaatcaccaactcttcatactctttggtgataaagctcataaatcctgccaaacgccgttgcatctgtatttctgccggactgttcttattattgctcaagaacaaaaccagctcctgcccctcgccggcctgatagttgcgcattaatattttggcggcaatgtatccgcttttataagagtcctgtccgatataggtcagtgcgttcgcttcctccatattgaagtcaatgaatgcataagctatttttttagcttgcagatagtctgtcaaagccaatgtctcatttctgaagttcggagcgatcagtacagcgtcgacattgctttcttcaactctgcgacacacttccagataactttccttgttcccctgatgatagcaaagataatccacactcacattgaaaggacgcaattcctgacgtgcccgctcgatgcctcccactaccgaatgccagtagtcgtgctctatataataaggtatcagacaaacgaaagaatatttcttcttggcagccagtccgatagcaaatacattaggctggtagtgaatttcatccaataccttttgtactttagccttgctttgaggagatacgtcaccgcgattgtgcagcactctgtcaaccgttccggcggaaacacccgccatacgggcaatgtctttgatggtatagttctggtcctccatagtgctaaaacttaaatattataaataatcgctgcaaatatacgaattattttgttactccaagtaaattttctatttttgtgttcgataacggttaataaaactaaaacgaagatttacacctattagctttaaaatcaatactatataggtataaatgcagaaagtaataattttatatactaaaaacacagtaacaatgaagaacttcatggatgaaaacttcttgctgcagacagaaactgcacaaaagttgtatcacgagcatgcggctaaaatgccgattattgactaccactgtcatctaatcccccaaatggtagctgacgactacaagtttaaatcactgactgaaatctggttgggtggcgaccattacaaatggcgtgcaatgcgtacaaatggcgtagacgaacgctattgtacaggaaaagataccacagactgggaaaagttcgaaaaatgggctgaaaccgttccttataccttccgcaatccgttgtatcattggacacacctggaattgaagactgctttcggcatcgacaagattttaagcccgaagactgcacgcgagatttacgacgagtgtaacgagaagctggctcagccggaatactcagctcgcggaatgatgcgtcgttaccacgtggaagtagtatgtactacggacgatccgattgattctctggaatatcatatccagacacgcgaaagcggttttgaaatcaaaatgttgcctacctggcgcccagacaaggcaatggcagtagaagttcctgccgacttccgcgcttatgtagaaaaactgtctgtagtaagcggcgtgacaatctccaatttcgacgatatgattgcggctctccgcaaacgtcatgacttcttcgccgaacagggttgccgcttgtccgaccacggtatcgaagagttctatgcagaagattacaccgacgcagaaatcaaagctatatttaataaggtatatggcggagctgaattgactaaagaagaaattctgaaattcaagtctgctatgttggtaatcttcggagaaatggactgggaaaaaggatggacccagcagttccactacggtgctatccgtaacaacaatacgaagatgttcaaattgttaggacccgatacaggcttcgactctatcggcgaatttacaacagccaaggcaatgtctaaattcctcgaccgcctgaacgttaacggcaagttgaccaagacaatcctttataacctgaatccttgcgccaatgaagtgattgccactatgctgggcaacttccaggatggctcgatagccggcaagattcagttcggttccggatggtggttcctcgaccagaaagatggtatggaaaaacaaatgaacgcgttgtcagtacttggacttttgagccgtttcgtaggtatgctgacagactcccgttcattcctttcctatccacgccatgaatacttccgccgtacattatgtaatttggtaggacgtgatgtggagaacggagaaattccggtatctgaaatggatcgagtaaatcagatgatcgaagacatcagctacaacaatgccaagaacttcttcaaattctaaaacaagaattactaaatagtaataccgctgtcggggcacgatgctccacagcggtatttttttaaaataacgctcctctccctgtagtttcatatacgattctattgtcacttgtcaccttttatagttaaatagttagtaatcaataaaatagtggtgacaataagcggtgataataaggtgataatagaatttatatgaattcatttatcaccttctattatcacccatatctcctactacactgattaccaacatttaaacaggaactaacttctttttctttttatcacagagaactggattttcgacccgaaaattgtattttaccccctttttaccttctataattcctattaatcaattatttctccccccagtcacaacaaaattttatttgctaaagcattaaacgatgcttctttggcctcctaagacattttagatggcatgtataatagttaaagccagtatacttaatacatcaacaagccttgattaatacattttgcaggatatatgctctcgttttacgtacgtgaaacattcagactacgcacgtgatcccatcagcccacgtacatgaaccgatgggatcacgtacctgaaacttgttcttattgctttcaaaagacattaacttagcatacaaaagggattaatcaacgaagcatagactattaaaccaggcaggtctgattaaatcggcaagcatctttcgggctaaggagcaacaagtcccgaagagtaggctcaaattgagttgaagagtagtcctcacaagatttacaactgatcccttacaaggcagttcatataaacaaaaaaagaagtaactaagttacttcttcattctttgtacaccctcagggattcgaaccctggacccactgattaagagtcagttgctctaccaactgagctaagagtgcaacatttttttatattgcaactttggatttgtacaccctcagggattcgaaccctggacccactgattaagagtcagttgctctaccaactgagctaagagtgcttatttcctcgtttgcggttgcaaaagtaggtcttttatttcatttgaccaaacaataatgcagcttttttactatctttttttcgttattattcgaacacataaagctcagaaggcgtatttcgctttaaagcaagtagttgcacatctttacctacaattacacctttgttctttaatttccattctaccgttttatatgccagctccggatgattattgtctttgctcagatgacacaaccagatataacgcaggtgctcggtgatattttctgccaggaattcagcagtagcagaattgctcatgtgtccggtcctgctcatgatccgttccttcagatattggggataaggtcccattttaagcatttcttcgtcatagttcgcttctagaatcagatagtttgccttgctgatataatctgccgccgtcggagtgatttcccctaagtcggttaagaaagaaaagactttgccgtctatttctatacaatatcctacattatccgtcccgtcatgaggaacttcaaaagattcgatacggaaatcttcgagcatcataggcacttgcttttcaagataacgaaccgatgtgctgagcttttccgtcatacaataactacgattaatcccctcatgaatacgagccgtggtgtaaacaggtatattcatcttttcccccaaatgccctacagccttgatgtgatccgcatgatcgtgcgttacaaatacggcacgtatactttccatcagaatattgaaatctttcagtgttttcttgatggtacggatgccgataccggcatctatcagtattccataggtatcagtacccagataatagcagttcccactgctgccactcgccaggcttataaatcttactttcatgttttatctttctttattaaaatgcaaaatgccgtcaacttttacagcaaagtgacggcaaatatacataaaaaagaagataattaccgagaagatttcttctttttgtcgatggattcggtgatttttgcgaataatagcaaagctatggcggcaatcagcccgatagcagcgaaataataccagatataatgcgcattcgcactggcggcctcccatgccgcacgagtttcaaacaaggcagggtccggacaatattttgtcaacagaataccagccagcccgaaaccgaatatagaagaaaggaatgagtgcagatgactgaatcctaaatacataccttcctctcccttaggagcctgcagagagaaatactccagataccgcggcgaaatgaaacattcggcaagtgcctgtacaacaataccggccaccatcatcagagtaatattgctcattcctgagataatatcatttcccaatatgtttccacatgccatcagcaatgcagaaaccggaatcaggaacatccccacattcatcgaagtaatcgcactgcgctttgccatcaaacgagtgataaagctgacacaacataccaccacaaaagggttaacgttggcaatccagcccggtttggctgtttcgcctgcgagacggatgacgtacttaggcatagtggcataaagttgctgttgtaccatccagaagcctgttacgattaaaataagaatcaataaacgccagttagtcataatccgcataaagccctgccctatctcacgcagactttttccttcacctgccgtatgagtcgatttatatagcagaatcactgccagcaaggcaattaccgtcatcgccccggagaaatagttaatgtaaatataagcttgttcgccgatcacatttctcaaagggtcgataatcgtcttacccgtaaaagcaccgacattgaccatcatataaaaaatagaataaccacgggcgcgggtcgcttccgttgtctccttagctacagatgtggaaataatagacttgataaaagaacctcctatcataaggataaacaggataggaacgataatccaccgggaagaactgtccggcaaaccattaaaccgggtagtcgcaccgtaactcaccaaccctgccgcttcgagcaatgtagggaatacgcccagccccaaataaccgatagataataaagaaaaggcaataatcatcgacttccggaaacctatcttatctgcataagcacccgaaaatataggaagcaaatataatcctccggagaaaagaccggaaatcatacttgcttcgaaatcattaaaacctaaaatactggataaataaatagtgagaacgataaaaacagcataatatgccatacgttcaaacagttcgactgtgttactcacccaaaaggctcttgtaaaacctttggcggcacgctgaggggaattgttcatgtaatctctgtttttttattaaaatgttaattcagcgcaaatatacgtttttttagcttacagtccgtatctttgtcctaaattacgtattctaaatatatcataatgactatagctgttgattttgacggaacgattgtagagcatcgttatccacgtattggtgaagaaattccatttgcagttgaaacgctgaaattgttacaacaagaaaagcaccgtttaatcttgtggagtgtacgcgagggagaacttctggacgaagccatagaatggtgcagagccagaggactggagttttatgcagccaataaagactatccggaagaagaaagagatcatcagggcttttcccgaaaactgaaagccgatctgtttatagacgaccggaatgtcggcggtattcccgactggggaattatctatgaaatgataaaagagaaaaagacatttgctgatatatacagccagcaaagagaagaaaataccagtcagaagaaaaaaagaaaatggttgccgttttaatctccgacgcgaaagatcataccttacatccattaataaaaatgcataatgcactccgggcacatcgcttcagagtgcattatgtattttctgaggagatctgaaacttacattactccttttgaccttcccacttttctctatattcccacagttgttcaatagtaggatgaaaagtcggattttcccaatttttggaaatcatcgaaattaaagactccagataaagtttaccatcaatgattgaagtacatgcattaacctgatacttttctgtcgggtaactcttcgtttcaagcatcttcttcgcccagcccaacagctcctggaccgattcttcatcataagtatgttgtgccatatttttatattttcctacaaagataaagataaaaacgagaatatgcagacccggacaagcacttttagtatttcaccttatataatatagatttcttgagagtgaaaagatgcctttcatgctttcctgacattaatcaaatgcaatgttgtcattcacttttattagtgttaatttctttattccatatttttattgtatgtttgtgaacatatagcttcttgcagcaatcaagaagttgtataaattaatcaatagcaaacaaatcagagcatcatacatagacaaaaacaaaggacaaatgaacccaagtgaaacagaacctactacccaaaatgtaatgtcatcttcagaaccagaaacattccctttaacaaaagatcaacttctgtttgcagaaagtatttatgcttgtctgccaatgagtattgagatctatgacacaaatggtatcttgcgcagtatcaatgaacatgcattgcagatgtatggagtcactgataaaacgactgtggttaatatcgtcaatctttttaatagtccttatatggacgaaactctcaaaaatcgcattcagagaggcgaagatattgttctggaattcgaatacgactttgaccggataaaagacaacgcatacttctctacccaaaataagaacacgatcatttatgaagcaaaggttgttcccctgcgaagcaaggagggagaaatcatcgggcatatattgctttccaacgatgtgactgccataaaagaagctgaatttcgtacggatgaaagcaaaaagaatctggaaatggcaatggaagcggcctctatgtcatcttgggtatatgacgtgtataagaaaacattcaatccattacatggagatcctgtagctaaaaataacacgacattagatcagattctaaatatactgcatccacaagatcatgaacctttaatacaacttttatcacaactgaccaacaaagaaattcagcaaggaaacatcaccttacgtttctataatgaagaagaaaagcaataccgctattatgaaagcatgatgcggttatctttcgaacattttgggaaattgcagattataggaacccaactggatataacggaaagaatgcaaatggtaaagaagacgcaggaattaatcgccaagcgtgaactggccatgaaagtcagcaatatcattcattgggatttcgatgtacggactcaagagttcgaagcctataatgacccgatcaatgattatgccagtgataaactggtgagcatccaacgatacatggatgttattcatcctgaagaccgttcttcatcctatgatgccatacagtctatgctatcaggcaaggaactcaccattaacttcacttgccgtatgcaaacgaagtatgatgaatcctggcaatattgtaatatcataggcgttccattcgagaaagacgaatatggcaacaacgtacgatataccggtttcaggcaaaatatctccaagcttcatcagctgaatgaagaacttgaagaaagaaactacaaaatgcagctcaccttcaaaactgtaggcatgtcttactgggattttgaagtaaaaagcaaacaattcaaagcatttaatgaccccgtgaatgacttccattctgaaaatgtaatcacacctgaagactatctgcatgtcacccatccggaagacatcgagctggtccgcaaccatattaattatatgattggaggaacaactaaggatctcaacttcaaattccgatccaaaactaaatgggacaaagaatggcagactctcattgttaccggcataccagtggaaagagacaagaaaggcaatgtaattcgctacaccggtattaaagtcaacaatacgaaatgggagaaaatggcacagcaactaaaggaactgaaagacaaagccgaactttccgaccgtctgaaatcggctttccttgccaatatgagtcacgaaatacgtacgcctctgaacgccatcgtcggcttctccgaactgatggtatattctgaagatccggcagaaaaagaagaatacatgagcatcatccaatccaataatgagttgttattgcgattgattaatgatatcctcgacctttccaagattgaatcgggaattcttgaacgcaaaagagaaacattcaatttagccaaagtatgcaacgagctttataccatgatccagccaaagataaccaatccggatgttgagtttcaaatggacaattccggtccggactgttggattttcctggatagaagccggctcaagcaagtatggatgaactatcttacaaacgctgtcaaatgcaccaaatccggatatataaaaatgggatacagcatcgaaagagaaggaatccggatctatgtggaagattccggagtcggtatcccggaagaattacaggaacgagtgtttggacgtttccagaagctcaatgagtttgctcagggcaccggactcggactggctatctcaagagctatcattgaaggagccggaggagaagtcggatttacttccactcccggtataggatcgactttctgggcatggatcccttgtgaaatcagcactcaggaagagcataccccaactatttcacagccattgcaacaccagctttctttgaacgaaatcgacaagaaggaactgaagatattaattgccgaagataatgaaagtaactattcgttagtgcaacatattctcaaaaactaccatctaacccatgttcaaaatggagcggaagcagtaaataaagtacgtgaggaagagttcgatcttgttctcatggatatgaaaatgcctgtcatgggaggactggaagcaacccgcaaaatccgtgagtttaataataggatacctattattgcacttacagccaatgcttttgatgctgacagaatcagcgctcttgacgcaggatgcaatgaatttcttgccaaaccattgaagaaaagtcagttgcttgaactcttctcaaagaaatggtaagttatatgttaacatacaattataaagtttatctaagtactctgatagtattgaccgtttataaattcataaattaagttgttcggttctttttattgcccggattcaacttattatttatacctttacgaactataaacttaattagataaactattaaaagtaacgatcatgaaaaaagttatcattctggcatgttcctgctttcttctggcagcatgcggaaacagtgcgaaaacaaacaatagtacaagtgcggacagtacagcaacccaagtggctgatatacataatgccgaaacatcgcttgattatgaagggacctataaaggtgtctttcctgctgccgactgtccgggcattgaaacaactctgacattaaatcctgacaagacgtttactcttcactctgtatacatcgaccgggacagttcatttgatgaaaaaggaacttatacactggaaggtaatatcctgactttaaaagaagaaggtggagaaatatcttattataaagtagaagaaaacaaagttcgtctgttaaacgatgacaaacaagaaataacgggagcacttgccgaacattatattctaaacaaagaatagacaagaaaatcctgtccttatcaaaagataccggaaacaaagcggctgatcagtcattttatttccggtatctttttttgtttctatgttttatcgttttcagagaacaatttcaatattttttatgtttatataaataaaaagcaaacttataaaaagaacgacttatgatttataatttcttattccccacaaagccaaatacaacaaaagtatccttgtttttattggcagtccgcatcattttcggaatattattaatgaaccacggtatacagaaatggagcaatttccaggagttatccacggcttttcctgatccgatcgggctgggcagttccatatccctcggtttggcgatctttggtgagttggtatgttcaatgggcttcatcttcggctttctgtaccgcttggcaatgatcccgatgatttttacgatgatagttgccttttttgtcatccatgctaatgacgtatttgcagtaaaagaattggcattcatctacttagtagtatttgtattaatgtacattgccggacccggtaaattttccatagatcatttcattggaaacaagttggcacacaacaaacgtaaatgatataaaaacaagaaataataaccttgattaatttaaaaatgttatatttgcatctattaaaaagagaatttatcaacattttattaatcaaaaagtaaagtaaacatgaaaaaaagcaaactgacattagtagcggttgtacttagtggtagcttattattcagctcctgtgttggatcatttggcttattcaaccgtttaagttcctggaatcaaggagtcggaaacaaatttgtaaatgagcttgtatttttagctttcaacattgttccggtttatggcgtagcataccttgctgatgccttagtaatcaactctatcgaattctggagtggttccaacccgatggctaatgtgggcgacgtgaagaaggtaaaaggagaaaacggtaactatatggttaaaacacttgaaaatggctattcaattacgaaggaaggcgaaacagcttctatggatttgatctacaacaaagaagctaatacctggaatgtagttgcaaacggcgaaagctctgagttgctaaagatgaataacgacggtactgctgatctgttcttaccaaacggcgaaaaaatgaacgttacattggacgctcaaggtatgatggctgcccgtcaggctactatgagcaacctgatgtttgccgctcgttaaaagcatataccataaacaaaaaggagatgaaaccgtacaaccagtttcatctccttttttattagcaatgattgatcagaaaggatatcctaccgcaaaatggaaagcaaaatcacgactgaacttaggatggataatcggataacgatctttccccttttcataaacaggattaagcgccttcatacctccgtcaaaacgaagaatgaagaaatccagatccagacgaagccctaatccgtacgctaccgctatttgcttatagaatttatcgaatttaaagactcctcccggctgattgtcataatcacgaatggtccatatattaccggcgtccacaaagatggctccctgaaacttccagaataatttgcttcgatattcaatgctggcatccagcttgatatcaccggactgatccagtaaattggtattttcatccctcacaaaagagcccggccccaagtcacgtaccgtccacccgcgaacactgttggcaccaccggaaaagtattgtttctcaaacgggatagtcttcgcattcccgtaaggaacagcaatgcccatacctatatgaaacgcaaacgagttacgatgatctatccttatattcttagaaaagtcaaattctcctttcacatattgtgcatatggaatgcccagaatagcatattccccatcattattcttacggatattcgttgctttggataaagcatacatgatatttcccgctgattcgaaattaaaacggatggaatatgaattggaagcaattgtattattaatgatggcaccaccaatactattgtaatgatagctatatcccatattaataatcaaacggtcctgataattatactgaagaatatggctctgccctttgttaataaaatcatccttaaacctctccgaaattctcggcaaataaaggaaaccgatattaatcaaatcgatacaatgttgtattttctggcgttgagtccacttatagctccatgaagccgatgccatggtacgtagaaattcgggacgcatctgataattatactgtaatccgaactctgtagtggccctaatcttccgtttatagtccgaagagagaaaaggaaacaggaaattaggaaagttgatacttgtctccaccccgtattccgtataattattgttagaatagcctgcctgaagtccggaaatcacttcataagcaccacgaaacttgatcataaaagtctccgaaccgcgaaagagattcctgttttgaaaagagacggaagctgctgctcccaaatcaccggctgaattggttccttccaattcaaaagctaccgacttgtgtttactcttggtcaacatcacatagcagtcaagcttcgccgtatcccctacctgattttcaagaaaacggatattggtatatttcaaggcggacagacgtccgaaattggaataagtctgctgcacatcctgttcatcgaacaaatcccccggagcaaagcgaagattatcagtaagcatcttcgggcgtaaatagagtttatctttataataaatagggtaccctttaaaatgaagagaatcattgatatccatactgttcagcgcagaagattgcaggacatcataatccgtaataaagttaatcttatttatccaatattgttggtgtgctttcaccgaatcgctcacatgcgctctgtaggcgtgcaaatgcaaggtcaagtctacctgataagtaccccgaaccgtatctgccgtataaccgacataatccttattgaacttataataaccattccgaagcaacttgtcagtaattcgctgacgctcggcatccagcacgttcacatcaaatatcattccttctttcagcagacttttggcggaatcctgcttcagaaaatcagcaatcttaggatcacgaatatcatattttaatgaattgacaatataaggatcgccggctgtcacctcataatacagcttgatctttttcttctttattttagtcgaacgcttcactgtggccgccatatagcccatattgcgcattgcctttgtaatttcatcttgcgagcgctgcgcttcagtctcactatagattacaggagcatccccgattcttctcaggaacttatttccccatttagtagagtctcgtcctgaaaggttgtaaacataaagctgtgttttgattaaactgaaccatttggcattagggttctgtcgcacatacattcgtaaggaagaaggacggacatttttctgatctgtatgaatcttgacttcatccagcagataagagccatccggcacatacttagtggcagtgcacgaagcgagcgacagaatgataacggcaaaagtaaataagtaaagaaatcctttcctcatacagtatctctataaaagcggaagcaaatatatagggacaaagatagagcatatttttcgttcggggaaattatcaaaacaataattaatgcgacaaaagttcttttcaccacgaattatagaaatttgcaaggtatgctttgctaatacctatatattactgactatgtatccttgcaattacttctataaatcgtggcgaataagattcctaatttagttgatttctgaatacaataggaactgtaaacttcacagatacaggctcccctttttgcattcccggcttccattttggcatcgaattaatcactcgaagagcttctttatccaaatccggatcaacgctacgtactactttcgcaccagaaatactaccatctttgttaaccacaaactgtacaataacacgaccctgaattttattttctatcgccttcgtcggatacttgatattgcgactcaaaaaactcagtagttctttctgtcctccggggaaatccggcatcgtttccactactgaataaatagaatcacctttcgtctccgtgatcgttatatcaacttgaggttctgctgttttctccggttcagcagtcaactctatggtatctgctttttcggtatcagactggactttatccgctttcttattggcgcaattactgaataacagcaataatgcggccactggtataaacatcagatacttacctaccatgatgttatgagttctttttctgtttagcattttaattcgtttttttaagggtaatacactaaagttgttatagaagtttgctgcagccaatgaagtatgtttaattcccaacaaatgatattgatacgatttcttgtcatagccggacgtcactacttgcttgtccgccagatactcatgattcatacgtatttcactgcgtatcaaccaggagaacggattaaaccaacataataatataaccagttgaaccagtattatatccaatgaatgcaactcacggacatgagtttgttcatgtatcaatatctcattaatttccttatccgaatattgcatcggatttatgaatatccagtgaaagaaggaacagggctcccctacgtcttccgactgataaacaggtacacctttcagagaatagcgctgagagcaggctaaagagtgatgtattttactaacttctaaaagattacgcagtaacaacatacctattcccaatccataaataatccataaccaagtaccggcctgccaggttgtcccttcaacttcagttgtagcaacgggtacagctgtagtaaccagcacttccggtaacagtttattgtaaacggtagtaatcgtttctcctattgcatactcgtccgtccagcctgaaaaatcaatcaatggataaatcagcgaagtcacacatatcagcagcaacatgatccgtctcagcctgaaaaatgtatccttgctgaaagagagcttatagaatgcatataatacaatcaaagctacatttactttaatcaaatagattgcaaaagattccatgcctatcttgatttatgattcttcatcctcaataatattgattaaatcctcgagttctttcttgctgattttacgatcgcggacaaaaaaggaaaccatttctttgtacgaacctgtaaaatagttacttactactccattcataaagctacgcttatagtcgctttctttcaccagcacatgatactgaatagaattccctaacttgaaaggagacaagaatttctttttctccagattacggactacagaggcaacacttgtatatggcggttttggttccggcatttcattcacaatctcccggataaaactcggtcccattttccaaaagtaaatcatcacttcttcctcttgttgtgtcaatctttccatatcgtcatcttttatactgaatatcaaactactaattttaagcaaatctactaaaattaagtagataatcaatttttattcatacaaatattgttaatatgagaaagaattattttcaaaaaacttgttcaacagccgatttattaaaaatatatttatagctttgcggtaaataaagaagtaaaagaataatgctaagcaaaaataaaataaagtatatccattcgctggaactaaagaaaacacgtaaagaagaacaagtattcctagccgaagggcctaaattaacaggcgatttactaggacgtttcccttgccgttttctggctgcgacttcttcctggctacaagcgcatcccgacattcaagcaaatgaaattgcagaagtctctcaagaagaactatcacgtgccagtctactaaaaacgccacagcaagtacttgctgttttcgagcaaccgcaatatacgttaagtccggagttcgcacgccagtctctttgcctggcactggatgatattcaggacccggggaacctgggtacgattatccgactggcggactggttcggtatcgaacatattatctgctctcagaatacggtagacgtatacaatcccaagaccatacaagccactatgggaggaattgcccgtgttaaggttcattatacctctcttcccgaatttattcattcacttggtgatactcccgtattcggaacatttttggatggagaaaacatgtacgaacaaccattatccaccaacggactgattgtaatggggaatgaaggcaacggaataggaaaagaagtggaagcactcatcaatcgaaaactttatatccccaattatccacaaggaaaggaaacctcggaatctctcaacgtggctatcgctaccgcagtaatctgtgccgagttccggcgacaggctgcatggaagtaaaatcaaaaggataaaataaataaggaaacagtacttctcccctcttttcagacgccgcaagagcctctttaaaacattgggaagtttgatccgaaactataggaaaattaaactgaaacactgagatgtttttgctgaacatctcagtgttttttatttcattcacggggagtaatgctatcagcccgggcatccattcaacagactctatttcttctgtcaacggaaaaacatcccgtacatatccttcatcagcaatctctactacttgttgtctgataaagcctacatcaggcagaagcaaataatgagcggcaaagcgtttcataatattaacgggaaggtgactgacgtctttgctgatttctacgctgattcaattgccgttcccttctttgctcaatcttctcctgctggatatgttgctctacttcaatctgttccggcttcttttcaggagtcaccgtacgacggcgattcatttcttccggtgatatacgttgattatccttcagatcatcgacttttcgcaaagagtctttcgaaatcttagtatctttttgatcagatactttctttaaagaatctgtcttcagagcttccagctgattaatcgaatcacgttcggctacagaaagcgagtctgagcaatgataacgggttaaagaaaaacgatcagccagtaatgcaccggctttctctccctgtactcccgggtaatagataaaaccttttatttccttcatcacacccaatgtatctgcatacaaacgtaactggtgaacacccggatcagtgattgtttccaggcgatttaatgtatccttttcataaataacctgcatggccatcgtaacagctctcaaagaatcggcaagcatcggttcgaggaaatgataacgtacttcccaaactaatgtatcacgatctttataattagtatcggcaggtaatacaaaggcatactggtcattcatcatctcacccgtcagacgtatcagacgtttccagggccagacatcaatactatcacccgattccgacatcttcggtttattgtcacgcaaagctatcagatgattaatttcattctgctgagctttcaggcgtttgctcaccttttcataaattttcgataatacctccgtgttgcgtgtgtaccacaccaaagacgaatcgaatacggcttctgtcgtaccatatttcttgaaaacggcatcgagatacaaagccttcttataattctcactataaggcagattatctcccatagactttgccagatgataatcatacagcaaattctccatcttcgattctgagattacatcgtcaggtcttttgactttacagcctactatcgcaagcgccaacatgcaaacacaacacagatgaaaccgaaacctactcttcatgacctaaactttcctttttatttttatccagtgaatggtaagattcattcagatacttgctatagaaaagtagcaaagcaatgataccacaactgatggcagcatctgcaaagttaaagatcggactgaagaatataaaatgttctccacctacgaaaggcatccatgtgggccagtttgtgtcgataatcgggaaatagaacatatccactactttgccatagaaccaggtagaatatccaccgccttcgggcataaaactggcaatctgtgaatgagtactttcattgaaaaagacgccatagaatacactgtctataatattccccaaagctccggtcaggatgagggccacacagacgatatatccggtcttgaagcctttttttataatcttataaagatagtagcctatcagccctactgctacaatacggaaagtggtcagaaacaactttccaaatatttccataccgaaagccataccgttgttttcggtgaaatagatataaaaccagtccgtcacacgtatgctttcatgccaatacatgtgagtcttaatccagattttaatgatctggtcaataatcagtacggaaaagataacaagcagggcaattctacccttcgtgaatagtttcttcatttgttcatcataaattaaacataacgagctacaagttgccgtgcgtaaacattgcgcagctacttgtagctcgtcatccgtagcttgtagctatctattattttttaccactgttcttagcctcgatgctgagtgtagcatgaggaacagcacgcaagcgttctgccggaatcaactttccagtctcacggcaaatgccatacgttttattctcaatacgtaccaaagctgcctgcaatccttggataaacttcagctgacgctgtgccagacgtgtcgtttcttcctttgaaagcgtattagctccttcttccaacactttataagtaggagatgtatcgtcggtatcattaccatccaatcccatcaagctcatcttcaactgatcgtaatcacgttgagccaactccaacttctccataataatggcacggaattcctcgagttccgcatccgaatatctagtcttttctgccataactttactagtttaaaaggttaatcaatattagtattagtcttttatcacattgacaaacaatgagaaatcgtcaaaattaagttctgtgccgtctttcacttcatctgccaaatcaagggatgttcctaaaacctggttacaaatataagtattatattcgttcaccgcatcatctgtttgcgtatttttggagattgtgatctttattttgtccgtaatctcgaaaccgctggacttacgtatattttgaatacgattcaccaattcgcgggctataccctcacgacgcagttcttcggtaactgtaacttcaagagcaacagtcagtttaccttcattagcaaccagccatcccggaatgtcttcgctgaagatttcgacatccgcagcttcgatcacagcttccgctccatccagattcaatgtgtactttccgttcttttcgagttcagctatcgcttcctgagacatttccgctacagcagtagccacagccttcatctgtttgccgaatttcgggcctaacttcttaaagtcacatttcaccttcttcaccaatacgccggcgtcaccatccacaaacttgatatcttttacatttacctcattcatgatcaatgctttcactgcttcgatgtgagctttctgttctccatccactaccggaatcatgatacactgaagcggttggcgaactttgatgttcactttacgacgcaatgccaataccatagaagttacgtcctgtgccatttgcatacgggcttccagttccttgtctatcatttcttcctgatacttcgggaattcagccaaatgaatagaaaccacattatcacgtcctgtagcagtgattaaatccgtatacagacgatcggcatagaacggagaaataggcgccatcagcttcgcaactgtttcaaggcaagtatacaatgtctgataagcagacagtttatcctgagtaaattcaccgccccagaaacgtttacggttcagacgaacataccagttagacaaattgtcattgacaaagtcggagatcaaacgtcctgccttagtcggttcatattcattatagcaagtatctacttccttgattaaggtgttcaatactgacaaaatccaacggtctatttccggacgttctgccatcggaacatctgcttctttatattcaaatccgtctacattggcatacagcgcaaagaacgaatatgtattatataaggtaccgaagaacttacggcgaacttcttcgattccttcaacgtcgaatttcaaattatcccatggagatgagttagtaatcatgtaccaacgcaacggatcagaaccatacttctcaatcgtagtaaacggatcgacagcattgttaagacgcttggacatcttattaccgttcttgtcaagtaccagtccattagagatcacggctttatacgacacactatcaaataccatagtagcgatagcatgcagtgtaaagaaccatccgcgtgtctgatccacaccttccgcgataaagtcagccggatatacttcacggttatccagaatgtctttattctcgaacggataatgaatctgcgcataaggcatagcgccggaatcaaaccagacatcaatcaggtcagattcacgcttcatcggctggccgtcttccgataccagaatgacatcgtctacatacggacgatgaaggtctatcttatcataattttcttcggtatattcaccaggtacaaaacctttatccttgtacggattggatttcataaatccggcagctaccgatttctcgatttcattataaagttcttctacagattcgatacatatttcgctcgttccatcttctgtacgccagataggcagtggagtaccccaataacgggaacggcttaagttccagtcattcagattttccagccatttgccgaaacgacccgttccggtagactccggtttccagttgatcgtcttgttcagctccatcatacgttccttgcaggctgtagagcggataaaccagctatccaacggataataaagcaccggcttgtctgtacgccagcaatgagggtagttgtgtacatgcttttcgattttgaaagcctgattgtttgctttcatcatcatacaaagagcgacgtccaaagattcggcagcctgtgctgctttctcatcatatttgccgtctaccataaactgcggatcataggcattctttacccatgcaccctgatattctttgtatttgtctacctccacacattctttcacgaagttttcatccagttcgtccagtatatagaacttaccggtaaggtctaccatcggacgggtttcgcccttcttgttaatcatgaaaagtgatggtatacctgccacacgagccacgttcgcatcatccgcaccaaatgtcggtgcaatatgaacgatacctgtaccgtcttctgtcgttacataatcacccgggataacacggaagcctttatcacttactttccagctaccgtcttccgatacttcaaccggtttcacccagggaatcagttgctcatattccataccaataaggtcagcacctttgtattcggcgattactttgaatggtacgagcttatctcctgccttataatcttccagtttcagatcagcagctttcggattgaaatgtgtatttaataaagctttagccagaacaactgtaataggttctcctgtataagcattatatgtctgaactgcaacataatcaatctttggtcctacacaaagcgctgtgtttgaaggcaatgtccagggagttgttgtccaagcaaggaagtaaggagttccccactccgccatttccggtttcggattcttcatcttaaactgggcaacagctgtcgtatcctttacgtcacgataacagcccggctggttcagttcatgagaactcagtcctgttccggcagccggagaatatggctggattgtgtatcctttatacagcaaacctttcttatgcagttgcttcagcagccaccacaatgtttcgatataacgattgtcatacgtgatataaggatgcttcatatccacccaatatcccatctgatgagtcaggtcttcccattccttggtatatttcatcacgtccttacggcaagcagcgttataatctgctacagagattttcttaccaatatcctcttttgtgatacctaatgctttttctacacttagttccacaggcagtccgtgggtatcccatccggctttacgctttacctggtaacctttcattgttttgtaacgacagaaaatgtccttaatggtacgagccattacatggtgaatgcccggcataccattagccgagggaggtccttcgaaaaacacaaacgaagggcagccatcacgttctgtcatactcttggcgaaaacctggttttcgtcccacttcttcaacacatctttgttcacctgtgaaaggtcaaactgcgaatattcagtaaatctcttacccatagctatatctacgattttactatttacaatttacaatttacaatttgaggggtatccccatttttaagggtgcaaatttacaaaaacatttgtttagttgagcaaaaagcaaggacttttaattggaatcatgtgaagttatcgtttataaatggatgttgcattaaacaaaaccgatatctccttgttttagtgggaaaataaaaagcacttaagttatgaattacggtattagtattttattcagagcaatccctttggcgatggcggtcttttgcttcggatacggagcattcatttacggttatggtgatgcgggaaaccgtctggtggcaggtcctgttgtattttcactaggtatgatatgcattgcgctgttctgtacggcagccacaataatccggcaaatcatacatacctataatgaagcgacaaaatacgttttacctgttgtgggctatctggcagctatcataacaattatcggaggtatatgcattttcaatagtgctaccactacttcagccttcgtcgcagggcatgtcataaccggtgtaggatttatcacagcttgtgtagctaccgccgctacctcttccacccgattttctttgattccggccaatgccaaagctaccggaaatgaagtgccggagggagcgttctctattggccaaagacgggcaatgatctttctcgcaatcgtcatttcctgtatcgcatggatatgggcgttcatcctgttaagtaacagtcattcccatcctgcttattttgtagcagggcatgtgatggtagggctcgcatgtatttgtaccagtctgattgcattagtagcaaccatagcccgtcaggtccggaacgactattcggaaagagaacgtaacaaatggccgaaactggttttactcatgggatcgatctcttttgtatggggcatattcgtcatccttgccgactcgggaagtgcaaacggcactaccggatacatcatgcttggccttggtctggtatgttacagtatttccagcaaggtgattctgctcgctaagatatggagacgagagttcaagctggccaaccgaatccctatgattccggtactgacagcattaacatgcctgtttctggctgcctttgtattcgagcttgctaccgtaaacactgattattttattccggcacgggttttagtaggactgggagctatttgcttcacactgttttctatcgtcagcatcctcgaaagcggtacttccggaaagggttaaaaaacattccttttattggtttaaaaggaaagcctcgttggttttaaaccaacggggtcttggtttgaaaccaactaaacagtctccttttacttcttcagccgcacttcatatacatcatttctacgatccttcagattgcgcacactaccgtaagtatggagtgcattcaataaatccagatcgacatccgaaaccagaatcatttccgtattcggagtggcttccgcccgttttccatcagtcggaaaagcaaaatcacatggagtgaatactcccgactgtgcatattgaatatccatattatgaacgcggggaagatttccgacacaacctgctatgactacaaagcattcattttcaatcgcacgtgcctgggcacaaacacgaacacgggagtaagcattctgtgtatcagtcaggaaaggtacaaataagatttgcattccctgatctgccatcaaacgggaaagttcaggaaattccacatcataacagatcagcactccgaccttcgcacaatctgtatcgaaagtttgcagcagtttaccaccactcaatccccaactcttgatttcatccggagtaacgtgcattttttcatacatctcataagttccgtcacgcctgcaaaggaagcctatattatataacaaaccatcttcctttacatacggcatacttcctgtgataatattgatattgtaactgatagccaggtttataaaacggtctctgatctcatcggtatactttgccaatccacgaatagcctgtgattctcctttatcattaaacttcgacatcaaaggagcgttgaaatattccggaaaaagaacaaaatcacttttataatctgatacggcatctacaaagaactccacttgttcgaagaggtcgtccaatgtcttgtaactacgcatctgccactgtaccagtcccacacggacagtcgtctttgggttgatatattcctgtgtaggcggctgataataaatattatcccactgcaacaaacaggcataatgcttggattcctcatcattcggcaaataattggtcattaccttgcgaacatggaaatcattcgataattggaaggtaagaaccggatcataaatatcacgctggcgtacccgtgcgatatattctttcgggcgcatcttatcggcatatttatgataattcggaatacgaccaccgaacatgatagctttcaaattcaatgtttcgcaaagttccttgcgatattcatacatacgacgagccaggcgcaaaccgcggtatcccggatgaataaatacctcaataccgtacaggatgtttccttccggattatgagtattgaatgtttccttacccgtaacttgtgcatacgtatgatcgttctttaccttgtcatagtcaactataatagaaagagcacaacctacaatcttgtcgtcaacgactgtaacaatctgcccttccggaaaaatacttattaatttctttatctgggcatgagtccagaagacatcgctaccatcagaataaacacgggtaaacgattgggataactgtgcatagtcttcaatttgaagattacgtatctgtactttattgattttaataggatgttgttccataacaatacatgttttataaaaagacagtgcaaaggtacagcttatactttaatagtgtttttaaaccaatgaatatttatcattcttacttcaaagtctcctattcgatgtcttgatttcctgtacgcacagtccggagtattctatttactcatacttgattttattgtaaaccaactgcatgtattatttgcaactctcactaacatcagcatgaccggaacttctaccaatacccctaccactgtagccaatgcagcaccggattgcaaaccaaaaagcgatatggccacagccaccgacaattcaaagaaattgcttgcaccaatcattccggcaggtgcagctatattgtgaggcaatttccaccatttcgcccaactataggccacaaagaatatcagaactgtttgcaacacaagcggaacagcaatcaatacgatgtgcaatggattgttcaatatggtttctccttgaaatgaaaataaaatgataagcgttaatagtaatccgccaatcgtataattatcaaacttacggataaatacagtattaaaatattctatcccttttcgccggatgaccagtatacgggttattattccggcagaaagaggaatgacaacaaacaatacaactgaaagcaataatgtatcccacggaatcgtaacgccacctatacccaataaaaaagcaacaataggagcgaaagcaaccaatatgattaaatcattcactgcaacctgtaccaatgtataggcagcatcccctttggtcagataactccatacaaataccattgccgtacaaggtgcagcacccaataagactgccccggctaaatattcctcggccaattcggcagatattagagacttaaaaataacgtaaaagaatagataagctattccaaacattgtaaaaggctttataagccaatttgtaatacaagtgatgataattcctttcggacgcttaccaacgtttttaatactctgaaaatccactttcagcatcatgggataaatcattaaccaaatcaggatagccacaggtatagacacattggcgtattctaatttactcaatgtttgcgatattgccggaaaccattgtccgatagcaataccagcaacaatacacaaagttacccaaacagtcaggtatctttcaaaaaatccaattcctatatatttttccatccgatcaaggcagcattaccttttgacaattgttctactttctcaatccaattcacttcattttgcgctttcgcctgcaagaatgtattttccgtatttgtcattgacaggcaggcatttactacccaccatttgttattaattccggcacgttgcaaatccatttgcaggcgttcagcttcaaacacaggtgtcgcttcaggtaaagtaacaattacaacttccgtttcctttggattacgcaagcgaggcaataaattggctactgctcccgtaactgctccttgtgtacgttctacttctttatggtagctttgggtagcatccaaaagcaacaatgtatgacctgtcggtgctgtatcaatcactacaatttcattgtccgccttatctacaatttcggcaaatgccttgaaaactgctatttcttgtgtgcatggcgaacgtaaatcttcttcaatatattccatatcttcggcagtcatggtctctgccgctttgctacgaacttcattcttgtagttttccaatacttccgcttcatcaatatgactgactgtgatacccgattttatagcgatgtcatagttcagatgatttgccgggtcagtggtagtaagatgtacctttgcaccaagttttattaatttcagagctatttcagttgctaaggtggttttacctacaccgccttttcccattgtgaacactaccctcttaccggaagtatagaggtcattaaccaaatcgtctatacttttggcatcacttatcggctgataacaaatatcatccgttagactgtcgctgtataacatacggcgtatattagctatatcagataaattataagaacgtagaggaacgctgtacataggatattcagatagttcagcaggcatatcctgtaatgctttttgctgcctgttatgcagttgtcgtgacacatcatccgcttcattcagttgctgtaaaataccatttatcaccaataactgatttttaattcccaatagctgtaattcatgtgaagagcgggcagcttctttcaatggagcaatttctggacgactgaccaatactaaccgagttgcgcttgtatcagatagggtttctaccgcctgtttataaattcctttccgttcttccaagcctgataactgccctaaacaggatgcaccatgggtactttcactaataaatgtactccacgcagatggaagctgcaacattcgcaatgtatgtccggtaggtgctgtatcaaaaataatatggtcatactcctttgctttaacagcatcggtaataaaatctgagaactcattaaaagcagcgatttccaccgtgcaggaacctgaaagctgttcttccatattctgaataacactttcaggtaattttcccctgaaaggtgcgataacgctttctctgtattctgctgctgcctgctcagggtcgaggtttacaacagtcagtcccggcacttctgaaatagctgtaccgtgtccgtttaaggattgatcgaaaacatcttgtaagttagaagccggatctgtactgataagaagtattttctttcccatatcagccaagccaactgctgtggcacaagcaatggaagtctttcctactccacctttacctgtaaaaaacaggtatttagtcagttctatatcggataaattgaatgctttcatttcttttttaatataaatctgttatacatttatttagcgggcattaaatctaaatttactcccgtccattcactcatttgtttagtggtaggataaactttagaaactgcaatttcaccatctaccaaagtaataggtaaagcttctgcaccattcttttgaagatattcatttactgttttattactcacatacacctgtggttcatcccgtaagttgtgacggataacaataacaccctgtcttttcaatgtttcgacaacaactgcaatcctcattaattcaggattgatatttgttccacacaaacctgtagggcaacacattgccgggtcaaaaatttctatctttttcatactgtcttttattttaatttatcaaattgttcagaaataaaaaacgaccgcataatagattcctatgactataaagagtatagcaacaattttgcgaaaccatttttcaaaaatttgtacgctgttataaaaccgacctaatccggctacactatacgccaatatccaagcaacaaggattacaggcacccctgtagcgatagcatatattacgggtaaaaaatacccgcccgtttctgctgccgccaaaggcataagtataccgaaatagaaaattccactggtggggcaaaaggctagagcaaacaaaatacccaataacaaagctccccaactaccttttatattcttctttagcccctctccgccaatattgattttgggtatatttagctttataatatcgagcatgaatatccctatgataattaataccggagcaatcaacatctcaccgtatttgcttaccaccttttgaaccatatacatacttgccccctcacgaagaaccggaataagaataaacccaagtactgtataagtcactatcctgccaaatgtataaagtaacccatttatgaatatacggtgacggttttctatatccttacctataaaacctattgccgttatattagtagctaaagggcacggactgattgccgttaaaattcctaagataaaggctgttataacagggacagaactattgtctaatagtgattgaagaaaatccatcctacaactgttttagcaattcatcaactttatttttaattccctctttaaatttgtccggtgattttcttgcattggaaaaactgaactctgtcatgttgtttacattttcttttccatctttccaaccattcacaaacagggacgaccaagtaacttcgtacttgtctgcaatttgcccattttctttttttgaaatatctataaccttatagataatcctatcgtctgcctgctctttggaataaaggctatccaaaagagctactatattagtttctattgcccgacaggtgatacaacgctgcgctccgtggaaataaagcacctcaatatggtcaggctgcttttcttccatactctgtgcctctgtttttgcttttgcaccattaccacaggatattaagataatggttgagaatagtaaataaaagaatttcttcataactatagtattattgggttatcaattcttttacttctgcaagtgataatcttttcccagcggatacgatttttccgtcaatgactaaagccggaagacttaaaacattatattccatgatttttaataaatcttcctctttgattaatacgacatcgtaacccaattcaaaaattgcttgtttagttgtttcatacaatgccttacagcctgcacacccggttcccaatactttgatttccattttctattctatattaaagtttttctcttaatcgtaattcgtagaactacgaacaatattctcaaaaaaaagtgctgttatccacagcacgatgttcctgtacatttacaatctccccaaaatgctgcaaataatttgcgggcaagttcccaattttccttgttaatacaatatcgcaccttgggcgtttctatttctccctgaattaatcctgcatctttcagctctttcaagtgctgtgaaacggttgctttagcaataggcaattcttcgtgaatatctccaaagaaacaactttcctgtttagccaagaaactaagaatagccattcgtgccgggtgtcccatagctttagcaaaacgagctatctgctcctgctctactgtatactgcttttctttcacttcaatatctcctctatatttattgttcgcaaaacaacgaacaatattttaatccgcaaaattaattcggtattttttcaaggagtaagcataaaatgtatataccagcaaatcacttttcacaataaccacctgtataataacgcattacaatgacacttcttttttctcagccgaaagattaaacacataataccgatttccaaaagacgtatgctttgccatatatcccatggctgaaagtttcagacccaattgacgtgcagagacttctttcaaagctgcagagttgaatttacgcatcacttgaaatatttcagctgttgtcagccagatacctttttccgtttccaaaggatgacggaaacaacaatgaaacacatcttctagtaaggattggcgataatatgccttgttatgtttctgcaaagccttttcttcttctttgtttaaataatccggtgcgccggatttcagctcttctttcagttgcgcatatatttgcttatgctccaaaggttcttccgaaataggttttaacacctccacacacagaaaacgacgacttcctgtggagtcaatcaatacctgatagacatttgttgtggctataaaagaagcaagacgggactcattcacccatcccagtcgcttgccgcgaaaaacgggaacattcaccatttgaagaagattctttaatgtagcctgttgactctctttaatcttatcaaattcgtctaaattaatcaatccgtttttcacgagtttcttctccggcgaactacctgctgtcagattcagattatcaataaaataatgccgtaatgagtcgggcatcagcaatcggcaaaaagtacttttactcaatccctgcttcccgcttatcaatacaggagtaagtacattggcgtgcagacgttcttccccactccactgtgaaagcattgcccgtaaccagcaacgtcctcctctgagccatatcttattatctgaaacacgtaacaataaaggagtcacacgatctactccatcccaacccggcaattcctttacataaagatggaaaggattataagactccactttatttgaaagaatcatggtgggtacatcccctctccagcaaggtattccttccaggcgggcatccacaatcattccattcatttcgcgttcatcaataggtcggaaacagttctttccactcttctccctatattccgtagctcctgtcagattgttataacggaaatcaaaattgtcattcaaatactcttttaattgcaaagtcaacgattgactccatttattagatttacccgttttttcacctgccttctcaagctcctccttcttcttcagtgtcttttgttccacgattccggatacctcgtaattggcaactaccggctcctgcatttgttgtttctgtgcaaacaattgttttattgtctctaccatttctctaattattgttttcatacttgctgtttttttaattattatgaggtttgagacacaaaaatagactaccgaataccggatttgcaaataagccgactcattcttttttgaaaaatgatctaacagaaataagcctttggagtgttgtttttgattagaattattagtaattttgacgcatcatattaggcgtagcaccattcgtgcgatagctgtcgcacataatgagcgacagttattacacaatatgtgagttagctgttgcacataatgtgagccaatcaatagaaaggcacaaaataaataaaatgactgcgtaagtctgctaattgatacgcacaaaacaactaaagcaatgaatgcactttatgatttcttcctgactccccaacctaaagattccaataaaaccagatatcacgcccgactggttgtacgggacaccatcacactggaagatatagccgaaacgattgaatccagaagtagtttaagacaaagcgacgtaatagggtcttttatagagtttgccaatgttttcaaacaagaattatccaacgggaatagtattcacattccgggaatcggttcattccgtatcaaagcggaatcacccgaagtacgttctcccaaagaaatccgtgccgaaaatatccattgcagcggaatcgtttttactccggaaaaagatttgcttcgcgaattaaaggctacgacttttgaaaaggttagtgagacccgcaggtcacaggaattgagcgatatagaaatagacgggagattagctgaattcttcaaagataacccttgtattaccacacagcagctttgttcattatgtggacttcgaaaagccactgcactccgcagattacaaaagcgggtggatgaaggaaagctgactcatccgggctatatccgttctcctttttattttcctgtgccgggatggttcggagtatccagaaatagataatgcaaaataaaccactgattcacagattataatatccatatatgattatgacatcatacaatttgcatgatgtcataatcttaataatctcacgtcacaatgacatgataaaaaacactaacctaatttatttgtttttcttccagagcttactcatatcttccagcgtcttccctttagtctcgggtacccaacgccagacaaagatagcggcagcgacacagatgattccgtataagctatacgcaaacatcggactgaagtcatacaatgccgggaaagtagaagatacgatgtagttgaatatccattggaaagccactgcaatagcaaccgctttaccacgaatcgtattcgggaagatttctgaaatcaagacccagcaaatcggtccccatgacatcatgaagaaagcagcgtatacgatgatggaaagtaccggaagaacacctttgattgccatactatcacacattgccactgcaaatgctcctacagccataccaatagatccgataatcagcaatggtttacgaccaaagcggtctaccgtaaagatagcaaccagcgtaaagataatgttcacaatacccataatcactgtctgcatcatgccaccaccttcggcacctgcattttcgaaaatacgcggagcatagtaaagtactgcattaataccgatcgcctgctggaatacggacaatagaataccgatcacaatcactgttactccataagtaaagagtttctctgttttttcctgagcagtagccttaatatcattaagaatttcctgagctttattcttaccgttaattttctccagaatagtgtaagccttttcttcctgctgtacaagaaccaaataacgaggagtctttggaacaaagaacagcaacagaccgaagaaagcagccgggaaagcttccgaaccaaacatataacgccatccttcctgaactgtccacatatccgactcagcacttactgacaacacaccggcagcatctttcagaataatcggattctgatggtcacccataatcagataattcacaaagtacacaaccaacataccaaagataatggcaaactggttgcacgaaacaagggttccacgaatattggaaggagcaatttcagcaatatacatcggacataccgctgaagccagtcctactccgatacctcccagaacacgatacagattgaatgctatcaacaaatccatattcggttttccgtattcgaagaatagaacttccggataataagaaccgagagccgagaggaaaaataatacagcagcaagccgcaatgagttacgacgtcccaaacgggaagcaaagacaccggataaagcaccacccagcacgcagcctatcaatgcgctggaagaagtaatgccatgcattaccttattatactgaaaatcggaagcggacaggaagaaggcttcgagccctttttccgcgccggatataaccgccgtatcataaccgaagagcaaaccgcccaaaatagcaacagaagtaatcgaatacaagtagagtttacttccttcgttcgttgtattattcatagttttaaaaagtggataaagtagtgtagtagttggattagaaaaaatcaggcgataaagcagcagccctaccgctgctttaccgcctgttttaaatattaattagcaatacatattcagaattgcttcataaagttcttgcttgccgctagtctgtttcggttcgccttttgtttttgcataagcaaccacatcctccagagtcagcttgccgtcttcaaattctttacctttgccgccatcgaatgaagcataacggtcagccagcatcttcttatagggagattcgttaagcagagccgctgcactttcaagtgcacgggccatagcgtccatacctgcaatgtgagcaataaagatatcttccaaatcagtagaattacgacgggttttagcatcaaagttcgtaccaccggtaccaagaccaccattacggataatctgcatcatagcctgagtcagttcataattgtcgatcgggaattggtctgtatcccagccattctgatagtcaccacgattggcgtcaattgagcccaacataccattgtctacagcaacagccaattcgtgttcgaaagtgtgacctgccaaagttgcgtgattcacttcgatatttactttgaaatccttatccagaccatgagctttgaggaagccgattacagtttccgtatctacgtcatattgatgtttagtcggttccatcggtttcggttcgatcaggaaagtacctttgaaaccacgggcacgggcatagtcacgagcaatcgtcaacatctgtgcaaggtgttctttttcacgtttctgatctgtgttcagaagagacatatagccttcacgaccaccccagaatacataattctctccgccaagctcaatcgttgcatcaatcgcattcttaatctgaacagcggcacgagctactacatcgaagtcaggattggtagctgcaccgttcatataacgggcgtgaccgaatacattagcagtaccccacagtagtttgataccggtttctgcctgtttctgttttgcataagctacgatttctttcaggttagcttcgtactcttctacactagcaccttccgaaaccaagtctacgtcatggaagcaatagtattcgatacccatcttctgcatgaattcaaatcctgcatccatcttatcttttgctgcctgtatagcatctgcattaccattccatgggaattgctttgttccgccaccgaactgatcaccaccttcagcgcacaatgtatgccaccatgccatagcgaatctcagccaatccttcatctttttaccattaatcaccttctctgcatcgtaataacggaatgccatcgggttcttactatctttaccttcaaatttaatcttttcaattcccggaaaaaattcttttgttgccataattcttgttatttaaaaagttattatatcgttatttatattatatttccatctggcgtatgcgtcggcgtattcctgacgtttagctatattcggttcgataacatccagtttatcaagagttgcaaatgcctcattattatctttataaatgcctgcaccgatacccgcgcccttcgctgctcctacagaaccgtccgtatcataaagttcgatagtggctccggtcactcctgccaatgtatcacggaagatggagctaaggaacatatttgcatgtccggcatgaatctttttgaccggaattcccatttgttccatgatgtcaataccgtatttaaaagaaaatacaattccttcctgtgcagcacgaataatatgatgtttgccatgtgcattgaagtctaccccccgaatactgcaacctatctccttattattcagcatacgttccgcaccattaccaaaaggcaggatgctgatacctgcgctcccgatcggcgccttggaagccaacacattcatttcattgtacgagataccttcgggagctatatttctttttacccatgaattgagaatacctgttccgttgatgcaaagtaacactcccagacgcgtctgttccatcgtatgattcacatgcgcaaaggtgttgacacgggattgaggatcataattcacttcaccattcaccccatagacaactcccgatgttcctgccgtagaagcgatttcacccggattgaacacattcaaagaaagcgcattgttcggctggtcaccggcacggtaagtaatcggtgttccttccttcaatcccagttctttcgcagcaactgcattcacatgcccttgttctgcaaaagtcggtttgatatccgcaataagtgaagagtcgaaaccatagtaatccatcaggaaatcggctatacgattatttttgaagtcccagaacattccttccgaaagaccggaaacagttgtgcagatatctccgcttaacttcatggcaatataatcccctggaagcatgatcttatatatctgctcataggcagccggttcattttgtttgatccaagccagtttagacgctgtaaagttaccgggcgagttcagcaaatgagaaaggcatctctcctctccgattgtttcaaatgcttgctgcccaaaaggtaccgcacgagaatcacaccagataatagcaggacgtaatacttgctgattcttatctacacataccagtccgtgcatttgataggaaataccgatagctttaatctcagcagcactcactcctgactccgccataatagcttgagtggacaacttcaggttttcccaccaactctcaggatcttgttctgcccatccgggattaactgcgataatcttcgcttctgttttcgggaaaaacgctgacgatacacatttacctgtttcagcattgaccagactcgctttaacggacgagctacctatatcataacctaatagaaacatgatgatttttaaaattttgaattatatatttgaacagacagcctgttcacttattacttattacctactaccgtctcaccttattatatatcttcttatcaaatttataataacgtgctgcacgatgggctaccccctgctgtttttcttccaaaggaactacatattccatcatcgctattttcttatggaagttgcgtacatccacaggcttgtcatataccaactcaaaaagagtcctcaactgggcagcggtaaatttacgtggaagcaactcaaacagcatggaaggattgaactccacaaactgacggatataggtcattgcctctttaataatcagattatggtcgaaagccaatgtcatcacatctttcaaggcaatccaacaggcctgatgatcatccagattcttgtccagtgcccggtctattttcaccatcgacagataagcaattgtcacgatacgttcaacttttgactgcatagcccgttccagccagcgtacatcctttggattgctggttctgtttttagagccgaatgccttgaattgcatcaggtttacatttctgagccccgtcaattcatacagtacacgttgtgctgcttcatccaaatcttcatccatatagataaggctaccgggaagtttcatatcgtgatatacttcaccattatcttcgcccgcacgttttacaagtaacactttgagttgttctccgtcaaaaccaatcactacacagtctactgatatgtgattgtttgccaagggtgcttttttctgtatactttgcatatccttttctttaatacgatgcaaatataggggcgctttatgattcgaacaataacaaatgatatgctataaaacattgtttttcatagatatacatatcatacaatctacaatatgagtacttagtgttatcttctgaattacaatatgtattttacccgttccggcaacgagtaattgtataaagtacaaaaagtggaatggctctttattatcagtacttttcatattcaccctttgtcttctctgacaacggacttattgtattttaaacgatatcccattttgtatcttgccgtttttattctatctttgccggataaatattaaaaaatctaaaatggaacgtcatcccgtcattttatccattgccggttccgattgttcgggaggagcgggcattcaagcagatatcaaaacaatctcggcattaggaggctatgcggcatctgccatcaccgctgtcaccgtgcaaaatactttaggggtacgcgccgtccatgcaataccacccgaaattgtttgcggacaaatcgaagcggtgatggaggacttgcagcctgtcgctgtaaaaataggtatggttaacgatattcagatcgttcatgtcatcgccgactgtatacggaaatattcaccggagcacatcatttacgacccggtgatggtatctaccagcggccggaagctgatgacagatgaagccatcgaagagattaagaaagaacttttgccgcttgttacattagtcacccccaatatcgatgaagcaaaggtgctgacaggcaagagcatccaaaatacacaggatatgctggaagctgccaaacaactctccgacagttatcagacccatatcctgattaaaggcggacatctggaaggcgatcaaatgtgcgacctcttatattctccggggcacacctattatatatatgaagagaaaaagatagaaagtaaaaacctgcatgggaccgggtgtaccctctcctccgctattgcaagctatctggcaaagggatattcgatgaaagaatccatccgtcacgctaaagaatacattactcatgccatcattgcaggcaagaacttgaatataggccatggcaacggacctctgtggcattttcccgactccattgcacaaatgtgtacattttgtgcggtcgtatcataaaaatctgtaactttgcacccgcatttaaaaatcaattaaataataaagatatgaaagcatttgtatttcccggtcaaggtgctcagttcgtaggaatgggtaaagacctgtatgaaaactcagctttagcaaaagaattgtttgaaaaagcaaatgatatcctcggatatcgcattacagatatcatgttcaatggtacagacgaagatcttcgtcagacaaaggttactcaacctgccgtattccttcactctgttatctctgctctttgtatgggcgatgatttcaaaccggaaatgacagccggacactcactcggtgagttctctgcattggtagctgccggtgccttgagctttgaagacggattgaaactggtttatgcccgtgcgatggctatgcagaaagcttgcgaagcaactccttctacgatggccgctatcattgcattgccggatgaaaaagtagaagaaatctgtgcatctgttaatgcagaaggtgaagtttgcgtacctgccaactataactgcccgggacaaatcgtaatctccggttctgtaccaggcatcgaaaaagcctgcgaactgatgaaagctgccggtgcaaaacgtgctctcccattaaaagtaggtggtgctttccactctccgttgatggacccggctaaagttgagctggaagctgctatcaacgcaacagaaatccatactcccaaatgtccggtatatcagaatgtggatgcacttcctcatactgatcctgcagaaatcaaaaagaatctggttgcccagctgactgcttccgtacgttggactcagtctgttaagaatatggttgccgatggtgctactgattttacagaatgcggaccgggtgcagtattgcagggtttgatcaagaaaatagatggtacagtaagcgctcacggcattgcataagcatccgtagatatactttaccttttctcaatgatagagcgtgtcggctagtttgctgacacgctttttttatgcttattagtaaaatataaaataattaatatgctgtaaaacacatcattagttctctctgtcagcaaacattccgaatctttcacttgttttcattataggaatcatttattcaaattcgcggaccatgaaaatacatgaatatcaagcaaaagaaattttctccaagtatgggatccccgttgaaaggcataccctatgtcgaacggccgccggtgcagttgccgcatacaggagaatgggctcggacagagtggttattaaagcacaagtgctgaccggcggacggggaaaagccggaggtgttaaactggtagataatacagaagatgcctatcaggaagctaaaaacattctgggtatgagtattaaagggcttcctgtcaatcagatactggtcagcgaggcggttgatattgccgcagaatactatgtcagcttcaccattgacagaaacacacgctcggtcatccttatgatgagtgcgtccggtggtatggatatcgaagaagtagcccggcaatcaccggaaaaaatcattcgctatgctattgacccattcatcggtctgcctgattatctggcacgccgtttcgcattctcgctcttccctcacatagaacaagccggcagaatggccgctattctgcaagcactctacaaaattttcatggagaatgacgcatcactggttgaagtaaatccattggctcttaccgccaaaggcatattgatggctattgacgccaaaattgtttttgacgataatgctctttaccgccatccggatgtactgagtttgtttgatcctacagaagaagaaaaagtagaagcagatgctaaaaacaaaggattcagctacgttcacatggatggaaatataggctgtatggtaaatggcgccggacttgctatggcaacaatggatatgataaaacttcatgggggaaatcctgccaacttcctagatattggcggtagctcgaaccctgtcaaggtggttgaagctatgaaacttctattacaggacgagaaagtaaaggtcgtcctgataaacattttcggaggaatcacccgttgtgacgatgtagctatcggtcttattcaggcattcgatcagattaagagtgatatacctgtcattgtccggctcacaggaaccaatgagcatatcggacgtgatcttttacgcagccatagccgttttcaaatagctacaactatgcaggaagccgctttaatggctatcaaatcttaagatgaaatcacataaaaaatgaaggaacgatgagtatattaatagataaatccacccgtttgattgtacaaggtatcaccggtagagacgggctttttcatgccaagaagatgaaagaatacggaacgaatgtcgttggcggcacttctccgggcaagggaggtacggaagtagacggtattccggtattcaatacgatgtatgaagctgtaaaacagacacaggctaatacttccatcatctttgtgccggcccgttttgcagcagatgccattatggaagctgcggatgcaggcatccggctaatagtctgtattgcagaaggtattccgactctggatgtcattaaagcacatcggtttgccgaacaaagaggggcaatgttggttggccccaactgtccgggacttatttctcccggagaaagtatggtaggaatccttccgggacaagtctttcagaaaggaaatgtcggtgtcatcagccgtagcggaacactcacttatgaaatagtatatcatttaacgatcaatggtatgggacagtctactgcaatcggcatcggaggagatcctgtggtaggtctgcatttccttaaactactggaaatgttccagaatgatcctgaaacgaaagcaattgtgttaatcggagaaatcggaggaaacgcggaagaacaggctgctgaatatattcacagtcatgtaaataagcctgtagtagcatttattgccggacagtctgctcctccgggaaaacagatgggccacgcaggagccattatctcgggaggttccggctcggcaaaagacaaaatagaggctttagaagctgccggcatacgagttgcacaagaaccttcggatattcctaagttactgaaaagataaatagaaccacacggagaaatagagctttgggcttttgtttctccgtgtggttctattttatgtaccaatatatccccgcgatgataaagtaatatctgaaatttacattccctttttcacgcctaactttattaacaaagcattcatcggataagcacagaaaaagccaaaaagcatagccagctgcatcataaaccaaaatatccatgtgtctttaggcaaaggctcattgacaaataaaacaaaataaacgattgccatccagccatacattccgatttgccaagacaacagagaaaagaaatctgctttaaaagcacgggacagtgcctttcccgccgatatcctttccatctcccgaatagcatagaattgaaaataaactccgatgatcagcgccaatataaaatcaagtacccagtttcctataagctgacttcctgcaacggttaccggaatataattagtgaaccactctcctattatatcagccaatgtgcagcctgctccacaatgtaaagccgataaagccacagactgccaatgaggacggttcatggacatatctcccattgacatatccatattcatgtctttcataccggacatgctcatccctttcatatcagacatctccatccccttcatgtccgacatatccattttcatttcaccacctcccatcttcataggagcaccttgtccgaacttattataagcccataaagctaagtaacttccccacaatgcagtcaatatccatactgcattcattatcttcattgattgtggacgatgtgtcagatcgattgctatgtgaactgcaattccgatacctgaacagactaaaaacacggctaataaattgagcataattgtatatttaaaaagattttagactacaacagcccttatttataaatagttcatcccgtccatttttaaattcatcccatcgaactattctccttactgtttgtttataattttattaattaaatattgaattgtatgagcagacgtagtcaattagagcatgaagtatctgttgctcaggaaagaatcaagaaggcagccaaagatacaccgaaagatatcataaagttatggaaacaagacttggtagacttggaacttgaactcaataacctggtagatgacgaagaagataacaatgaagattaaataaaagagggtgccaccgcgattgtgaagtgcaccctcctttatttgtagtatttttataagcagaatgcttttattgcttatccacagtggaaatacttatgtaccagttccagcatttcttccggtttgccttccagatcggcacgtaatgttttgtcctcataactacggagtttgcgtataataccgtcaatcatagccggactaaatacattatattgctcgaagacagcacgttgtttttgcaaacattcggcagatgccgcacaactatccggcaattgagccaatgctttcagcttgtcctcattctctttctgatggatatttacatttacatacgttctctttgcaatgtccaaagcctgttctatctcaaaaccatgacggcaggcaacagccagtcccgcaagcagctgatacaaatctgccgaaccatccggagaacgcatttctaccgtttgtttctggctggtatcaaaatgactttcgctttccaatggatttgccaaagtacacatatcggtcttggcagcccagcccaacggtacacgcactaatacagaacggttgcgatctccccagcaaacattggtcggtgcttcctgatgaggaaccaaacggaagtaagaagtaggattggtatttccaaaggctgtaatagaaggagcaagttccatcattccggcgattgccttacgggctgtttccgacaatacaccgtctttcagcatctgattttgtccgtcctttacaatacgcatatgaatatgtaaacccgatccggcttttccagccgtaatcttaggcgcaaatgtcacattatacccatatctgtatcccaagttacgaatcacccatttggcaatcatcaattgatctgccgcatcttcggcacgaacaggcaggaactctatttcgttctgttcataaatcatgccatccaatgtaaaattaccaacctcggaatgaccatattttatctgcccacccgtctgagctatatacgacatacactgcgtacggaaatcgttaaacttagcatacggagcagattcatgataaccacgttgatctgtagcctgaaacattcctgtatccggtgaaataacatagtattccagctcacccatcgcctgaaactccatacctgtgacatcagtaaatgctttacacgctttatgcaaagtatgttccggagaactttccaatggctcaccgtctttattgaagaaagaacaaagcatcgaaagtgtcggtatttctgcaaacggatcgacaaaagcggtacggaaacgaggcactacatacaggtcgctactccccgcctctataaaaggaaacaggctggaaccgtccacccgctctccacaagtaaggatcgcatccagataagccgcattattaattacaaaattcaatgttttcagtcgcccgtcagcggcaggatacatgaaattgaccatacggatattattcttctgaataaaagaaataatatctgccttagtaaactcggcggcaggcttttccaaagcagccaccagacagttaggattcattaaaagttcttgattcatcttctatcggtttgttgttagtgaaccaaaggtaagaaaaaaataaccgcagacaataaaaagagagataaattctttggactttaagaaatagtccgacaggattctgcagaaacgaaagaaggtgtgttaggatcaccaacacaccttctttttatatactgattgttattcagtcaattagttcttcggcaaagcctctttaactaccatcggacggcctacatattcagcaccattcaattctttgatagcgttagctgcttctgtatcatccggcatttcaataaaagcaaagccttttgatcttcttgtttcacgatctgtgattaatttaactgaagcaactgctccatactcttccattacgtttctcaagtctgattccttaacgttatagttaagatttccaatgtacaaattcataaaatacaaatataaaaaattaataatttcaataacaaagttctttggaagttcttaatcagagatggatatgctcaataaatgagaagattcatgtgaaataatcaaatcgaaataaaccttttattgtttagtgagtgcaaataacggcatttcgcgggaataatgcactatgttctctcctttttcttttgcaaaatacccttttttatgaaataagaccaaaacttaacgtatgggtgttccagtgagagtctgtaataaagtcagaagccatattgaatgctttgcgcaaactctatcccggtgataccgggcacctgaatatcaaggatatgatcagaaatacccctatgacttttaatgctgaatataatgttcgtttcactgacatggcgataaagttactactttttcaaaacttatacttcattcccatcgaaacatatacagccagtttgaaataagggtccgtatctctggacatatcttcgaaaaaggtcttcagtgtacgtgttgtgtaataaacaatctggttgcacgataatcctccggtagcggttatggcgaaagaagaactaagattcagttccaactgtaatcctacaatgatgtattgctgagagaacatggcatctttccctttccaccagtgctaatgcgccattcatctctgctaccaaacttagtttcagacatttattcagattcattcttgccgatagttccatcgcattcatcatagaaactttgatctgatagcgtccctcagtgctccattgctccgtataccaaacgtatattttcggactttattctttgctccttgcttttttagtttaactttgtacgtagataaaataaccaattatggaaataaaaaaattcatcgaaaactatcgggaagcttttggcgaatatgctgaattgcctatcgtattctggtactcggacattcttgaaaatgaaacggtgaaagtgaacggatgcttctttaaaagcatgagtaaagtcagagaaggtaataccatcagcctgaatgcggaaacaattggttgcggcggcggtaagttttataccggattcaccgatatgcccgagcacgtgccgacgttcgtatctctaaaggaacgatataagcagacaccggagatggtaaaaagctttattgagcaactgggagtaccaagggcagaaaaggaatatctgcattttgcccgtatagataaagtggaaacgttcgatcatttggaaggaatcctttttctggtcaatcccgatatattatccggactgaccacctgggctttcttcgataataataaggaggatacagtgatttccactttcgggtcgggatgcagttctgtggtcacacagacgattctggagaatcgtaaaggcggatacagaacattcatcggattctttgatccttctgtacgcccttattttgaggctgatatactgagttataccattccgatgtcgagatttaaggtgatgtatgagactatgcgcagcagttgcctgtttgacacacacgcatggggaaagattcgggaaagaaaccataatagctacaaagaataagaatatggattttatacttcgtccctggaaagaatcggatgccaaaaccttagcaaggcatctgaataataagaagatatgggataactgccgtgatgggctgccttttccatatacagaaacagatgctgataccttcattaaatacgcttcggaacaagtggaacagaatgaatattgcatcgaggcgaatcatgaggcaatcggcaatatcggattcgtccgcggaacggatgtcgaacgcttcaatgcagaagtcggttactggatttcggaaacatactggaacaagggccttgcaacagctgctttgaaaagagccatagaacattattttcagcgtacagacgtaatacgcctatatgctacggtctatgaacacaatgccgcatcaatgcgtgtgttggagaaagcaggatttcagaaaacaggaatacatcataaagcttgcttcaagaatggccagttcattgatgcacattattatgaattacttaaaaataagtcgtaagcctccttgctttgttactatatatattactaccgactatattttacagaacctaatacatcgaacgaaaggtcccgattcatcacgaaccggaacctctctatgagttattactttcgaagttttactttatctctttaacttcttctcctttttcattcagaagtacggttacttcctgagcgtcttttgtagtaagaattactttataaaccttaccggtttctttttcggcaacatacgcttccttgatggtagcatcttcatagcttttcgctattgcctgtgtcactgcttccggcaaatctttcacttcaatctttgtatactcatcctgtggagcttgtgtctgagtttccactgccggagtgttacttacttcctgtgcgaatgctacagaactacctaatcccaataccaatgctactgctactaataactttttcataatcgtaattttttaagtgtaaataatagaactattgtttttattgtttcttgtacttaatatatggcaaagcagatgccaaacgtctcactctgatatatacaactgataatcaaacatataaatagcaggcgatataaatataactgtggaattagtgtggaattatgtagaatctgttgatacataattggggaattactattcaacactcttaatttggcaagaactgatttctttattcaactgttatatacctataacaacctaattatacaacaatgaaaaaagaagtcttaaaagagcttacagccaaaccgggcaaagaacatcatgtatccgatttcaatccctcatttactgctgatatgtccaaacaggatgccaaagaacaattagtccaaaatatagaaaagctatcagaactgcaaagtatgctttatgcacaagaccgctactcagttctggttatttttcaggcgatggacgctgccggaaaagacggaacgatcaagcacgtaatgtccggtatcaatccgcaagggtgtcaggtgtactcctttaagcaaccttctgccgaagaactggatcatgactacttatggagaatcaatcgttcgctccccgaacggggacgaatcggaatcttcaaccgttcccaatatgaagatgtactaatagccaaagtgcatcccgaaatcctgttatccagcaagctacccggaatactaaaaacggaagatatagacaacggcttctggaaacgccgctaccggcagattaatgatttcgaacgttatctgactgaaaacgggacggtcatcatcaaattctttctgaacgtttcgaaagccgaacaaaagaaacgattcatggagagactgaacgatgaatcaaagaactggaaattctcttctgccgacgtcaaggaacgccaatactgggacgactacatgaaagcctactcggatgtactgacagaaacttcaacagagattgctccgtggtatgtgattccggcagacaacaagtggttcatgcgatatgccgtcgggcaaattatctgtgaacgcatggaaaaactggacttacattatccgcagttatccaaggagacgctggaaagacttgaagaatgcaagaagaacgtatccgatattaatttctaaacaggatactttttcagagtttaacgggttattactgtcaggacttgacaaagcctttttaatgttgtatatttgtaagcagaacaataataaacctataaaaccgtaaccaatgaaaagaagtctgtctttcaacacacctgctgtaatgtatcacatgaacggcaacatacagtcaagattgatcagtccgtaaggaaagtacaatattacaacaagacatatctatttccctataacgaataagatatgagtcatcggtatacaagctgaaggctgcgacttccaatggaaatcgcagccttttttgttgccaaatttcagcacagaaagccataaacgggattacatcgtttataataaactcagataccgttttactaaaactatcacaaagtttattataaacacaaacaccgatgattcataaatcatacatttttttcattgtcaccggaaggagaaatccactgttccggttcacgcacttcaatgaataaacaaaaagcgataaaataatacgtttcattgaaaatttgtactacttttgtaaacatcaaagcccaatcatgatttgaccggccaagaaattatgagaccgattaaactttttcaaacgagaatagtctaatctttaagatatcatcaatctaaacattaaagtcatcaatgaaaatggaaacatccgccaaactctattcgctgaattacagcaatgtgaaaacttacctgttcgccctgttattcgtagcaggcaacatcgcacttccacaactgtgccacctcgttccttacggtggaccgactttattaccaatttacttttttaccttaattgccgcttataaatacggctttcgggtaggattgctgacagctgttctttctcctgtcatcaatcatgtcttgtttgccatgccatccgaagccgttctcccgattatactgataaaatcaaccttgcttgccggtgcttccgcccttgctgcgcgtaccatgaaaaccgtttctttgttagccgtccttggagtaattctctcctatcaactcataggaaccgcttttgaatggatgatcgagggagatttctatatcgcagtacaagatttccgtatcggcattccggggatgctcattcaatggtttggcggatacgccctgctaaaggcaattgcaaaactctaaactaaaaaagaaagatggacagaagggattttttaaagacagtagctattactggtgccgccatgactatacagcgttcagaggcgatggagatactgactcagacaatcaataaggcaaatggtgataaaccggacctggtagccgtcatgggcggcgaaccggaagccatgttccgtcgtgctatcagcgagctgggcggtatgaagcaattcgtcaagcccggacagaaagtagtggtaaagcccaatatcggatgggataaagtgcccgaactggcaggaaacacgaatccgaaactgatcacggaaatcatcaaacaatgttttgccgccggagccaaagaggtcaccgtattcgaccatacctgcgacgattggcagaagtgctacaaaaacagcggtatcgaagcggcagcaaaagaagccggagccaaagttatgccggcccacctggagtcttactacaaacccgttgacctgccaaaaggacaaaagatgaagaaggcgaaaatacatgaagccatcctgaattgtgatgtatggattaacgtccctatcctgaagaatcacggaggcgccaacctgactatctccatgaaaaaccatatgggtatcgtctgggaccgcggcttcttccaccagaacgacctgcagcaatgcattgcggacatctgtacactggaaaagaaagctgtgcttaatgtcgtagacgcctaccgtatcatgaagaccaacggaccgcgagggcgttccgcttcggacgtggtgctggcgaaaggtctctttatctcaccggatatcgtagccgtagatacagccgcagccaaattcttcaatcaagtacgcgaaatgccgctggacactgtaggtcaccttgccaaaggagaagcactgaaagtaggaacgatggacatcgacaaactgaatgtcaagcgaattaagatgtaaaccaccatgctaagaaagatacgtatcggaatatcagttgtcctttttgcactgattactttttattttctcgattttgctaatattctgccgaacagttttcatcggttggcacatatacagtttgtccctgccgtgctatctctcagcataggcatactgattgtgctgattgcgttaaccctgttgttcggacgtatctattgctctaccatctgtccgatgggaatatggcaggatgttatagcacgcatttcaaagtctgtgggaaagaagaaaaaaagatatcggtacagtcctgcaaagaatatactgagatggaccgtgctcggagtgactgtaattgcctccgtatgcggcttctcagtggtattgggattgctggacccgtatagcgcatacggacgcattgtagtacacatcttcaaaccggtgtatatgctgggaaacaacctgctggaatccgtattttccagattcgacaactacacgttttatcaggtagacacctcggtattaagcctttcttcccttcttatagcgatactgacctttgccgccattcttatattggcatggaaacacggacgcacgtggtgtaataccatttgtccggtaggtacggtattaggatttttgagccgttactctttgttcaaagtccgtatcgataccgcaaaatgtaatggttgcggactttgcgctaccaaatgcaaagctgcctgtatccacagcaaagaacacgctattgactatagccgctgtgtagactgtttcgactgtctcggtgcctgcaaacagaaagcgctggtttacgcccctgcttcaaagggacaacaacgttcttccgctacagaaaaacaaccggtgacaacagaatcatcttccgttgctgcagattcttccaaacgtcgttttctgcttgccggactggctactgccggagcagctcccacgcttcttacgaaagcgcaagagtccattgcgacgatggaaggcaaaaaggcatacaaaaaagaaaatcctattactcctccgggatctgttagccagaaacgtttccagcaacattgtacatcatgccacctttgtgtcagcaaatgcccgtcacatgtactgaagcccgctttcatggaatacggtctggggggggtgatgcagccaacggtcagtttcgaaaaaggattctgtaatttcgactgtaccgtatgcagcgatgtctgtcccaacggtgccatccctccgttgacggtagaacagaaacatctcactcagatgggctatgtcgtctttatagaagaaaattgcattgtcctcactgacggaaccagttgcggagcctgttcagagcattgtcctacgcaagccattgctatggtaccctacaaagacggactgactcttccccacgtcaatacagagatctgcgtcggatgtggcggctgcgaatacgtctgccctgcccgcccgttccgtgccgtatatatcgaaggaaaccctgtgcagaaagaagcgaaacctttcaaagaatcagaagaacataaagttgagatagacgatttcggattctagccgcatcagcctaaatatggatagctttcagaggattgtatacaattcaaaaaaactatccattatattcctcctactttcaataaattcactaaattcgtggcgaactaaaaaagaaagtaactcatggaggtattcacaaataactggaatagccgtaaatatcagataggctatgctttaagcggaggatttattaaaggatttgcgcatctgggggtgatgcaggctctgctggagcatgacatcaaaccggacattatctccggagtaagtgccggtgcgcttgccggagttttttatgccgacggaaatgaacctcaccaagtgattgaatacttctccggccataagtttcaggacctgacaaagttagtcatccccaagaaaggactatttgacctctgtgaatttattgactttctccataccaatctgaaagccaagaatctggaagagttgcaaatccccttaatcatcacggctaccgatctggaccacggacgtatggttcatttccaccgtggttccatagccgaacgtgtggctgcttcctgctgtatgcctgtcatgtttgctccggtcaatatcgacggaaccaattacgtagatggcggattaatgatgaaccttccggtctccaccctccgcagaatatgcgacaaggtggtagccgttaacgtaagtcccatcatggcgcaagactataaaatgaatatcgtaagcattgccatgcgctccttccactttatgttccgtgccaatactttccccgaaagagaaaaatgtgacttgctgatcgagccatacaacctctatggatacagcaacaccgaactggaaaaagcagaagaaatctttgagcaaggctataagatagccaatgacttacttgaccagacactggcggaaaaagggaaaatatggaagtaactccgtacttttcccgaaaatatttatgatatgaaataaaatctactctatatgaacaacgaaaataaaatgattatctatcaggtgtttacacgcctgttcggaaacaataacaaccattgtgtctataatggagacattaccgccaacggatgtggtaaaatggccgacttcaccctcaaggcacttggagaaatcaggaaactgggtgctacccatatctggtatacaggcattatcgagcatgcaacggagacggattaccgtcgcttcaacatacggcccgaccaccccgccatcgtgaaaggcaaagcgggctctccctacgccatcaaggattattatgatgtagatccggacttggcaaccgatgtgccggaacgaatgaaggagttcgagaatctggtacatcgcactcaccgttccggactgaaagttattatagattttgtccccaaccatgtagcacgccagtatcactcggatgcacaaccggacggcactaccgaactgggagcaaacgatgacccaaactacgctttcagcccgtacaacaatttctactatataccgcaatccgagttgcgtgcccagttcgatatgaaagaaggtgcagcagagccttaccatgaatatccggccaaagcgacaggtaacaaccgttttgacgctacaccgaacatcaacgactggtacgaaaccatcaagctgaactatggagtagattatctgaatggcggcacttgccatttctccccgactccggatacctggataaagatgctggacattcttttattctgggcctcaaaaggtatcgacggtttccgctgcgatatggcggaaatggttcctgtagaattttgggaatgggctattccacaagtaaaggaagcacatccggaaatccttttcattgccgaggtctataatcccaacgaataccgcaattatctcttccgtgggaaatttgactatctatatgataaggtcggtttatacgatacactccgcaatgtagcttgcggctacgaatccgcggtatccatcacccactgctggcaaagtctgaacggaatagaaaaacaaatgctgaacttcctggaaaaccatgacgaacagcgcatcgcttccgatttctttgcaggagatccacgtaaaggaatccctgctctgatcgtttctgcttgtatgaacaccaatcctatgatgatttattttggtcaggagtttggagaactgggaatggacagcgaaggtttcagcggaagagacggacggactacgatattcgattactggagcgtggatactattcgtcgctggcgcaatggcggtaagtttgacggcaaaatgctgaccgaagagcataaacgcctgtacagcatttaccaaagagtacttacgctgtgtaatgaagagacatccatcgccaaaggagtattcttcgacctgatgtacgccaataaaaacggatggcgtttcgacgaacataagcaatatacttttatgcgaaagtataagaatgaattgctgttcatcatcgtcaatttcgatagccaactggttgatgtagcaatcaacgtaccttctcacgcgtttgatttcttacagataccacaaatggaaaaatatcaggctacagacttattgaccggtgccaaagaggaaatctgtttattgccttacaaagccactgaggtttccgttggggcctataatgggaagattctgaagattacattctgatctgctccgattgaaggcaaatgataaatcaatagtatcttaactctcctccttcccgaagggaggggaattgatgatactattgactttttaggcagccccaatggagatactactgatttattccccccaactgaaaacaaaaattctcaaaggctgtttagttagataaataatttcctaaaccagaaccttatgaagaaaattagttttttggcagtcatattattattgtctgtatctgccttcgcaatcttacctcccggcaatatacagactgccttcaaaaagatgtaccccaaagccaacggtatagcatggtcgcaggatgatggctattattgcgctaactttgttatgaatggattcactaaaaacgtctggttcaatacgcaggctcaatggcaaatgacacagacggaccttgtcagtctcgaccgggtgacacctaccgtatacaatgcctttgtatccagtccttatgccagttgggtagtaaatgatgtaaccatggtggagtttcctaaatggcaggcaatcatcgtcattaaggtaggacaagataatgtagatatcaaataccagctcttttattccccgcaaggaatgttgctaaaaacccgcaatgtcagttatatgcacgacattctcggtccgggaacattcttataaaaaaagcccttgccaaacattaaatgctcggcaagggctttcttattttttattccctgagttatttcttctttctcaaaacaacagctgtacgtgcaggaatatagagtttcagccactctttcttttccttcttatacaacggatcggcaatcgtgaaatgaactactgaatcatctgcaagaccatttccgccaaatgcaacattatccgtattcaagattacttcataagctcccggactaacgaggaaaccataatctacaaaagactgtttcggattgaagttaaatacaaatatcagatccttacgtccataagccaatacctgatcaccatcattatgccagatctcctggaccggagtcgcctggaaatctttcacactcttgatcactttcagcatctcagcatcaaagtcccccatatagtgataagccagattcttgttatctaccaaatcccactgacgacgggcatacttacaagaccatccattaccttcacgcggaaaatcgatccattcgggatgcccgaactcattacccataaagttcagataaccgccattgatcgtcgaagatgtcagcaagcggatcatcttatgtaaagcgattccgcgattgactacataattctcatcgcctttctgcatatgccaatacatatcggcatcaatcagacggaaaataatagtcttgtctcctaccaatgcctgatcatgactttccgcataagagatcgtcttttcatcctgacgacggttggttacttcccagaacatactggaaggtttccagtcctcatcaatcttttccttgatagtcttgatccagtaatcagggatgttcatagccatacggtaatcaaatccgtaaccgccatcttctactttggccgcaagtcccggcataccggaaacttcttcagcaatagagatagccttcggattgacctgatgaatcaactcattcgccaatgtcaggtagcaaatggcattgccgtcctgatgaccattgaagtaatctccataattacagaatgcttctcccaacccgtggctataatacaacatagacgtcacaccgtcaaaacggaatccgtcaaacttatattcttccagccagtatttacagttggacaataagaaatggatcacttcatttttgccataatcaaagcatagtgaatcccatgccggatgctcacgccgaggagccggatagaaatactggttcggatcaccggcaaagttgcccaaaccttccacttcgtttttcaccgcatgagaatggacaatatccataataacggcaatccccatctcatgagcagcatcaatcagcgctttcagttcgtcaggcgtaccaaagcgggaggaagcagcaaagaaactggatacatgatagccaaaactaccataataaggatgctcctgaatggccataatctgaatacagttatagccttcctgtgctatgcgtggaagtgttttttcgcggaattcattgtatgtgcctactttttcctcctgttgtgccattccaatatgacattcatagatcaacaaaggattcgtagtaggcttaaatgtctttttcttgaatttatatggcttttccggtgcccagacttgtgcgctgaatatcttggtctgctcgtcctgcaccacacgtgtagcccatgcaggaatgcgttcaccttgtccgccatcccaatacacattcaacttatataagtctccgtgctgaatggcatctgccggaagattgatttcccaattaccgtttttcagttttttcagcttataagcagctttctcttcccagttgttgaatgtacctaccatataaatatgagtagcattcggtgcccattcgcggaacgtccatcctttgggagtacggtgcagaccaaaataaagatagcctgatgcaaagtccgaaagagtttgttttcctttattggtcaactcggcttccttgttcagtgcatactggtgacgaccggtaatggcatctgcgaaaggttccagccagggatcgtttttgataatgttgagtgtctctttcatatcagaattgaattaggtttatgcttttacttttacgatcactttcttcactccatcaggagtaatgccgggagcatgtccgtcttgcgggaagaagatggcaaacattcccggtttcacagctacatatgtctctgccagtccttcgaagaaagtaatatctttttcgacattataaggagcgtcggcaggcacacaatctttggcagcagtataccccatcacttctgttcccgacaatgggatctgaatatcaataaattcattatgcgtttccaatttcgcctcttccttagtcttaggctttgtctgtgcgatattcactagcagatcttttcctttcagttcagtcttgcctatttccatggcttggaggtcatgagatttcaagaactcaatagcttgtgcaaacaaaggattcaaagacgcgtatttttccagattttctaaagtatctactaccatatgagtttaatttttaagtttatatttttaggtattatttttaggtattattttattcaaaatcatcaattgtgtaattgatgaaatcggcaaatctcttgaactgtcggaatgctttctctatctgctccatcgtgtctgcccgagtgaaaaaatcatcgggaacaagataagaacagacaaactgtctgcacttcagataatcaatatatttaaaatctttcgagaatcccttgggagctgttttcatgaagtcctctcccactacaggaaaatattttttgaattcggggtcttctacaatggagatatactcttccacattgtcataaatggcttggcggacagctttcagtacattgggaggcaaacacaagcttcctccggcaagcatacttccgtcaggctgcagatgcacatagtatccgcaatgatcggacttcttgcctttggcattgatataaccgccaaaatgtatcttatagggtgtcttatccgcagagaagcgggtatcccgataaatacgataggtacaatctttgggctggattccccggattgtttcatcgaacaaagaaatgcgggcgattactgttgccagaaagttatcaaactcggcacgggctacttcatattctgaccggtgctcattaaaccactcacgattattattcgcagaaagatcttttaaaaactgaaagataacgggtatgttcatcttcatcattttctattattaccctacaaacgtacaaattttatttcatataaactacaaaacgcaacaaaaggacataaaaaaagcatcggcctggtaaaaccgatgctctaacacatttatcaaaaaaacagactcttctgcttctgatgtactctaagctttcacaagtgaagtacaatctcttttaattaatctttatctaatactatgaaaaacacataaatataacagattaaaaagaggctttgttcaacggttctgtatatatttccgttaattttagttatagaataaaatatttttcattgacaggtatgatgagccgtttccagtctatcatcgcattgaacaacatgatatgggagtaatcgcccaattgcgcctgccggatatctttctccactatgaaccgattatccaacagttccgcacgcttcgtcccctgaagcaagggatgagccggagtataccatgtatgtccgtcatacagcgctatgttggcaatggaggtatcagtcagatatccgtctttcactatcagaatatcgtctgccttccctctccgggcaaacagatcattcaattcttcccgattggtactcttgtaactataatcaatagtgtccgaagcaaccggacgcaaggaagaaaccattctcatttgataaggagtgtatccgacctcttcgatttccttatcgtacacaatccggcacttccagataccggacagagacggaggagatataaagccggacaaatcaatgggagccgcttctttccaaaaggcggcacgagtccggttcatgcgcgctgtgtgatacgacagattataaacctgtccgtcttctatgcgaatcgtttcaataaattggcacatatactttttgtttcatttcatgatattcactttccacttcactacggcaggttattccgcctccgctcttaaaatacattctgtcgccttcctgctccacaaaacgtatcataacggcactatcaaggctacttccgtcgaaataccccatcacacccgtatagaatcctctctcatacgtctcggcttcactgataatctgcatcgtctttttcttgggagcaccggtgatagaaccggcaggcaagagtttgaaaagaatgtgtcccagattttcccgataattatccggcaaggttccctgtatttcagaactcgtctgaagaatagttccgcgattcgtctgcaacttatcaatatacctgtatcgggacacagatacccgatcggccactatacttaaatcattgcggatcaaatctacgatagtagcatgttcggcagcctctttcggatcatccatcagttgccggacagccgaaggcaatgatgcatcaagagtacctttcatcggataagaactgatttttccctgttggattctgacaaatatctcgggagagaaaactgtgaactgatccctgacccacaatttatacattgcttttgaacggaagaaaatatctttcagactaaggttcgtctctatcggcgtgcggcatgtcagattggtcagaaagctgtttccggcaaatatattccgttgaacgatatcaaatgaccgacggtaactatcgaaagattcgggataagaattccagcggacaggcttttcagagcaagaaagcacatcattcgagaaagattgattggtaaacccattcaggttatacactacttcagaagggtcaacagaagcaacttcttctacataagaggcatcctgcaaataattaatgataaaaataaaaggcctgcaggattgccctaaatggtttattctccgaatcgtttcttctcttgtatataattgcataaagtctttctttttgggaaagcaaaagtacgcaaaaagtagatcattcaaaaaaagaagcaataaaaaagggttgccaaaacgttccccggcaaccctttctatctggaattggtagtttacttcatagctgcttgcacttgagaaagcatagttttagactttgtatcttccggagaaactttggtagcttcttccaagtaacctatggcttctttaaatctgccatctgccttttccttttctgcagcatatttgtctgcatcagagtttgccagaggagcagcctttttcaggatattcgcaccgtcgttatagcataaaacgcccaggctatacaaagcattggttttatatgttttatgatccaaaggaatcactttcttaaagcattcttctgcttcttccgcttttccggctttctgcgcagcgatacctgctttcaggtagtggagaccatagttcttaatcattgttttattgtccgggtctactttcagaccttcttccaaggtagcaacatactcgtcagtcttcttcatagcatccagtgccagcgctttacgggcataagcattacctatattgaatttcttttgaatagcaatatcaaagaaagtcacagcttctgcatactttttcacttcatctgcagccataccacagtaataagcgattgcagaatcctggttattcgtttgtttcagatactcgctgaatttagcataagctacgggatagttcttggcattaaaagcgtcgcttccttcttttttcaattggctagggtcagtttgagcgaaaatgttagtcacagtaaggcaaaatgcaaataaaaaaatcaatttcttcataactttattgtgttttttagttgttaatcgtccaaaagtataagtaataacagagaatcgcaacatcattttaccttttttgagctttttgaaacctatataacgttcgttattcttcgtaaaaatagatttgcgagtgtccggcagggaggaaaaaagacactccttccgcctcaataattcagcgaaaggagtgatattcaaatagtttagttattggtcagatagcgtttttattagcatattcggaaaactcacagccaaaagtatccaccagataattatccagatcatctgccttgaaagccagatgggtcagattcgtcttgacattttccgaataatcggagaatatatcagatatatgcacacgataagaaagataaatctgatttccatccagtccgaaacgataaggagcaatctctgtctgaagtaaataggtcagcacaggttccagattcttttttggcagaatattcagcggagaggtggcaaacaaataagaacggtcgtacacaaacatacgtatctccgaacttcccttatagaatttccagccttcgtatcccacacgtgccaataccggattgattcccatcgcttcaacggcttcttcgcagaatacagccagatcggtcagtcccctctctttaaagatttcttccggcaacttgtcaccgcaacaagggcaatattcatcttcttcggaaatgaattcatcgcaactattacactgcacattaaaaacagagcggtccagactttctatattctccagtacctttttcagtgtatccacagggataccaaatcccatattatccgcatcggtgatcttactggcggtaatggcgatcaattcaccacgttcattgaacatgggacctccgctatttcccggattgaccgcagcatctgtctgaatataataactgttgttaatcagctgtctgggagaagaaaccgtaccttcagtcactgtgaacggcataccaaacggatagccggccacgtttatcttctgtccgatcgcgacttctttcaactccgataaccggatatccggaagagcagaaaaatccccttccaccgacagcaaagcaatatccaatacggaatttaccataacgaccctggccagaaacgaattcttatcattatcctggatcgctacctgacggaatccctctactacatgataattggtaacaaacagatcatattgtttcagataaaaacaactgccgcagccaccggcatgattcactttataaatggcattgtatatattctgttccatagtcttgttctttatttgttagtgtcctcttccgtattgttattgttgccatacataccggccatcatcttttgcatattctccatagcaagttgctgcatcttctgtatttgctccatatcaatattctgcatcgcctgctgcatcatttcctgttgcatctgttgaagctgtgacgtatcgaagcccattgtttctccgtcttcgtcaccaccttcttcgtcatcatctacatccagttctccttccatgatattatccatcgcttcatataatatcggagcagcttcttcccatgacatggcagaggtagccttcattgctttcacaactaccgcattcacatcattctgcacattattataatagtacaattcatagaatttattaataataagcaggcagcaaacgatgaagtcacctgattccaatgccgagccggctttctcgtatgtatcttcaaagttatcctgaatgtttttcagtacggaacggcgtctgtccgaaatgaaagtttcaacaaagtaaagatcggcagccagttgctccttcgtcatttcctgaaggcgtgtgacaacagatttggtacgggatacgatctccggcaacggcatatcctcccgcccatgatctgtaatcgctttatcaagatcattcagcagttgcccttgcggacagacaaaatagcatattttaagaagcgtactggataatatattccaggcataaccatattttcgttctgtctcgaagtattttacagcgtccatacattccttacagctctgctggagggcttcgtataccttatccaccgtttcattgtcgtatggagtaattttgggctcataaatgcgctcggccttgaacttagtcacaaattcgtcatcatacttatctcctatccggcagatttcctcaagcacatagtatatcttgtaaggattgcataaagccaccggacaatgaaagtcaaagaacaacttatcattctgcaaagagatacatgctaacgtcagttctgtcagattcaaagctgccacctggcgcagcaaaggaatcctccccttttccggcaacaacagaaatggagctgtaatattcagctggtcaccctccagcctcagatagaccataatggaaccatgaggtacggcaaactctgtcccttctgcattaccaaatttgctgcgtaactccggatcaatataatccagcaacagataaaaagactgtaagtgctctcccttttcaaaagcatctgtactcttctcaaaagcttctacatccaccttgctctgtgtagaagcaatgatcggactatgaaaactcagtgtttgtttcataattctaatgtttggtttaacaaattatttcattctcattcttaatcatttaaaagtcccgaagcacagcctccaatgttgtttcctgcgctatccccatcttttcggtacgaattcgtttcagtcttttcttcaccgaatctttctccagatgcatgatcttagcaatatcagtctgcgaaaactgcattttcaccatacagcaataccgcaaatcctcctcattcagtgcaggatactgattcttcagacgttctgtaaaattcaggaagatactgttggcattcttgaatattactttccagtcctcatccttgagcattatattctgctgggttttcggattttcaatcacaggaatacaagtttcattcaggcgcttaaaaaactcaacctttagtaaagcctctttctcccgaatctgcgcttccctttccttagcttccgacaagtctttttctgcctgtagtttttctatttcacggtacttcaacaactcctgctgatgggcaatctgtcctttctgacgcaatacttcctgttgtttccttttatataaaaagaagtagatgcatacccctaacaaaatcgccaggcaacaaacaatagtcacaacgtacagttgcagcttcctttccaccgcctgttgccaaagacgggtattggcttttttcaattcatcattgtgataattccggtgcaaagtcagtaaaccttccttatctctctcctctatgagcctatcccgcaagtcagcatgtcggttcatataataatatgccgaatccatctgcccggtagcagcataaatttcagccttagccaaagactttcgagttgtatattgtatatctgttgtatcttccaccgctttattaatgtagtagaaagcagaatcatactgatgcagttcagtcagtgtgtttgccttatttatataatgatcatagatatattcattttcctctccgaaaagttcaaatagaatagccaaatctttatcgcgatacatcaacgcctgtttatagtccttcattgccatgcaaagatgggcatgctgtgaataaatatgtgataatgtccggaccagattctctttctcagccagctgtatcgcttgcacagaatatttataggcgctatccagttgatttgtctgcataaatccgtgagtgatatatggcaacagtgcacagatatacaaaggattaccaatccgttcggcataaggtaacgctgccttccccaaccgtagttcctcgtcaggaatcagtcgcaagttgaaaagacgactcattttatacctgaccatgaactgaagttcatcgttatcactctctcccaaccaatcgattgtctttaggaaattatgcagggaagcttccgaatcttcattatccattgctaccagaccggcattataataagccagtgccgcatgagcagagtccttcgtacctttataataatcgattgcaacagatataagtgaatcacttttatgcccctcatcagatgactgattaatcacttgcgtcattagcagcgcatataaagcgccatttgaatccgacagcctctccggatactgaatttggcgaagcaaagaaagggcgctgtccggtttcagcctgattaattgttcgatagataacaatcggtcggctgtatgacgacaagcactcaataagaatcctaataatataaaaagtaaagtttgtcgtaaatgcttcatgaacaaaaggtttatgtttcccaactaaagagacgaatctctgaatgcaaatgtaggaataataatgggagttgctttataaaatagggggtataaatatattcttaattaaatcaaatatttgcctgtttatcaaatcaatatagtatacagtaaagggggacatagggggacatttactgttttataggggataatcgcaatatgaaaccactcagaattcaataaaattgatgtaccccaaacaaaagaaaaacgttgactattattaaataatcaacgtttacatcagtgattccgaagcgattcgaacgcttgacccacgccttagaagggcgttgctctatccagctgagctacggaaccatccttatttgcggatgcaaaggtagtgctttttgcgagaactcaaaaacttttcgacacttttttattcatatttttctttatagctagaaatcagtaatttataaaagtactattcagacccctgttctagggttgaattattttttcttatcccgatatcccatatatcatatatcttatttatctttgtacaccgttaaatataaaatcaaaaactatgttgagtcgtattatcgtattggtcatagccggagttgctgtcgtttatatcgtccgctttatagataacttcttgtcccagcacagaagaaaatattaaataagatatatacctatcaggagaagttcatttaaaacttctccttacgttcaaattcaccttcctcggtgtaatacttccatgtgcctttaggctgattatttgaatatttcccacgaagcttgagctttccattttcgtgatattcacgataacgtccgtgacgttttccttctttcacttccgcttcgcttttcagtgctccttccggatagaactcacgcagaacatttccttcaaacttctcaatatagaaacgctttaactcgctcatctgctccttttcggtcacagcctcttcgtccatatcctgatcttcctcatcgctgacaacggcaactacctcttccggctcgtatggacggtaatccatcacatactgcagagaagccagattgttatctccgatcacctgcatcgtccagtaagggaatgaatacaagacatctttattcgattgtatttcattccatgtagcaggattcatcataggtttcaattgtgagtagaacttgtgcatatctgtatacaagaagattgtggaacttgatttcatatacgaataagcatccttaaatcctgcattattcttcagtaaattcttctgctcatagtcttctacaaaagaaagcaaggaagcagctttattactgaaaacgacgtaatcatccacataagtataatatggcttctcaaatttatcaaacagctttccgaagaacagacggaagaaacctttcatttcaacataattgatttcaaagtccttataattaacagactttatcttaaccggagaccggcgtttgatcttcttttcaataaactccatatttttacgggcgtctttgatgctttttgcccgaatagccagaatcacttcaggatcatgtcctaataaccccggttcggattgcgttatggcaaactctccggacatccagctcaggaagttctcttccagagaaataccaaacaggctttctatctttttccgtgaactctgataagagtcatacaacagtttatcatgaacagacagagcattctccagttccttcacgaaagttaccggactatcaaagccgatatttgtataaagagccgttcgcccggacaaaatctcgtgagctttcattttatgcttccccgaattcagcaaggcagtgatataaggatccaccgcatctttcttcaacgtataacctttcacctccatccggtctttatccatattcaggtaaaggcccgcaaaattcatagaattactgaacagatcgacatattcatttctcgctcccagataaatggacataaactgaggaatacgggcatagttgataaataccctgacaagccctttaccggaaactaatttttccgtttcaataaaagactggtcaagtccgatcttaggcttattacgggagttgatggcagattcaacgagtccggaagtataagaacctaccaggtgattatctacaaaagcagtataaaagacatcacgggtatccggatcacgcatttcaagaatgttaattccattatgcattcgattagtgacggtaaagccggacattgccagcactgtttcgacctgatctttcaataaatccattttagaagctttctgcatatctactataagcagaaaatcccaatcggtagcgcgggtcttatgaagtgagataagcagatcccgctgaccgaccagtgataacagcactttattgcttttgacaaccgagtcaagcttttctacactcttcgcaacttcttcaaatgatttcgcttttctcagacattgccaggtttcgcttccactaaacttttcccaatcttcaatcggagcagatgactgaataataaatgccgcatcctccggcaccagatagatctgctgaatattacggtcgggcgaaataaacagataaacgatggagtataccatgtatacagccaaagctagtcctgccgtaagcaaagtcctttttacaatttttcgtgtattatttttcttctcatttttcccgggttcaacatattgcccttgttccccattgtttaattcatccattatttatttgttattgagttgattgggcaaaattactaaaaaaagatggaagttgaaattcacaggtcggtttatactttaaatcttctcatccatctacatccaccataaatcagagctattccccccaatataaatatccctcttttccacctattgacacgtttcacagaaacagttttcttcacctcttcactcgttctgaactctaccccggactccaaagacagagaatcttcttccgctgacatactaccggcaaccacctgctgcagcttccctgtccttcggtcaagagaattcttcatgatcttcacagaaacctgcgaagccgtatccacaggatatatgaaaacgatctgttccaaatgctcttccactacttccgaatcacttctcgaaatgaaagcctgctgaagcaaactgttcctgcgtccgaccgtagaactcgaatcaactttaatctcccggctcttacagacaatctccttcttacctctgcaccccaagcacaaaaaaggaatcattaaagccaccaaccatacaaacaaggcttccctcccacttttcagaaactccttcacatcaaaacaaggacaaacctttacgtattcattagcctcaattaccccatcttcattcaaatccggcgaagtgtcccgatgtcccaaaacctgaaggataccatactctttctgcaaatccatgatcaattgataaagcacccttttctgagccttcgtccgagtatccgcaggatgcccgtttacatccagcccaccaatatagcatatcccgatactatgctcattccagcctttgcaatgagcccccgccaaagaaatatcccgccctctctccaatcttccgtccagacagacaacatagtgataccctataccattaaatccacgttcacgatgccaacggccaatatctgctgctgtaaaatcctgcccgacttttgtagccgaacaatgtataataatagaatctatttttctcatgatattcatatattagtcattatttaataatccgaaggtggcattctttgggtacatcctctgatctcacactttttcacttcagattccttttgaatcagctccacttcatgacacttatgtatccaatttattttctcctcctgttccttacgcagttcgatatagaggccatctattttttcatcccgctgagtcaggcgatcttccagccagtccaccttcttacgtcggttttcttcttccagattacagaccgaggcttcctcttttctggcatccgtcttacgacaggagatgtatcgtactatccatttcactgcttccagaccgcccatagcagtaataaaagcaagtattgttgttatttgcatactcttatttacttatagttaagttgagactttataattagctttcgaaaagcttataagaaagaatgaggccgaagccccatccttataatcaccctgttataatgagctaccttacttttcatattatactgtcggatccggtgcttcatcatcgtcacccgatccaccacccggattcgggttttctccatcattcccgtcatccggatttcctccgataacatccgatttattaatatgatccagatccttgaatttcaagccatccgaacgagttgatgttccggtagacagacgaatatccgagttggcacgaaaacagatgcgtaatccttgaatatcagctgaggtaaagtcttccgctttctctgtccctttgctttgggcagacaagaaaaagtaacccagtccttcgatatttactgaacgccccgccagtaatgtttttctcaataaagtacgaaagtcctttaaaacactaattgtttcaccctcacttactcccgaattggaggaaat

SEQ ID NO: 4543 - DNA, 62714 bp, Unknown
  gut microbiota DNA sequence
tatgaaatcggtactttatacttctgtacttcagactccgattcttctgttaggctcgttgattatccttgtgctcggtttcaaagaactgggaggctgggacgaaatgatgagagtgtgcggtgctgtgacggtaaacgattatggtgacaccatgaccaatctgatccgcagcaacgatgatgcgaacttcccttggctgggtgcacttatcggttctgccattatcggtttctggtactggtgtactgaccagttcatcgtacaacgtgtactttccggaaagaatgaaaaagaggctcgtcgcggtactatcttcggcgcttacctgaagctgttgcctgtattcctgttcctgattccgggtatgattgctttcgcattacatcagaaatatatcggtgccggtggcgaaggtttcctcccaatgcttgccaatggtactgccaacgctgacgccgccttccctactctggtagctaaattgcttcctgccggtgtgaaaggtctggtagtatgcggtatcctcgctgccttgatgagttcgctggcttcactgttcaactcatctgccatgttgtttacaatcgatttctacaaacgcttccgtccggagactccggaaaagaaactggtgggtattggtcagatagcaactgtagtgatcgtaatcctcggtattctctggattcctatcatgcgtagcgtaggtgatgtactttatacttatttgcaggacgttcagtctgtattggctccgggtattgccgctgccttcctgctgggtatctgctggaaacgtacttccgcacaaggtggtatgtggggattgatcgccggtatgatcatcggtctgactcgtctgggtgccaaagtatattacagcaacgcaggtgaagtggcagattctaccttcaaatatttgttctacgatatgaactggctgttcttctgcggatggatgttcctgttctgtatcatcgtagtcatcgtagtcagccttgccacggaagctccgacagctgaaaagattcagggactggtattcggtacggcaacgaaagaacaaaaagcggctacccgcgcaagctgggatcactgggatatcattcatacagtaatcatccttgctatcacaggtgccttctactggtatttctggtaattaaataaattcattcaaacgatgaaaaactattatagttcgaatcctaccttctatctcggtatcgactgcatcatcttcggttttaatgaaggcgaaataagcctgctgctgctgaagagaaacttcgaaccggcaatgggcgaatggtcactgatgggaggattcgtgcaaaaagacgaaagcgtggacgacgctgccaaacgtgtactggctgaacttacaggtttggaaaacgtatacatggaacaggtgggagccttcggcgccatcgaccgcgatccgggcgaaagggtagtttcgattgcctactatgcgctgatcaacatcaatgagtacgaccgcgaactggttcagaagcacaatgcttactgggtaaacatcaacgaactccccgcactgattttcgaccatccggagatggtcgataaagcacgggagatgatgaaacagaaagcatctgtcgagcctatcggattcaatctgttgccgaaactgttcacactgtcccaactgcaaagtctctacgaagctatttacggcgaaccgatggacaaacggaatttccgcaagcgtgtcgcagaaatggactttatcgaaaagacggataaaatcgataaactgggttccaaacggggtgcagccttgtataaattcaacggcaaagcctaccgcaaggacccgaaatttaaattataatcaatatgctggaagaactgaaagaaaaagtatttcatgccaatctcgaattggtaaagcatggattagtcatctttacatggggaaatgtttctgccatcgaccgtgaaacggaactggtagtcatcaaacccagtggagtcagttatgatgatatgaaagcggaagatatggtagtagtggacctggatggcaaagtcgtcgaaggacggctgaagccatcctcagatactcctactcacgtggtactctacaaagcattccccgaaatcggcggagtggtgcatacccactctacttatgctaccgcatgggcgcaggccggttgtgatattcccaatatcgggacaactcacgctgactatttccatgatgcaatcccctgcacagcggatatgacggaagctgaagtaaaaggtgcctatgaactggaaaccggaaacgtgatcgtaaaacgtttcgaaggcctgaaccctgtacatacaccgggagtattggtcaagaatcatggtcctttctcttggggaaaagacgcacacgatgccgtacacaatgcagtagtgatggaacaagttgccaaaatggcaagcattgcttatgccgtgaatcccaatttaacaatgaacccgctgctggtagagaaacacttcagccgcaagcatggtccgaacgcttactacggacaataaaataattgacaattgacagttgacaattgacaattaatgcgagaggacatgaaggataatgtagtaaaagataaaagtttggagttcgctgttcggattgtgaatttatataagtttttagtaaatgaacaaaaggagtttgtgatgagtaagcaaatattgcgatccgggaccagtattggtgccaatattcgtgaggctgagcaagcacaaagtcgggctgattttattaataagctgaatatagcacttaaggaagcgaacgaaacagagtattggctggaattattgattagaacagagtatatcactcgggaacaatatgagagcatcaataatgacagcacagaaataaacaaattattaatatctataattaaaacaacaaaaaacaattaataataacccgcaattgccatttgactttcgacattctctcattgtcaattgtcaattgtcaattgtcaattcaataaattatgaataacgtatttgatcagtatgaagtatggttcgtaacaggagcacagctcttgtacggaggtgatgcagtaatcgcagtagacgcacactctaacgaaatggttaacggtctgaatgaatcgggcaaacttcctgttaaagtagtatacaaaggaacggccaactcttctaaagaggtggaagctgtattcaaagcagccaacaacgatgacaaatgtgtaggcgtcatcacttggatgcatactttctctcctgctaaaatgtggattcatggtctgcaacaattaaagaaaccattgctgcacctgcatactcaattcaacaaggaaattccttgggatacaatggatatggactttatgaatctgaaccagtcagctcacggcgaccgcgagttcggacatatctgtacccgtatgcgcatccgtcgcaaagtagtggtaggctactggaaagaagaagaaacattgcataagattgctgtctggatgcgtgtttgcgcaggttgggctgactctcaggatatgctgatcatccgtttcggcgatcagatgaataatgtagccgtaaccgatggtgacaaggtagaagcagaacaacgcatgggctatcatgtagattattgcccggcaagcgagctgatggaatatcacaaagatatcaaaaatgctgatgtagatgctttggtagctacttacttcaatgattacgatcacgacgcttctctggaagacaaatcaaccgaagcttatcagaaagtatggaatgctgccaaagccgagcttgctctccgtgctatcctcaaagcgaaaggcgccaaaggattcactaccaactttgacgatctgggtcagactgacggtagctatttcgatcagattccgggactggcttctcaacgcctgatggcagaaggctacggattcggtgctgaaggtgactggaaatcggctgctctttatcgtactgtatgggtaatgaatcaaggacttccgaaaggctgttcattcctcgaagactatacactgaactttgatggtgccaacagttctatcctacagtcacatatgttggagatctgtccgcttatcgcagctaacaagcctcgtctggaagtacacttcctcggcataggtatccgtaagagccagactgcccgtcttgtgttcacttcaaagacaggaacaggctgcaccgcaactgtagtggatatgggtaaccgtttccgtctgatcgtaaacgatgtagaatgtatcgaaccgaaaccacttccgaaattgccggttgcttccgcactctggattccgatgcctaacctcgaagtaggcgcaggcgcatggattctggccggtggaactcaccactcttgcttctcatacgacttgacagcagaatactgggaagattatgcagaaatcgcaggcatcgaaatggtacatatcaataaagatacgactatcagctgcttcaagaaagaactgcgcatgaatgaagtatattatatgctgaacaaagcgctttgctaaaaaccaatcactgagtccacttaaaaaaatcggtaccatctccattggtaccgactttttagtcacacacaatatggatactggcgacttttaattcaacccgaattaaagacacttccgccttttgaaagcagactcagtttttgttctccacacttattgttataccttaaaatatcggtttccaacatgaaattagatgcaaaatcaaccatcgagacaggtaaagctatccttggcatagaactcggttctacacgaataaaagctgttctgattgaccaggaaaacaaacctatcgctcaaggcagccacacatgggaaaatcaactggtcaacggactttggacttacagcattgatgccatctggtccggactgcaagattgctacgccgacctccgctccaacgtgaagaaattatacgacacagagctcgaaacactggcagccatcggtgtcagcgccatgatgcatggttacatgcctttcaatgaaaaagaagaaatcctcgtgcctttccgcacttggagaaataccaatacaggccgtgctgcggcagaattatccgaattatttgtctataacatccctttgagatggagcatttctcatttgtaccaggctattctggacaacgaagcgcacgtcaaagacatcaagttcctgacaactcttgcaggttatgtacattggcagataacaggcgaaaaggtgttgggcattggtgacgcatcgggtatgctccccatagatccgactaccaacaactattccgccgaaatggtggccaaattcaacaatctgattgcttcgaaagaatacagttggaaactggaagacattctgcccaaagtattgtcggctggtgaaaatgccggtgtcctcacaccggaaggctgtaaaaagctcgatgcatccggtcatctgaaggcaggaataccggtctgcccgccggaaggagacgcaggcaccggcatggtagcaaccaacgccgtcaagcaacgcaccggcaacgtatcggcaggtacttcttctttctctatgatcgtattggaaaaagaattgtcgaagccatacgaaatgatcgacatagtcaccactcccgacggaagcctcgtagccatggtacattgcaacaactgtacttcggatcttaacgcatgggtcaacctgttcaaagaataccaggaacttctgggtatacctgtagatatggatgaactctatggcaaactttataacattgcccttaccggtgataccgattgcggtggtctcctctcctacaactacatttcaggcgaacctgttacgagacttgccgagggaagacctttgttcgtacgttcggccaatgacaagttcaaccttgcaaactttatgcgggctcatttgtacgcctcagtcggagttctcaagattggcaacgacatcttgttcaacgaagaaaagatcaaagtcgacagaatcacaggtcacggaggattgttcagaaccaaaggagtcggtcaaagagtacttgcagcagccatcaactcgcccatatctgttatggaaacagccggtgaaggcggtgcatggggaattgccctgctgggttcttacctggtaaacaataaaaagggtcaatctcttgccgatttcctggatgaaagtgtatttgtcagcgatgctggtgtcgaggtatcacccacacccgaagatgtagccggcttcaacacatacatcgaaagctacaaggcaggtttgcctatagaagaagcagccgtcaaacttaaataattgacaaatgacagttgacaattgacaattggctgcgctattataacctgcacagtaattgtcatttgtcaattgtcaattgtcaattctattttatcctattatcatgaaaaccacctcgttcatacttgcccttattatatccatctccatcggaaaagcccagacgaaccatcaggtctcttacttttcccttcaagatgtgaagttattaagcagtccttttctgcaagctcaacagactgatttacattatatcttagctctcgacccggacagattatcagctcctttccttcgcgaagccggactgacacccaaagccccaagctataccaactgggagaatacaggactggacggtcacatcggcggacattacctttccgcactttccatgatgtatgccgccaccggagatacggcgatataccaccgtctcaactatatgctcaacgaactacaccgtgcacagcaagctgtcggcacaggatttatcggaggaacacccggtagcctccaactttggaaagaaatcaaagcaggtgacattcgtgccggaggcttcagcttaaacggcaaatgggtacccctctataatatacacaaaacgtatgccggactgcgggacgcttacctgtatgtccacagcgatctggcacgtcagatgctgattgatctcaccgactggatgattgatattacttccggtcttagcgacaaccaaatgcaggatatgctccgcagtgaacacggcggcttaaatgaaacgtttgcggatgtagcggaaataacaggcgataagaaatacctggaactggcacgccgtttctctcataaagtcattctcgacccgcttatcaaaaacgaagacaggttaaacggaatgcatgccaacacacaaattcctaaagtaatcggatacaaacgggtagccgaagtttcaaaggatgacaaagactggaatcatgcagcagaatgggatcatgcagcccgttttttctggaataccgtagtcaatcaccgttccgtgtgtatcggcgggaatagcgtacgcgaacattttcatccatcagacaacttcacgtctatgctgaatgacgttcagggaccggagacttgcaatacttacaacatgctccggctgaccaaaatgctttatcagaactccggagacgttgacaactccaacaaaccggacccacgttatgtagattattatgaacgtgcactctacaatcatatcctgtcatcacaagaaccggataaaggcggattcgtctactttactccgatgcgtcccggacattatcgggtatactcgcaaccggaaacatcgatgtggtgctgtgtcggttcaggcttggaaaatcataccaagtatggtgaatttatttatgcgcatcaacaagatacgctttacgtcaatctttttattccttcacaactgaactggaaagaacaaggcgttacattaacgcaggaaactctcttccccgatgatgaaaaagttaccttacgaatagacaaagccgctaagaagaacctgacattaatgattcgtataccggaatgggcaggaaactcaaaagggtatgaaatcaccatcaacggtaagaaacacctatctgacatacagacgggagccagtacgtacctcccaatccggcgtaagtggaagaaaggagatgttatcaccttccatctgcctatgaaggtcagcctggagcagattcccgacaagaaagattactatgctttcttatacggtcccatcgttcttgcaacttctacaggaacagaaaaccttgacggaatctatgcagacgacagccgcggcggtcacattgcccacggccggcaaacacctttgcaggaggtcccgatgctgatcgggaatcccgattctatccgccattctcttcacaaactgagcggaagcaaactagcttttagttatgatggaaacgtttatccgacacaaaagagtaaatcactggagcttattccgttcttccgcctgcataattcccgttatgccgtttatttccgccaagccagtgaagaacagttcaaaacgattcaggaagaaatggctacagccgaacagaaagcgaccgacctggcgaaccggacagttgacttggtcttccccggtgaacaacaaccggaatccgatcatagcattcaatatgaagcttccgaaaccggaacccacaaagaccgtcatttccgccgggctaaaggttggttcagctataacctgaaaataaaagaagaagcaagccagcttatgatcaccgtacggcaagaagaccgtaacaaagcagtgatcctgctgaataacgaaaaactgaccgttcatcccactgtgagcaaagccgacaaagacggttttatcagactctgttatctcctgccccgtaagttaaaagcaggaagctgcgagattctttttaagccggacggaacagaatggacctctgccgtttatgaagtacgcttactgaagtaaccgtaagaacaagagaatgatcatcgtaaaaatcaaacttctatataatcatttaaacaaattccatttatgaaagcaaaactattagtcagcacggcctttctggcagcctcggtatctctttctgcacaaaagagtgctaccatcactgtacatgccgaccaaggcaaagaaattatcccgaaggaaatctacggtcaatttgccgaacacctgggttcatgtatctacggtggtctttgggtaggcgaaaattcggatattcctaatatcaaaggataccgcacggacgtatttaatgcattaaaagacttgtctgttcctgttctccgctggccgggcggctgctttgcagacgaatatcactggatggacggtatcggtcccaaagaaaaccgcccgaagatggtgaacaacaactggggaggaacgattgaagacaacagtttcggaacacacgaatttctgaacctttgcgaaatgctgggctgcgaaccatatataagtggaaacgtaggcagcggcacggtagaagaactcgccaaatgggtggagtacatgacttccgacggtgattctccaatggcaaatctgcgtcgcaagaatggccgagacaaggcatggaaagtaaaatatctcggtgtaggaaatgaaagctggggatgcggcggcagcatgcgtcctgaatattatgccgatctgtatcgccgttattctacttattgccgtaactatgacggtaatcatctgtttaagatagccagtggtgccagtgattacgactataactggacggatgtactgatgaatcgtgtcggtcaccggatgcaaggtctatccttacactactatacagttacaggatggagcggcagcaaaggtgcggcaaccaaattcaacaaagatgatttttactggacgatgggcaaatgtcttgaagtggaagatgtcatcaaaaaacattgcgccatcatggacaaatatgataaagacaagaagattgcccttttgcttgacgaatggggcacttggtgggacgaagaaccaggaacggtcagaggtcatctgtatcagcaaaacacattgcgtgatgccttcgttgcttctttaagcctcgatgtattccacaaatataccgaccgtctgaaaatggcgaacattgctcagatagtcaacgttctgcaatctatgatcctgactaaagacaaagatatggtacttactcctacttattatatatttaagatgtacaaagtgcatcaggatgcaacctatcttccactcgacctgacttgcgagaaaatgaacgtacgcgataaccgtacagttcccatggtcagcgcaacagcttctaagaacaagaacggagtgatccatatttctctctccaacgtagatgcagacaacgcacaggaaatcacagtcaatcttccggacgtaaatgccaaaaaggcgattggagaaatcctgacttctgctaatctgactgattacaactctttcgaaaaacctaatattgtaaaaccggcttccttcaaagaggtaaaaatcaataaaggaattatgaaggtaaaactaccggctaagtcaattgttactttagagttacagtaatctaatagtaaatacttactgtattataaacaagaaggctgttaaaaagcctacaaaaaagatagctcttttggatggttaattacacataaagagctatctttgccaacattatgagaaatatgccaagtaattggcacattgacagactagcaaatctattaattattaaagatatgaacgataataaacttatgaatcgtgcagcggataacatccgtattcttgctgcttcaatggttgagaaagccaattccggtcacccgggtggcgccatgggtggtgctgactttgtaaatgtactcttctctgagtttctagtatacgatcctgaaaatccgcgttgggaaggtcgtgaccgtttcttccttgatccgggtcatatgtctccgatgctctattctacattggcattgacaggtaagttcactttggacgaactaaaagaatttcgccaatggggaagccctactccgggacatccggaagtagacatcatgcgtggtatcgaaaatacttccggtccgctgggacagggacatactttcgctgtaggtgccgctatcgcagctaaattcctgaaagcacgcttcaatgaagtaatgaatcagactatttacgcatacatttccgatggtggtattcaggaagaaatctctcagggtgccggacgcattgccggtgcattgggactggacaacctgatcatgttctacgactccaacgatattcagctttctacagaaacgaaagatgtaaccgttgaagacactgccatgaaatatgaagcatggggatggaacgtactcagcatcaatggtaatgatcctgacgaaatccgtgcagctatcaaagaagctcagacagaaaaagagcgcccgactctgattatcggtaaaaccgttatgggtaaaggcgcacgcaaagcagacggtagcagctacgaagccaactgtgctacacacggcgctccactcggtggcgacgcctatgtaaatacaatcaagaatttgggtggcgatcctgtcaatccgttcgtgattttcccggaagtagccgaactgtatgcaaagagagcagcagaattaaagaaaatcgtagctgaaagatatgcaaagaaggccaaatggaccaaagccaatccggaactggcagctaaactggaagcattcttctccggcaaagctcctaaagtagactgggctgccatcgaacaaaaagcaggtactgccactcgtgccgcttctgcaactgttctgggtgctcttgcaatgcaggtagaaaatatgatcgttgcttctgccgacctttctaactctgacaagactgacggtttcctgaagaaaactcattctttcaagaagggcgatttcagcggtgcattcttccaggccggtgtatctgaattatcaatggcttgtatctgtatcggtatgtcacttcacggtggtgtgatcgctgcttgcggtaccttcttcgtattctccgactatatgaaacctgccgtacgtatggctgctctgatggaacagcctgtgaagttcatctggactcatgatgcattccgcgtaggtgaagacggtcctactcatgaaccggtagaacaggaagctcaaatccgcctgatggagaaactgaaaaaccacaagggacacaactctatgttggtacttcgtccggctgatgcggaagaaacgactatcgcatggaaacttgccatggaaaatatgtctactccgacaggtctgatcttctcccgtcagaatatcgctaacctgcctgccggaactgattacgaacaagcagccaagggtgcttatatcgtagccggttcagacgaaaatccggatgtaatcctggtagcttcaggttccgaagtgtctactttggtagccggtacagagttgcttcgcaaggatggcgtaaaagttcgtatcgtatctgcaccatcagaaggtctgttccgcagccagtctaaggaatatcaggaatcagttcttccggctgatgccaagatattcggtcttactgccggtttgcctgtcactcttcaaggtctggtaggttgccacggcaaagtatggggattggaatctttcggtttctctgctccttacacagtattggatgaaaaacttggatttactgccgagaacgtatataatcaggtaaaagcaatgatttaatgaaaacaattggattagcatgcgaccacgccggttttgaactaaaagaatatgttcgcggctggctggaagtaaaaggctgggcttacaaagatttcggaaccaactctgccgcaagcgtagattatccggactatgcccatccgctggccctagcagtagaatcgggtgaatgttatcccggtattgcgatctgcggcagcggaaacggaatcaacatgactctgaacaagcatcagggaatacgtgctgctctttgctggaatgcagagatcgcacatctggcccgtcaacataatgacgctaatattctcgtgatgccgggacgcttcatcagcactgaggaggcggacatgatattgacagagttcttctcaacacagtttgaggggggacgccatcaaaatcgtattgataagattccggtaaaataatgcctgaaaatctataaaaataaggtggaatatttaataaatatcccaccttatttttaaaacatgaggctcaaggaatatataaccatagtctttgtcttcattttccttctatatctttctcaagttaaagccatctactataacacatctgttgaagaagattgctatatacacttatgactaagtttaccattgaacaatgtaataagacaatcctatttccaaagagggaacaattaaatgaaatttttcacgagggcgtatagacaattcacctatactggtatttttgtgaagtcctttaattttagcatacaaacaattcacacccaacctaattcccaagcgggagtcaaaagcatattcataagcaatccccatattgcctcccactgtcgaacatgttgtattataattctccaactgcgatattgttcccttacttctataattaacatatccaataccagcactcacatacataatcccatccaaaaatccagcctgccgtttaataaaagaaatctgcggagctacataatagaacgattttttttcattgattcccgatgatagcactccatcatgtttctttgtaccattactatagtcataataaaacaatccacatcctatattactgtaaggggtataagtcatcaattgtattgaagaaacaaaaggaacatcatttttattatttcctatataccaagagctgcttccatttttttgtataccagtaaaaccaatccctaacccgacatccaagatatatactcgtttatatgactcgttattagttgaaacattcagtgaatctttctgagcatacaaagagttgatactgaacatcaaagatattaatcccactagcaggcatttgttttgtttcataataagtgtgtttaataaaaagagaaaaaacgaaagctcccttaatcaatcatcattttgtttcaacccacaaaaatttgctattttcagcaatagctatcatagtttttaatcgagaaacagctgatacatctaaagatgaagcatcaatttgggcatatacttgtttagtataatcacgaacagttgatttatcatccatattcactaaaccattaatataactctctacaagctgaaattcagatactcgctgaggaaattcttgcttcattaaattcatcagttgatcaacagaagtacttttcttaaccagatccattatttccagcaatcttgtctgaagcaacaggggcatttcttctgtatatccataacttttcaattttttgttagtagaattatataaataataattagaaaaagtaccattagctattacgggatcttccctcatcatattatatattgtcttattatgatcatttccaattatttcataaggtcttaacggagcatcgtataccttccaatttgaactcaaatgccaccaatttctaggaagatcatcatctgaagccgcacaaataagtgagaatacaacagccgtaatcaagccacctctaggtgttaaacctttatttactccccaaccataaccccaagcatctcctacaagaaaacgctttattcgattccaaaagggaccacgagtctgtattttattagcattcaaggtttctataaagtctattaactcttgaatttcaacatcttgtgttttttcttgattttgttgtgtatttataacaacatcatttgagtttgaacaagaataaaaacaattcattacaagtagtaatgagacacaaaatacaatttgcttaatcgtcttcataatttcaatttttaaagtaggtactattaaagaattacattgcatcatttttctatttgccattataccaaaagagaactatatgatactaatttaacaccaaatatattcgttatttttgtaacgtccaacttattatcgcataaagtgtaataatttcatcctctccagtacattatccgccgagatattttatataatatgccattaagatcaatgaaatgttcagtctaaaatccttcacttacgttgattctagtgcgtaaaatatcatagatacaattatgacacatagttttttataataatcatctattttttatgcaaacttcaagattacaaaagaacaataatatcgtcttactatatgacgaagttaaaaaacagaagttatgggtaaactgaatatgaaagactggatcggtcagacgatcctaaataaaaaggtcatttccattcctatcatgacacatccgggcatcgagcttatcggaaagacggttcatgatgcagtaacgaacggacaggtgcattatgaagcaatcaaagcgctctgcgacaaatatcctgctgctgccgcaacggttatcatggatttaacggtagaggcggaagcattcggagccgaaattatatttccggagaatgaagtaccaagcgtatccggtcgtttgcttgcagacgaagctgccattgatgccttggaaataccagcactgaataaaggaaggatcgcgcaatatctcaaagcgaatatgctgactgcaaagaatatcacagaccgtccggtgctggctggttgtatcggtccttattcattagcgggacgcttgtatgatatgtccgaaatcatgatgctgatttatatcaatcccgaagcagccaacactttgctccacaaatgtaccgatttcattattcgatactgcatggccctgaaagcgaccggagtgaatggagtggtaatggcggaacctgctgccggattattatccaatgaagattgcctgcagtattcttctgtattcgtaaaagaaatagttgagaaggttcaggatgatcatttcaccgttgtacttcataattgcgggaatacaggaaattgcacccaggctatggtatatacgggtgcggcagcctatcatttcggaaataaaatcaacatggaagaagcattgaaagaagttcctgccgatgctcttgcgatgggtaatcttgatccggtcagtcttttcaagatgtcgagtccggaggaaatgaaaaaagcgactctacagttattggaagccactgccgcatatccgaacttcgttctgtcgagcggttgcgatataccgccatatacgccattagctaatataaatgctttttatacagcattggaagagttcaatgaaactcgaaattaggctgtcattcagataatgtcaattaataatgattgagcaagaactcacttatcaagacttacgaatcccatcgtccgaaatttatgaagcaatgggatacaaagattctataccggatcagatggtaatagatgagactaatacgttgctaaaacgggttattcccctgcttcgccctcggttcgcattcttctttatggaaggtacacttgatatcgaaaaagagactcttagcgtacaaagcatccatccacccactgtcaatcctatacaagacaccattcccacacggagccctgagcaaaacactttttctacacaaagtaaaagtaccgttttctctgttggtaaaaccatcgcccgtcaattaagaggatcggaagcgtttgccttttttgcagctactgccggaactgagtttgaggtatttcagcatacgttgcaacaagaaggagatatggtcaaaatatacatagcagactcgttagggagtattattgcagaaaagacggctgattgcatggaagtcgctttggctgaatatatacgggagaagaactggaaacataccaaccgatacagtccaggatactgtggatggcacgtttcggaacaacaaaaactgttcccattgttccccatagctgctcccggtggcatccggttgacagattccagcctcatggtccccatcaaatcagttagtggtgttatcggaacaggcactaatgtccgcaagcttgaatacacttgcggactgtgcacctatgaaaactgttatcgcaaaagaaaacacagataaatttgcgattgggggctgactaaaagtcggtagtaccaccattctcctccttcgggaaggaggagacttaagatactatcgactttttagtcagctttatatcttctttaatggccattaaagaagatataaagccctatcatagttacgataagcaacccccataagataagtacaatgcgggcaggcttttcttcgatcttctccatattcaatattgccgtctgaggagtcttatccaatagaccgacaactaccatccctatcccgataataacgaacagatagaaggataataacataaaatgaggccatgcagaatattgatccgcaggaaatacccatagatacaatacacctactcctatactgaataccgtccccactgtcagggcagcgttagcagccaacgtagtcgtacgcttccagaaaacgccaaaaaggaaaactgccgccataggaggtgcaatgaatcccaatacagactggaaaacattgaataaattcagtccgtgaatgctgtcaatggcaatcgttatgattaccgatatcagagcaccggctaccgtcaccacttgtccgacccggatgatctccttctgcttcgcctgcgggcgaatcttcttcacataaatatccattgtaaacacggtactcaaagcattcaatgccgatccgatagtactgacaagcgcggcagtcaacacagccaacaccagccccaccatcccgacaggaaacaaatgggttaccatcgtcatatacgcctcatcgggattctccaactgcggaaacaaggccagacagatgatacccggaagaatataaagaggaacatccagtattttgagccatccggtaaagttcgttcccaactgtccttctttcagacttttggctgccaacacaggctgtaccatcgactgatccgtacaccagaaccatactcccatcacaggatatcccaaaataatcggcaaccaagggaaagcggtatcatcattcggtctgaacagattccagaagtctgccggaacggcatctgtcagagccgatataccaccaactttatagattcctacaatagccaacgcagccgaaacaagaatcaacaggatcatctgataaacattcgtgtaggcaaccgctttcaatcctccgagcatcgtaaagaatgcggatatgatcagcaatatcaaagcggactgccacatcggtatatcgaatacctgacgaatcagaacgccacccgcaaacaatgtcaatgctagccaggaaatcaagattgtaacaatcgtataccatgccaagatattacgggtagactgtccgaaccgctttcccataaactccggcaaggtggaaacacgagaacccaagtaacggggagcgaaaacaaaagcaagcaggcatataaaaacgaaggcataccaggcataattgcccgaaacgatgccggtagtaaatccggcgctggcagaagctatcaacatagacggccccacattagtcccccacatggagaatccgatgtggtgccatctcaaagaatgttccgccaaaaagagactgctccccttctttcgtttggaacttgcccatataccaatggcgataagaatcagaaaataggcaatcagaatgccccaatccagtgtgtctaagaatttcgcgtgcataattcaagtattaacaattaaaatattcttaatctcttttccccatcagcactttggcgaccgccacggcagtattagcattatcactatacccgtcagcaccgatttcatcggcaaatccctgactcacgggtgctcctccgatcatcactttcacctgatcgcggatccccgcctcttccaatgcccggatcacatcctgcatataagtcatagtggtagtcagcaaggcactcatacataaaatgtccgctttgttttccttcaccgcttcaacaaacttgtcgcaagtaacatcaataccgatattaatcacttcgaagccacaaccttccagcatggaagccacgaggttctttccaatgtcatgcaaatctccttttacagtaccgatcacaattttcccgatagtagcagatgcattccccgccagtaaaggtttcaaaagttccaaagctcctttcattgcacgccccgccatgaggagctgggggacaaaggccttgccgtcctgaaagcgctggccgacttcgcccatagccgtaatcatatagccgttgataatatcctgcggaagcactccggcagcaatggcatcctttgtaacttcaacagccggttccagttttccggctacaatggcatcatacaaaggtttcatccgatcctcttcctgagacttttcttctctgatccgaatactttcctgtgcattatcctgttctccaacgggttgattcgtgtgaacatctgcagacacagacgaagaagagccggtatattcctcaatgattctcattgcctgctccacttccctctcattgtggaaatccatttccagatgcactccgtctgccccgatatggtccaacaaaggtttcagttcctccagagtcacccagcaagccattacgctcttgcctcctgccaatatcttcttatataaatcgtaccacttcggagaacctccctgcggctcgccgacaccgggcgtccattggatggcattcagttcttcaatctccagcaaggcgggaagatgatgcatcgctcccactccatcaagatgatagagcgtataatcgattttctgacattgctcacgaataaacggctgcacaaaacgacgataatcatcctgactgatcatggtagaaatatcgctctgcaacttactcatcttgcccggagcccatgaagagaaatagcagaatgccatttcatccccttcacggataatgtcgtagagttcatcaaagactttaaaatagatgtcattgatctgctgcatctgttgctccagcacttcgggttgcatcaccgtatccagcaataccatatccgtacctttcaaagctgccaatacatccagtccttccatcaggtcgggcataccaacaaagtagtttccgttggctttagccttacaggctttcagaagttctttatgcaagagccagttcggatgttcgggattgaatacgatctcatcattaaagttcggatcgggatgtatccagatcgtatcttcgcctccttcaaatactccgcccagaatagcagccagcgagccgggacccaactgagtatttgcaacaggcagcatatccgccatcagactactgtgagcgacataccaatccagatattccgcccgccattgagggtcgaaccacttctgcgacaaatcccttgccggagcaggtggagcaatgtcggcgtgcggtttcacgccttcctgaaagtgttcccacatagaaagaataattcctttatgattccaccaatttatataacgctgtttcgtttcttctaagtttgttttccaagttttcatcgctattctttatttagtccaaaatcctttgtaattatgatctatgcgcaaggcaatacttttgcttaaatccatctcgtccgtacaattcacttcctccggataaatcgggataacggcattctcacgcacataaacaggcatctcttccaagggcacatacacctctttcagccagcgtccgccttgcaaccgttcgccggtaaagaaattcacccactgtccttcggggagataaatgtcgcgacggttttcgctattcatcaccggagctaccaggaaatcattgccgaagtaatattcgtcatcgatatgccagcagagtttatcttccggatgatgcaggatgagtgcctgtaacaatggccagccactttctactgccagtttactttgctctatgatgtagggaatcaacgagtaacgcagtttccaccacttcttcaccagcggggcgatagccggataatgccagggttcccgcttattggttccatgataacggatatgtgaggtgaacactccaaactgggtccagcgcatatagacgtcatccgctacgattgagttcataaaattgggcaaggtatggaatccggggacatcatggctccagaaggcaaagcccgataaaccgaagtgcaggcctcctttgagtgaaccggccatgccatcccatgaactgcaggagtcacctccccagtgcaacggataacgctggcaacccgcccaagcggcacgtgcccagacaatgccgtcccctgttacctcctttgttatttcgtaagctgctttctgatagagcaaggcatacaggttattcaacagttccggtttcatgcccttgtagacagcatccatgtggatattttctccgaaatcggttttaatacaggtgactcccatatccagaagttgctttaatagccccttgtaccattcggttgccttcggataagtaaagtcgatagtacccgcataatccagagccgagaagttggaaccgtccgtgtcctgctgcttcgtcagaggagctatatactcattcgcctttgcctcttcgatctgttccgcatcttcagcaacataaggtaactgccataaggacacacgataaccgttcttcttcaatctctgaatgaatcctttcgggtcgggaaaacgttcctcgttaaacttccattcacacagccagtcggttctgaaccatccggtatccagatggatgacatcgcagggataatgttcggcacgcatacggtcgcagatctcatttacttcgtcggcactgaaataagtcatccggctcatccacactccgaaactccagagaggaggcatcgaaggatatccggtcaggtcacggtagccgcgaagtatctcttccatcgtatcgccggcaatgacaaatgcatccagcatagcctgatcgctcaggaactgtacggagcgggtggaatgtcccgccagcgaaagtttgctgtgggcgcaggtatggtaaaaagtcccgtacatccggctggagagatagaaaggtatattcttataggtacgccggttgtttactccctgcccgtcctggttcttgaggaaaagcgtctgtccgctcaagtccattttgaagaaacgctctccggttcctgcaaagcattcatccggccggctctcgaaagaaagggtggcacgttcctttttgcccgtccgtttgcagaaggcaatgggcagtccgtcatagcggggaggcgagaaatgatcgtatgctgccaggcggatttcccgtttgccgtcaggatacagagtgatgtccagtgtttcctgaggatcgggcagtaactcgctccatcggtccaaagccggctcttctacattgatagcggcacgcttcgtcccgtcttgggtgaaaagaatccatttgcctccctgcttctctacagacaaaggtactctgcgaatccgttcgctgaattgcagcatttccgactgatctgtcagttcatattcaccaaatccaagaaacagacgggtaatgccgatattatactggcgtatgatcaacgtatattcttctcgggggacagccgtatccgcaaccatatcattagctaacagctgtttttgaaaggggaccgtgacacagatatccccatccttttcgtaaacggctgtcggtttacaggctttccaaagtgactcatcccttaataactctgtatcgaaatcaaggaaatcgaacaaatggtaattagtaggtttcatttatgatctattattattagttttatctttatttatctatactcatgcagacttcacaagtctctatggccccactttttgcacagcccgacactgcgataggctcagtgtcggactgtacttactccggttttatccttccggccttattcttaatgctttctgtcacttgtggtccgttatttttccatacattccgattgccgggacgattcgagtcgaaacgttcagtcggacaccagttgttttcaatcgtatatccgtccgtagcttcatccaaataaatataaaaggccctgtcattggtggcgtaaggtgcttcttcgagatgttcgatccgattattccgcatcacggagcccggttggttggaaagcgtataaagtcctccggcatcatacagacgacgggcaaagtgatgtacgtagttggcttctatccggttgtttttcattccgctttccagcgatgtccacccccagccgacacaaatacccgaataattcaagtgacagacttcattatgggaaatgtcgataccgctgacgtatcccgcaccgatccccacgcacccccagtcttcattggtcacatcggtgatcagattatttttaatggtaatgtccgtgcataggttacgttcttccggagggatgaaaggcacatgcgtctcaaaacctccgtcggggaatgcaccaatcagtatgcctgtaccgccgatatccgaaaagacacaattctctatgccggaagatgaaacagcccattcataatccagtccggtagatgccagatgccggaacctgcagcgactgaacgtaagatgctcagtaccccgtacacgtattgccgtttcggggcgtgcaatccacgcctggttctccagttccgctttctccggaagtcccggttcatgcagtttataagcatccagcagaggaaaacctccttgcaaagtgacatgtccctgataggaaggacgcatccatgaagtatgggcaaaggtgattccttccactcgaatatgccgcaccgggcgttccaatgtgccgtctacaatcatcaatgtttccagagcaggaacgatcacttcggcagtctccatatcttcttccgagcggggataatagtagattgtccccgacggatattcctgaaaccactctccgggttggtccagcagttccagagcattcgtcaggcaaaaggaagagttgcctttctctcccccgatgacgggctgaggccacggatgggcaaactccagatgactctccggttcgtgaaagcgaatgacggcctgttctcccctaacgtctatactcttcacacgcagaatggcaatcgcccaacgttgatgaactatcatttccagtcgacgggcattgaggaggtttccgatctgagaagcagggattattatcgtctgttcttccggattgaaatcaatcatccgttccatcactccatcaggaaactgtgccgctcgctgggccttgttgccgtctacccacatctggcgggtttctacgattctatttccaaaggatggcgcctttgccacccatatttttgatcttaattcctttgtaatccgaggatcatcacatcccttcttccatccggtcactgccactccgccactgatgacaggatgcgcattctccaccgcacggatgagtgtcggagaatcgggcgtgccgctatcctccggtcggataaacaaaggagcggactgtgcataaaccccgtcttccaaacagatacaaattcctccggccgcctcgggacgattcagccttctccattcacgagcctgcttgatggcgcgattcaaggtaagataaggagcttctttggtacctgcattcctgtcactcccatgcggagaaacataaacctcgcctgcgacgagaacggaaaataaacctaaagaagccataaaaagaagaacaacgattgtctttttcatggtacaaactcaatgtgctattatagttaggacgggcatacatcaatttagtactcgaataggatgaaaataataaaaatgccattgctacaattggagtactttcagtattcagactattcagttttactcgcaaacgacttgatagaaggggatagcggctgaaggcactattttgtaccctgtctttaggagcttctaaacggtgcaagtggcttcagtcctttcatcctcaataataaatccatagttaattggttatagctctttgcatgcaagttgtagctactccgcatgcgaggtgaattttataagctcggcgctaaacgtcactcagtaccgaggcgaagggtactcaacaccgagggtaagattggtgggataccggcttacttcaaatcaataaactaaccaatagttcagataaaaaacagaaggtctgtttacctcaaacagagcctgtgtttattccaaacagaacctttgtttgagataaacacaggctctattaagtcagtaactaccgacgttcgaatggattatttttcaggctgaagggactgaagccacttgcaccgttcagaagctcctaaagacagggtataaaatgcccccttcagccgctatccccttctgactgggcatttgcggacaaggctgaaaggactgaatacggaatgtcgtttctttgttggcgaggtcgagttttgcccctttttgttccgaaaagaagcaaaaacttataattcaaatccgtacaaaacgaattctatgatcgaataaacccgactataaactgataacagaaatagccacaaactacaaatttcaggaatgttcccagtagaaatccaatcaatgatcctacccccgatctaagtgcttgagaaaactctttattccctagcaattcgccaataactgctcccaagaacggaccgaaaatcactccccaaggcaggaaaagaaggccgataagggtcccgatgatacatccccaattgccccatctgctaccaccgctatacttgctgccaagcataggggtgaagtagtccaagacttgcacgacaagaacaatcagcagccatacaataagttgtgtggtagtgtattgaaccttatccgtaaaatgaagaaggaccaatcccaaataagcaacgggaggaccgggcagaaagggaagaatacaccccatcagtccggtaatgaggcatagcacccctagtataatcagaataatatctaacatcgttttatttcatttgaaagacgtactttatatccggtggcaatttaagcaaataaaccgaatcctccaaaaaacaatcagtaacgccgggaaggagtataatcaattctataaatacgatcgaagaaaggactccattcattctccgcaatcccaagttgcagaccgtagaaatgcgtatccacttttctatattccagcatcttgtcagtcagttccggcacggataaaggtatcttaaaatcactgatccataacacatccgcattcatatactccttttttgattgaagcaaccggaagatagcttgcagcattcgggtagcatccgtatctccacaagaggtggtggagaaaaattcaagcagccgcgccctctctctccgcacatcaatcggattgatggatacagaaaaggcaatcaggaaacagtcccgacgttgcctgtcagctatttccaatattttaatcagcagcgaatatgcaatcttttccggtttcccgaccatgcttccggaagtgtccagacagactatcatcggtcctttctgcgtagcaggctttatttccagtcgccgtgccggttgcatgatctcggatttatagcggaaggtctgaagttttcgggtaacatatttatagacaaacaagtcttccagctcatcatcggcacaatgcgccagttctgtaggaagcaatgcgttcaggtcattccctactgtgatacccaaaatgtcacttttagaagaatgctccatcttatatacattcccctgcgcgacatgtagctgctcctgtccttcatcgtcagccatacgccccatcttattggcaaccttgaccacttccggatattctttctgaatgcggacaattttgcgtatccgctcaaaatccaccgtattccacataccgctcatcaagccccaagcctgatagaactcgtctttctctatgttattttgccggatatatccggggatattcctgagattggcatgaagtctgcgttcgaaatcatctttgcgctgttctatctccttttccttttgctcctgcaaatcccgttggaaagcctctttccagtcgtccaccatcctctcccagacttcctcatccgcatatttcccttcattgccgaactgcccctgataaaatgccttgtcgaaaccattaccctcatgtttgtcggcaacctcctgtagtaaagcctgccacccgtctttccgcttggtctcggaccattccagcacaagttccattccttgctgttccgactggcttttctgcatattgtacttttgcttttccagattcagacggataaactggctcattgcatcgtaaaagattcgggcacaaagttcatcactcaggacttgtatctttatcatcggatcgttcatgacggaaagcaggtaagcgtacagcggttcgttatccgcctccgcacactctccggtcgctacatacttatccagcacctgcacataaaatgcagcatcatatctaagactcatcgccgtatctcagtttacggacatccacacgtgcccatgcaatctctttacgaagggtcgccacatattgtgccaccccttttttatcttcttcggaaataaaaatattctcagacaagtcttttactaatttctcaatccggtcatgggctgtctccaactccgtctcataatcccggtcggtgagagtcatattgcccagccacaactgctgttgctctcccctcttcagccgacgcatcggaaagcggacaccattgatataaagattcttctcatccctgtaaagtgtcaccctttcggcaccttgttccttcattttggtggcatccgaaaaagtacgtataatcgttcgcttcggattcagcggatcggcatacatgactcctgtcgcaggaacatccttcggactgtattctttcagattcttataatccacaataaatatgtaggtatttcccgtaccatgattctctatctgatagtagaaatgatcgatgatcatcaaatcatcgtccctgcggtcacctttctgacgggctttctccaatgcttcacgcacgcggctcactttcaggtccgactttaatgataagttgatagcggctatctccttcacataaggaacaaacagcgcacggacaacgatctgccggatatccgcacactcttccggttcattccacaagcagtggtaaacaggtaataaatctgtcagacagacttccttccgaccatgaatgaaagcagaagctttcagcagcttcacgatattcttccagcgacggtcgctcacatagacattccgatgtacttccgagccttgaatctcgactttctccaggttcttacggatttctgtgatgcaggacaggacttcggcagataccttgatctgccgtatctctttctgccatccagcatattcctcatccgaaatctgccaccgacatgcttcctgttcttcttcgtcatcatcgtccagcaacatttgatagaacgcttcctcctgtttcacgcaagtgctgataatgcgaatcaagaaacggtcccacaaggcttccagtccttctccctgcgtaggcagctcattactggcagccaccagcagcttcaacggaagtttcagttccgtatctccgttccgaaacagcttttcattgatgactgtcagcaacgtattctgaatagccggaccggctttccatatttcatccagaaacacgacatccgctgtaggcagatacccatccacagcacgctcgtatttatccgattccttcagacggctgatgctcaccggaccaaagatctcatcaggtgtggagaaacgagacatcaggtattcaaatgcccttgcatctacaaaagctctcttcaaccgacgggccaccatcgactttgccaccccaggaggtcccagcaacaaaatactttcgcccgccaaagcagccagcaaagacaaaccgatttcagcctctttctcatatacccccctgttcatttcggacagcagcaactgtatacgttcttttatttccatattattctttgattctgcacataaataaagatgttattcaccttaccgcctatgcattgtttgcagataaacggcttgcaaatatacggttttacctgtcattaacataaatacatcttctctaattctgtcttttatactcaagaattatcttaaggcatatttaatattgattatttattcacccaatatgcaataaaaacaaaaggaggtaaatttcctttctcattttcccccatttacataaataaaaactatctttgcgattcagaatcccgaaagacgaaagaaaatggagcaaatagacaacctaaaagagcttatcaatcaaggggatgtggacatagcaatcaagcaactggaccaacttctccaagacgattctgtcgagaaagataaagatatgctctactatttacggggaaatgcctaccgaaaaaaaggagattggaagcaggcgctggataactaccagtatgctatcgatcttaatcccgacagccccgctgttcaagccagaacaatggcgatagatatcctgaatttctaccacaaagatatgtataatcaataaccgaattcaaagataacgtaataaaatagagattatggcaaaaattaaaggagcaatcgtagtcgacacggagcgttgcaaaggatgcaacctatgtgtagtagcgtgtccgctcgatgtaatcgccctcaacaaagaggtgaatatgaaaggctataactatgcctggcaagtaaaagaagatacctgcaacggatgcagctcgtgtgcaatggtttgtcccgacggatgtatctcagtgtataaagtaaaagtagaataaaagaaaaagaatatggcagaagaagttgtattaatgaaaggaaacgaagccatcgcccacgcagctatccgttgcggtgcggacggatacttcggatatcctattactccccaatcggaagtactggaaacgcttgccgaactgaaaccgtgggaaacaaccggcatggtagttctccaggcagaaagtgaagtggcagctatcaatatggtatatggaggcgcaggtagtggaaagatggtattgacctcttcctcaagtcccggcgtgagtctgaaacaggaaggtatctcctacatcgcaggtgccgaacttccttgtctgattgtaaacgtaatgcgcggcggccccggattgggaaccatccagccgagtcaggcggactacttccagacagtgaaaggaggcggtcacggtgactacagactgattgcccttgctccggcatccgtacaggaaatggcggatttcgttgcactcggattcgagcttgctttcaaataccgtaacccggctatcatccttgccgacggtgtaatcggacagatgatggaaaaagtagttcttcctgcacagaagccacgccgcaccgatgcagaagttatcgaacaatgtccgtgggctgctaccggaaaagcgaaaggtcgtaaaccgaatattattacttcactcgaactgaagccggaagcaatggaaatcaacaacatccgtttccaggctaaatacaaacagattgaggaaaacgaagtacgcttcgaagaaatcaactgcgaagatgcagaatatctgatcatagctttcggttccatggcacgtatcggtcagaaagcaatggaactcgcccgcgaaaaaggaatcaaagtaggtattcttcgccccatcactttgtggccgttcccgaccaaagccattgccgcttacgctgacaaagtgaaaggtatgctcgttacagaattgaatgccggacagatgattgaagatgtccgtctggctgtcaatggtaaagtaaaagtagaacatttcggacgtctcggcggtattgttcccgatccggatgaaattgtaactgctctggaagaaaaaataatcaaataacgaaacgacgatgaatcccgataaaataagaaacgtattgaacatccttttcatgatattggcacttgccgctatcattgtctactttgtagtaggaaaggaagattttaaaatgtttatctacgtatgcggcgcggcaatctttgtcaagctgatggagttttttatacggttcaccaacagataaggagaagaagttatgactaaagaagaaataatcaaacctgagaatctggtttataaaaaaccgactctgatgaatgataatgccatgcactactgcccgggttgcagtcacggcgtggtacacaagctcgttgccgaagtcattgaggaaatgggcatggaagaaaaaacggtgggagtctctccggtaggatgcgcagttttcgcctacaactatctggatatagactggcaggaagccgctcacggacgtgcacctgcagtagctacggctatcaaacgcttatggcccgaccgtctcgttttcacttatcagggtgacggtgacttggcctgtatcggtaccgctgaaacaatccacgcactgaaccgtggcgaaaacattaccattatctttatcaataacgctatctacggtatgaccggtggacaaatggctccgacgactctggtaggcatgaagagttctacttgtccttacggacgtgatgtcgaactacacggctatccattgaagattaccgagattgccgcccaactggaaggaactgcttatgttacgcgtcagtcggtacaatcagtgcccgccatccgcaaagccaagaaagcaatacgcaaggcattcgaaaattcgatgaacggcaaaggttccaatctggtagaaatcgtatcaacttgtagctccggctggaagatgactccggaaaaatcaaataaatggatggaggaacatatgttcccattctatccgctgggtgatttaaaagataaagaataacgcaaaagtcaacagaacaatgaaagaagaaataattattgctggattcggtggacaaggcgtattgtccatgggtaagattctggcttattccggactgatggaaggaaaagaagtgagctggatgccggcatacggtcctgaacaacgaggcggaacagccaatgtgacagtgattgtcagcgatgacaaaatctcttcaccgatcctgagtaaatatgatacggcgatcatactgaaccagccttcactggaaaagtttgaaagcagagtaaagtcgggcggtatcctgatctatgacggatatgggattatcaaccctcctacccgcaaggatatcaaagtatatcgcatcgacgcaatggatgctgccaacgaaatgaataatgcgaaagccttcaatatgatcgtacttggcggtttactgcaactccgtcctatcgtaactctggaaaacgtcatcaaaggattgaagaaaactcttccggaacgccatcaccacttgattcctatgaacgaggaagcgatcaaaaaaggaatggaattaatccacgaagtttaataaattaagagtttaaaattgagaattgagaattatttgctagataatagcgcgatgcaacataattttcaattctcaattctcaattctcaatttaagtaagtatctttgcctccaattatgagacgaatcttactattatatatattattctccgttgtaggactgagtgctatccatgcacagctcaaccctgcccgccaacaaatcgacgagaacggacgcgaccaatatggtaatcaggtagaccctgccatgattccggacaaactggatagtgccaatgttgaagtacagggattgccacctacactctacatgtggcgcattaaaaatcaattgggcgaccggacaatgattccggcagatacaacttatcatcactttcagaatacgaatcttacagaaggaatcaccggacattataattatctggccaacctaggttcaccgcgtctgtcgcgtatcttctttgagcgtcgttatccggagccaaccatctttatggagcctttctccagctttttcattcgcccgacggaatttaactttacgaatagtaatgttccttatactaacctgacctatcacaaggccggaaataagcaaaatggagaagaacgtttcaaatcttatttttcagtcaatgtaaacaagaagctggctttcggctttaatattgattatctgtatggccgaggctactataataatcaaaacacttcttattttaatgccgcgcttttcggtagttacattggcgaccgctatcaggtgcagggaatctatagcaacaactatctgaaaacgaatgagaacggtggtatcactgacgaccgatacattaccgcaccggaagaaatggcagaaggaagaaaagaatatgaatctgtcaatatccctaccgtactcaatgccagtgccaaccgtaaccatgacttctatgtctttctgacacaacgctataatctgggattccaccgggatattccacaggcagaaaatgatacgatgcctgccaaacaggaatttgttccggtcaccagctttatacataccattcaggtagaacgttcgcgccataatttccgttcggatgataatgtagaaaactattacaagcaaactctccttgacaaagagaatacattcgtcagagacagtactgtctatatcggagtcaagaataccataggtattgctttgctcgaaggcttcaacaaatatgcaaaagccggattgacagcctttgcctcacataagctgagcaaatattcattaatgagcctagacccgctaaagcaggataaatacaatgagacagaaatctatatcggtggcgaactgactaaaaaacagggaaactttcttcattatcatgcaatcggtgaagtgggaatggcaggaaaggctatcggacagtttgatgtcaaaggagatatcgacttaaatatccctttatggaaagataccgtcagtgtgattgcacgcggagaaatcagtaataaacttgctccattctacatgcgtcattaccactccaaacatttttggtgggatgatgatatggataaggaattccgcacccgtatcgaaggcgagctgagcatagctaattgggggacccgcttaagagccggtgttgaaaatataaagaactatacttatttcaaccagcaggcattaccggaacaaaaaggtggtagcttgcaagtagtatcagcttgcttcaatcaggatttcaaagtgggaatcttccatctggacaatgaagtgatctggcagaaatccagtgatcaggctgtacttccattgccggaactttcgctgtatcataacttctatatgcagttcaagctggcgaaaaaagtattgagtgtacaattaggtgctgatgtacgttacttcactaaatatgatgctccggcctatatgcctgctacacagcagttctacctgcaaccggaagaaggtaaagtagagataggcggttatccgatagtgaatgtttatgctaacttacatttgaaacgtacccgtttctatgtgatgatgtatcacgtcaatcagggaatgagcaaacctaattacttcctggcacctcattaccccattaacccacgtgtgctgaaattcggactttcatggaacttctatgattaacaaaacctctatggcttatgaaaacgcgcccgaaattgagactattcagatatctgttgccggtagtcattgtattggcacttatcttctctgtccgctattgcggtaaacaagaaaaacctctggggcatccgcgtgattacgcagccatcgccaaagaaggcatcctgcatgtagccaccgaatataattcaatcagtttttatgtagacagtgacactgtctccggattccattatgaactgatagaagcgttcgcacgtgacaaggggctgaaaactgaaatcactcctgtcatgagcttcgacgaacggctgagaggattaagcgacggacgctacgatgtcatagcatacggaatactggcaaccagcgaactgaaagattctctgcttctcacctcccccatcatactcaacaagcaggtgctggtgcaacgaaaagcgaacggggagaatgattcactttatatccgaaaccaattggaccttgcccaaaagacacttcatgtggtaaaaggctcgccttctattctacgtattcagaatctgggaaatgaaatcggagatactatttatataaaggaaatagagaaatacggttcagagcagttgatttcgttagttgctcatggagatatcgattatgccgtctgtgatgaaagcattgcccgtgcagtggcagattcattgcctcaggtagatatcaataccgcaatcagttttactcaattctactcatgggcagtcagcaagcaatcacccgcattgctcgatagtttgaatacatggctggataaattccaaaaagaaaaagagtatcaaaagatttaccggaaatactatggtgataaatagataaaaaataatacgccgaagacttgactttcgcatttgaatgtcgtatctttgtcaacgtaatcataaagtagtttcagttaaactacacgtaaaggagggaatcacagttccctcctttctttttgttacaatgaatgaaaatcagcctttttcccagctttttgctcattttacccccgagcttagtccgttttacctcgtttgttaccatacttaacatagtatcttatgactaattagatgctttgttatgattaatcagatgctttgttatccataaaccgatgctttgttatcccaaaacagaagctctgtttccggacagctcccaagagttaacaatcaataaagttgctcttgacaaaaatttgctctacttttgaaaaaaattcccttttcgatgtcacgtttttaatccgccaccgtcttatcagtgtaaatggaactgaaacaatttaaaataaccgttgtaccccttcgagacaagctgctgaactacgcccgaaggatgacagatgatccttcggatgcggaagatgccgtacaggaagtcatgctgaagctgtggaatctgcgccagaagctagacgagtacagaagtatcgaagccgtagccatgaccatgacgcatcatctctgcatggatatgtggcgtgccaaacgaccggacactctatcactcgaccgtgtacaggctcccaccccttcggctactccggagcgactgctggaagagaaagatgagttcagattgatgcgggaaattatcgactccctgcctacgctgcaacgaacgattatccgcatgaaagacatcgaagagtacgagacggaagagattgccgaaatcaccggctgcaacgcagaagctatccgcagtaatctgtcgagggcccgcaagaaagtaagggaagtctatttgcaaacgatacaagaacgaaaaaggaggaacaaagcatgaaagatatagaaaccttgctaaacaaatatttcgaaggagaaaccacttgcgaagaagaacgcagactacgacgtttctttgccgaagggctcgtaccggaacatctggaggtatatcgcccgatgttcgctttcttcgaagcggaacagaaggaacttgcggaaatctccggtaaaggtaatgccgccgagatgccggaactcgccccattcgagaaaaagacaaaaacggtcagacagtatctgacttacagtctcagtgctgccgctgccgccatcctgctactggtgggcatctccggtatctaccgtcatctatcccctgcaccggccaactatgtgatcattgacggtaaggaatatacggacgttcatttaatccgtgaacaggcgatggtcgcctttcgtgacgtcagcctcagcgaggaggaagtattcgctactttatttgatgaataatataaaaacagcatataattatgatgaataaaatcattcgtaccacactaatcaccctgttacttacattcgccgcccatgcggccgcccaacagggactacagattgccaccgtcttccagaagtacggaaagcaaaaaggggtaactatggtagagctatccaatgaaatgctggaaacttaccagatgactctttataaaagtcttgttttcaaggatgccagcgatgcactacctacgattctccgttgcctggaagccgacaagaagaaagcaaagaaggtgaaagaagtggtttccaacgggcaaatcaagtccggctattaccaacttccccagcttaaggaagatgtgaaccgctttatcctcttcaaaaccggaaagaaagattcggctacccttatctatattgaaggagaactggatgccgacgacctgatcaccatgttattcatgaagaaagaataaaaaaacagataaagaaatacgaatatgaaaaaactattattactatggctcatgatagctccaatgagcggcatggcacaaaatgaaagtacaccgcaggatacaacactttacgtcaacggacggaagatcgtaatcaaggaacaaggcgacaagattaaagtgaaactctacgaaagcgcatccggcggagatacgataacaaacgcgcaaatcttcgaaggagtctacctgaacgggcagagtacggaaagccgtaccgtgctgagcgctctccccttctcgaaaaaaaacaacaagagaaacaggttcgagccacatgccggcggattctacatcggctacacccgactgtccaatgacttcctctcattcaatccgtcgaacggtgccgacctcaacaccagtcattcatgggagataggcggcaatctgtttaccggttcgcacgcctttgcacctacctataactgggggatcaccatcggactaggatggggataccgcagtatgcgcctggacggcaattatgcttttcgtgaaatagacggagtgactgaaatttactccggcatggaggcagaagaacctacagagtacagcaaaagccgtctgcgctatttctacttccgcattccgctctctatcgaatggcaaacacggctcaacggcaaaggtcctttgttttttgctgtaggtcccgaagccgaaatacgtcacggattcagatccaaagccaaagtcaacggatcgaagaagacgattgacaagggactgaacgggcgcccgctaggtatcaacttacttgcacaagccggttatgcagatttaggagtgtatatgcgttactccacctacggcctctttgagaagaacaaaggtcccgaactttatccgttctctttcggtgtatgctggtactggtaaagtaaatactcagacccttgcctatttctgacagttaacaatcaataaagttgttcttaataaaaaatagctttatctttgggagttgttaaaacaagcacaataggtatattatgagtgaaaagatgattaaatggggcttcatcggctgcggagaagtaaccaaaaccaaaagtggccccgcctttcaaaaggtagaacattctgaagtagtagctgtaatgagccgcgacggcgccaaagcaaaggcttatgcaaaagaaagaggaatcagaaaatggtatgatgacgctcaggaactgatagacgatccggaagtaaatgccatttatatcgccactcctccttcttcacacgctacatacgccattatggctatgaaagcaggcaagcctgcctatattgaaaaaccaatggctgtcacttatgaggagtgtacacgtatcaaccgtatttctaaggaaacgggtgttccctgtttcgtcgcatattaccgccgctatctcccctactttcagaaagtgaaagaaatggtagagaacggttctatcggtaatgtcatcaacgtacaagtccgctttgcacagccgccacgtgatttggattacaaccgtgaaaatcttccttggcgtgtacaggctgatattgccggtggcggttacttctatgacctcgccccgcatcagatcgacttgctgcaagatatgttcggctgcatcctcgaagccagcggatataagagcaatcgtggagggctttatcctgccgaagatacgctgagcgcctgcttccagttcgacaacggattggtcggcagtggttcatggtgctttgttgcccatgattccgcccgcgaagaccgcatcgaaattatcggagataaaggtatgatctgcttctctgtctttacgtacgagccgattggtctgcacaccgaacgcggccgggaggaaatctgtatcggtaatcctgagcatgttcaacaacctcttattcaggcagtagtagatcatctgctcggtaagtcagtctgctcatgcgacggagaaagtgctaccttgactaactgggtaatggacaaaatattagggaagctctaagataatgctccctcgtttgtttcttaaaataatttaatcactttattctatcgttagttttctttatatttgcgaaaggtagcaataaaagcaaaactaacgatatttattttttataactatgaccaaagaagaactaatgaggaaagcaatagagctttcgaaggaaaatgttgctaatggtggaggcccgttcggagctgtcattgcaacaaaagaaggagaaattatagctacaggagtcaacagagtaacctcttcatgtgatcccactgctcatgccgaagttagtgccatacgtgccgcagccgcgaaactaggaacattcaacctcagcggatacgaaatctatacttcatgcgaaccttgcccgatgtgtctgggtgccatctattgggcacgactggacaaaatgtattatgggaacaataagacggatgccaaaaacatcggtttcgacgattcctttatttatgatgagctggctttaaaacctgccgacagaaaacttccctcggaagtattattgcacaacgaagccattacagccttcgaagcctggatgtccaaagaagataaagtagaatattagcatctaatctcacttaaccccgttaatacttagtaaaatgaaaagaaaaagctttttaattctcctcgcagcaggatgtttgttcagttgccagcaacaggatgaactgcaagaaacaagtaaagaagcaaccaacttctcaatctctatcgatgacgctctttctgacccgcttacccgtaccagcaatgatctgttccctgccagaaacagtatcactacaggagaagttatctccatggctgcttccggtcaggactatactccgttcattgttggcaaagacagccgcgcatggaacgaaataggaactgccacaggcacagtaaccttctacgcccattatcctgcactgacagatggagccgccaccagatcaagcggtaacaaacgctatttaaaaggaggtcaggagcacttgttcggaacagcggaagcagctccgggcagccagaatgtatcgctgaaattcaaacgaatgaccgtgccggttattatacttgatgagaacgatcgtccgtatgaaggcgaagctaaagttgagctcagcctgaaaaatgaaggtacgcaggatttattgaacggtaccatcgaaatcaacgaaaatgcgctgtcagagaatatcgaagtaaagaaagtatccgaaggcattactaccaatgttctcccgcaaaagatcagtgccggagaggaaataggaacgatcactgtcggaggagtcactcagaagatcagtgcagtagaagatcttgatttaaaagccggaagcacactttctgtcagattatcaaaaagattcggaggtattattgatggcaatgttccattgtacagataagaagattgcacttaaagacaatcttgcagattatataaataaaagaacgggactcatgatgaatcccgttttttatttatacctaaaaactatataaggccggtcagctcctaggaaccgaccgacttatttatagcgtattattttttatcccaccatacacgtgatgtcatcttatcaccgtcgctgagtctctttactgcatcgttgtaattaacaggattagccgttatctcgcttgccggataaatgaaacgacgaggaatctctccatttgtcacattgttaggatagctggctgcatttcgagacggggttaatttaggatatccggtacgacgccaatttgcaaaagcttcatactcattacagaacgtatgaatataatattccgtattaatctgttccagcgctttttccgtatcagcatccaatggattagcattcagataggcagttatcgcatcatctgtaatcgtagctgaggctttttcataataggagaattgtttcatggcagcagttactccatctctataaaatttttctgcatctcctgtatagagtccacgtttcactgcatcagccaataataacaagttaccggcatgagtgacaagcatagagggtgaatccgggcgtgcataaactgtacggttaggaacagaatatgcttttctccaatcaacctgatagcttggagctttactcaaatcccagtctcctcctgacacatcataaccaaccggcatacctttctgcttagcagccgtgttgtcacctaaatcaaaatcagcatctccccatcccggtttaggatctctggtacaaactgtagcaatcagaggaagacgaggatcgtcctgaaggatgtttataaatgtttcgctgatatagaacgcctgagtatccagactggaaaatacttttccgtaaggttcggcagagtcatcgcttggtgaaccattggtatgtctgacgatcgcattatcatcgttgcttacgaacaagccattcgaaaccgctttagctacccatgttttcgctttatcaggagctactttggtcaggcgcatggctacccggagcatcagtgagtttgcaaatttcttccatttcgcagcatcaccgttatagataacgtcggcagcccctatcgtattaccggcagaagtgcttaatgcagcttgtgcttcatcgagttctttcagcagatcattatagattgcttcttgtgtatcatatttaggatacggaatcggattggtagaatacccctgccctgcttcagaataaggaacgtctccataaaggtcagtcatattctggaacatatatgctttcagaatgcggcacatctgatattcattcgcataagcgggatttccttcccaattattcatcacatctataatattacgaatagctgcacgcccaccagaatagaatcctccccaataagcaccactatactgatcgttccatgtatagaaaactccatacgcccaatctacactagccgtatgctgtatcatgttggctgtgtagatacagccattacgccacacgtcccagtcggagccacatatctgtgcttcaacctgagtaaattccattttataatccaccactccgggattcaggttcatagggtcgttattcacatccccaaagtcattacagctcgtcgctaatcccatcagaccaaaagccgtcaatatatataaagtaaactttttcattgttacagtatttaagatgttagaacttaacatttacattgaatcccacatttctcgtggcaggatatccgttcaattccagaccttgagcattaccgttattataagctgattccggatcaatattatccgtatgcttcaatatagtccaaaggttacgaccgactaaggaaagggttaccccttttataagtgtctgcttattcaaccatgcctgcggcaaagtatatccgactgacagttcgcgcagttttataaaactcgcattataaacaaactcttcagcaatattctgactggtaatagcctgccaatagtcttgtgcagaaacggctacggtattcttcacatagccccctttaccatcagacattacaccattgcccaccattgttcctttaccgtcagcaccacgtccctgcaaagtattcttgtgcagaccgttgctgtaaagagacagattggttccggagaacatcttagctcctgctttgaagtcaatcaggaaagaaagagttatgtttttgtaagtaaactcattgcgccatccgccggttaccttataaacgccgtttcctaatacctgaacctcgtctgagtgtacaggaagaccgttttcaaaaataacttgtccgtccgaagtacgtttgtattcataaccgactaattcaccataaggatgccccaagatattctgaacagaaacactacctacacgtgagttggctccgtcaagagttaatctctttatcttttctcccgttccgtctattcccaggtatttcacatcactgctattataagcgatattgaatgtagaattccagttaaagtcctttgtatgaacaggaacggcattcaccattacttccacaccattatttctgatttctccgacattctggatagctgattcaaaaccggaagcaccactggtggttacctgcacgatatcatctttggttgtttttacataatatgcagcatccaatgacaggcgattatccaagaaagagaggttcaaaccaatttcccattcggaaatctgaaccggtttcagtcctttgttaggtacggtcgagttattgatcgttactacaggctgtccgttcgattggtaattatctactttataggtaagaagattctgatatgctttggttccgttagatgcagctgcataggatgcacgcacctttccgaaagtaaaccagtcgggagtcttgaatgtatcactaaatacccatgacataccgatagaaggatagaaataatgattattattcgggtccagtgtagagaaccagtcattacgtccggttaagtttaagaatacctgattcttataaccaaggtctgcagtaccatagattgaatttacccggtattctgtatattctttcttatacacatgcttcgcagtgttgctgcttgaataaaaatcgggcacaaagaatgaagaggccttatcatccagaccgtatttctttgtaatatttctctgacggtttccaccgaaagtagcaccgacactccagtctccgaatgtcttattgaatccgatcaaatagttcaggttcatttcagagaagttctgagtgtattcctttatataaccgcgtggatcttccggagaagcggaaccgattggcttcacttcggaatattccagattataaccgtcacgtgtcacagccccctgaatgtataaccagtcaaagatatcatacttcaaagtcataccaccagtcagacgattacggttggtttcattggtaaccctgtactgcaaccaatacggattattaaaataaccgttcgtaccacctaacaactctttcccgtcagcaccggtaccccagtcacaatccggattttcacgttccatccaacggatatcaaatgaattggcatgataaagaagtgcggcattcgtgttactgttaccatcggacaagttagaacgacctttattcttgtcgaatacgtagttggcattcaccattaaatgaacttttgaagaaatgtcataagtcgtattcatattgataccttgctgactgatgctggaattgggaagtatcccctttaccgccatattggaaacaccaaaacgataggatatcttatcggaagcaccacttactgccaaagttgttgtattgttaatcccagtacgatagaagttcttccagttatctacaggagaataggcatattcgttccccaagaagtttactgctttttttccatccattacttcaccccagctggatgtttccgttgcttttgccacatctgcagaaagcggacggttaccctgagttccttgcccgtagacattctggaaatcgcggtaatcataaatcacatcaaaagccaagttattgttaaattcaacggagaccggttttcctttctgaccggatttagtagtaatcaagatagcaccgttaccaccacgatatccataaagagcagatgcagcagcacctttcaacacttgaatatctgcaatatcatccggattgatacttgacaaaccatcgcccatatctttacctccccattgacctgcactaccaatattagtattatcaaacggaacaccgtcgataacataaagcggctggttgtttcccgtcaaagaagcattaccacgaattacgacacggctactaccacccggacctgttgcatttccggaaacggaaacaccggcaatcttaccggaaagtgcgttaccaatgttcgttgtacgagcttccgtgaaatcttttcctcctactgtcgttgtagaatagccgagggaccttttctgacgcttaatccccaaagctgtcactacaacttcatcgagtgtctgcgtatcttcctgtaaggtaatgtctaaaggtttacccgtgaacttcacttcctgtggggtataacctacataagagatttgaatcgttgctccatcaggaacattggaaagaacaaaattaccgtccaagtcggtaattacaccatttgtagtacccttgactacaactgaagctccaataaccgcttcacctgccttgtcttttactacacctttacacgtaccgttttgctgtgtgacactcacacttgttgctccattctcagaggctgcataggaaattgctgccggcatggcaaacaagagcaacagcacacttactgatttgagtggtttaaacataatactgctcttttaaggttaataaaaattgtctgtgtgtagagaggacgtcaatatttcatagtttggttctgactacgattacaaaaatatgaatttattttaaataacaagaaaataagtagttttttttctttaaacaaaaagaataattatatcggctaacaaaattacaatattcaaaacagaatgaaccttctttggcattaaatgaaaagataataaagaaatccctggaactgctgtagacactcagcattccagggactctaacacacaaaagttattattgaaattgaaaacagtttctaattaaaagcgtaaacctaaagtcatcatcactttactacggctatttgtcacatcagtcttttttaaagctccatcatcaaatggatagaaatcttccttataagtactatacatgtaagccaagtctgcgtaaaaagtcgatcctctataaccgatacctaatgtataattattatttgcttttgcattcgcaaaatccgtatccgtattaattgaattgtagctcaaatctttaaaagctgtttttttgaatgctgctgacatataattatagcctaaacgaaaagcaaattgaggaataactttccactcagcaccgatacggaaagtattcacacctttcaacatttcttttgctgtaggattctgccatcccattgcttctccatccgaataactaaaatgcatagcggagtaatcctgatattcatattctgctccaatagcgaaagatgatccataagtatacccaagacttaaattatatttccatggtgtacggaaacggaagtcatatccataatcaacaccattcgtaaaatcataagaatctacaacagcctcacttaattttttagagtcaaaatcaggggtatatgtcactgctctaacattcgttttaattttcaaattataaaatgtaggagtatgaacagaaacaccaatacggaatggagagtcttcaaatggacgcacgatagctccaaacttaaaatccacacctgaaccatctattttattctcagtagtcatttcataacttggagtaccataattcacattttctacaatatattccccatactcctctccataagtagaaatctttgagtaattaacatcgtaagcaccaatggtcaatcctaaataaacacgatcacttatattaaaagcaacattaaaatcatactgattgattcctcctttttcatgtccatcataccatgaatatggttgaggtaaataacctatatagccatttttatcttcattttcattatataaatatccattccagccgatagcagccagccagccagtctgactatcagtaaacagattaatcttatcatcagctaacttactgataaagtcaccattcgctttaatcatagtgttcgcttgattcgtcatttgattagtctgagaaagaattgttcctccaggccccagattaatcaaaccttccattgtcatatacttatcaaatgacttggaacgagtgtaactgaatccaaaattcacataacgcaaagcggtctgatttccaattttagaagaaaacacaaatcctatattatcaaatgatccacgagtcttatcaacattaaactttgatccttcatatttactctccgaaccaaaagaagaaaagccgaaagttcccattatatcattactacgatatataccaataccagccggatttgtccccatagtagaaatatctcctcctagtgcacccattgctcctcccattcctacaaaacgggcagttccattcaaatccttctgcgtaaacttagcaccatcgtatattgtctgggcgcttgcacttgccaccataataagagcaagtgcagctatatttattttctttttcatacgtttccttaaatattattatatgctatagttttatctcctgctaccgcctctagctgaacctccaccaccggaagaacttccacgactactgctactacttccgcctccatacgaagaaccactagaacgagaagaactgctactaggagaataagaactggaactactagaacgactactgctactaggagtatatgttcgagaactactactagaacggttactactgctaggagtatatgttcgagagctactagagcgactaggtgtataactactacttcctcttgaataagttccgctacttctagaagaagatcccctattataagtaccttcacttcttgaagaagaagtacgagtgctactactacgattcatacccgaagatgtgctggtacgagtactgctcggacgagtataggtatctctgcgagaagaactagttcttgtacttactcctgtccgtgtactattctctctggttcctactacacgtcccgaagttgttctattcgaagatgtacgaactgatgaaggacgagaagactgataacggttagaggtatatctggtaccattggtagtacggttaacactcctgttaggagaacgacgattggtgtatagcatgtctctatgaccaccgccccagccccagctaggaccaccaccccagtggtgatgatgtccccaataaccgccgccatagaagccaccccagtagccaccataccagccgccccatgaacccgggtaatatccccaaccatagtaaggacgattccatccccagccatagttccatccccaaccgtaggagttgtaacgccaatcccaccaaagcggattactaaatgtcgggaaagcataagcgtacataccatcagtatatacattccagttccatgaattaggtccgtaaacaacgtcccaatagagtggactgctaatgctgatagcaaaacgtggattacggaaacggataatacgttcagcatattcatagtcctcttgcgaaccatcaaattcaccggttacccattctccttccaagtctggctgagctttctcttttatatataaggtatcgttttccattacgaattcattctcacgagcgtcataacggcggttatattcatccacatcccgtgtttttcccttgcggtcctgaactacaacggtagtgcccggtgatgtatagatgttggtcgtgacttgctttctcggttccttcttttccggagtcgtttctttcttctcctttttgtctttagaaggtacgaaataaaggtcgtcatcaacgctttgtgccatcaagcctatagggaggcataaagcaattagcaagaaataaacaatctttttcatatcatctcggtttatgtaattacttaaacttattcacattacaaagataaggaagagattcgccactctagggagattttccccaaaggataatagggaaatccctatttctaactatctttgcaaaagattcaccaaattaaaaacaactatgaagtattttgagttcacattccatacaagtccatgcacagaaacagtaaatgacgtactggctgccgtattaggtgaagccggatttgaaagttttgttgaaagcgaaggcggactgactgcatacatacaacaggcattatgcgatgaaaatacaataaaaaatgcaataaccgaatttcctctgcccgatacggagatcacttatacatacgttgaagcggaagacaaagactggaacgaagaatgggaaaagaatttctttcagccgattgtgatcgataaccgatgtgttatccatagtaccttccataaagatgtaccccaggcaacttatgatatcgttatcaatccgcaaatggctttcggcacgggacatcatgaaacgacaagcctcatcatcggggagttactggacaatgagttgaaagataaatcacttctggatatgggctgtggaacttcgatcttagctattctcgcccgcatgcggggagcacgcccatgtatcgctattgacattgacgaatggtgtgtacgaaactctattgagaacattgaattaaaccacgtagacgacatcgccgtttcacaaggagatgcctcatcgcttgttggcaaagggccctttgatatcatcatcgctaatataaaccggaatattctattgaacgacatgaagcaatacgttgcctgcatgcacccgggatcggaactttatatgagtggattttatgtggacgacattcctttcatccgccgggaagcagaaaagaacggactgaccttcgtacatcataaggagaagaatcgctgggcagcagtaaagttcacatattaagcattaatcttccttatctgtttcaagaagacacagaccacgtatctttaaaagacagcatatatttgtggtagagataagatgtacgagatgctcatctcgtgctgtacggcatgctcatcttgttatacaccagatgctcatccggtagtgtacaagatgagcatctggtacataccatcctttaatgaaaagaatggtatggtataatattccttctgttatgttactgggaaacagatataaagtattaaggttttgaatcaaactcattctttacctgttcacaccattccctgattctcttttccgcttgctcggattgattatccaaatcgacgaccaaaccgcaccaccgatcaccacgcaacgctctggaacgttcgaaagtgtatccttcggaagaagtaaaaccgaccagtgtagccccgtctccttcaaatacctcggcaagcaacccgattccgtcagcaaagttttcgggataacgtatctgatctcctaacccgaagatagctacttttttccctttcaaatccaatgtacgaagttccggcaataactcatcccaataggtaggaagttctccgtcaaaccaggtcgaagcacctactataaaacaatcgtaagctgcaaaatcattttgccatgcctgctcaataggcaccacttctatcttatcttttccaaattctttctgaattttctctgccacccaagtagtcttatcagctttggtggcataaaacaaaccaatcttcttcatatactatacctccattttattccattaatattccaatagctttttagctgcctcatagatcttcgcctcatccggcaatatctctttttccagaatcggattgaaaccgacaggagtaaatgtagatccgacacgctgcaccggaccatccagataacggaacatatccgttccgatcatagcagcaagttccgcaccgaaaccggagaacaccttgtcttcgtgaacaaccaatgctttactggtctttttcaccgattcgaaaatcgcctcctgatctaatggtatcaatgaacgaatatcgatcacttcgactttccagccactttctttttccagttgctctgctacgtgcaggcagaaatgggtcgtattgccataagtaataatgctcaaatccgttccttcacgacgaatacgtgcctttccgaaaggaacctcaaaatcttccggaacaacagctgctgcttctaccgaattatatagagctttcggttccaaaaacaaggtaaatccctttgaacgcatactggttcgtaacaatccggctgcatcatccgcaaaagaaggacagacaatacgtgcacccggcaacgttgttagggcaccctctatattttgggaatgatataatccaccaccgatatatcctccggaagcaagccgtaaagtgatattcggagcaaacttaccgttactgcgccaatattcatgagtacactccacatactgttctacggcaggccagaagtagtctgcaaactcagctccttctatcactacatggattttagggtcaaagcggctcataccattggctgtacctacaatataatcttcggcaatcggtgcgctgaatacacgcgcctcgccaaattcctgctgcatgcctttggtcacattaaagaccccgcctttttctctgttagccacatcttgtccccagataaaggtatccggattatggcggaattccgctttcaatgtttcattaattgcattgaccaggaaagtcttctctccttcttcctgatgagtaccttctttgtatttttgcggctgataaggttcgggcatcacaaaatcgtaaatgcttttaggatcaggttcaggggcagccagcgccttgcggttggcagcagatagttccttctttgattcagcttcaatttgcagcagttcctcttccgtcaagcgcttatagcgcaataacatccgccggaacttcattaacggatcagcttctttcacatattccagttcgttttcgtcccgataaagtgtatgtttatccgagttggaatgagaaccgatacgaacgcagttagcctgtacaatcacaggattacgggtactgatcgcatattcgcgtgcctcagtcatggcattcatagaatcgaacacatcttttccattgcagtagataatcttcagattcttgaaaccggagaagttctcagctactttacgattggcagtctgctcagatttaggaacagagatgccatatccgttatcctgtataacgaaaatcaccggaagacgttccagactagctccattgatagcctcgtaaacaaagccttcggaagtagcagattctccgtgcgaagtgattgctactcctttatgcccataatataccattgctcttgctacacctgccgcatgaaggtcatgcgttccggtagcagaagatatattttcaatatgccattccggtttagcgaagtgattcgacatatgacgtccgccgctaccgggatcagttgctttcgaaataccattcaatataatctcttccgcagtcattcctgcagaaagcacggtcagcatatctctgtaataaggaaacaggaaatcttctcccaatgtgaaaacctgaccgacagccagttggataccatcatgccccgcataaggagcatggtatgaccaacccaaggattgcagctggtaagacggcgccttctcgtccaaagcacgccctaatgtcatcagatggtaccactttttcagtgtttcaacatccgtagtctttatatcatatttctttttcatagttaatgaagttcttaatgaatgaaacaatctgttatcagcccttccagttttccaggtaatcggctatgaagtgcaggaagttgcctcccagcataccgtcaactacacgatggtcataagacagggacagatacatcttatgacggatagcaatcgtatcaccttccggtgtctctattacggcaggcttcttctcaatatatcccactcccaaaatggcaacctggggctgattgattaccggcgtaccgaacaaactcttgaatgtaccgaaattagtaatggtaaacgtacctccgtcaatatcatccggcatcaatttgttatcacgagccttcaatgccagcgagtctatagctacagccaatccgttcaagttcagatgatcggcatcatgtaccacaggaactatcagattgccatcattcaaagaaacagcaataccgatattgatatgtttcttgaaaagaatattatatccgtcaacagatacattgacctgaggatatgctgccaatgcttttgcaacagcttctgttatgacaggcatataggtcagtttcactccctcacgacggaagaaagcgtctttattcttttcacgccatcgtaccagtctggttacgtctacctctactacattggttacgtgtggtgaaaccttcttggacatcaccatatgatccgcaataatccggcggacacgatccatttctttcacttctactcccggaatattggcagctgcaggtgcttgtttagatggagcagacggtgcagcaacaggagtttgcacggaagccgccacaggagaagttgtcatagagccagcccctccagtcgaagaaggcatagaagccgtaagtgcatcaccggtaggtatcgccgccttcgagacttcggaaattccccttttcttcttctcaatataatcctttatatctttcttgctcaaccggccttcgtatcctgtgccttgtatcgaatcaagttcttctttcggaatattcgcacttcgtgccaattgaatcaccacaggagaataccagcgttcttcagcctttgctacctgagaagatacttttcctgcatcagaagaagtattctccttgctttctgcagtttcttttccacttgcagtttcttcatcggatgcctcttcacctcccatatctacaacagcaaccactgtacccacagcgactgtatctccttccttaaacaggatttccacgaccttaccggctaccggtgaaggtatttccgcactgactttcgccgtatttacctcgaagagaacatcgtcttcctgaatgatatcccccactttcacagaccaagagacaatcgtcccttcggttatactctcgcccaacttaggcatttttatttcgaatcttgacatagacagtaaatttattattcaaccttgaactattaaaacaacccgctgaaaaagaaagttttaggttaaagtatttttaaccggactcaacgactgaatatccattcttcgcaaatatatttctcagtccgaagtttatggattgcttccaattctttctcactgaaagtatcagcacatcccttctgactaaaatattcgaaaagtatcgctttgaaatgatcaaccgtttccataggtaagtaacgactgatatttgtgacttcactacggacagacggaacagcatacacagatgatgccacacccgtctcaatgttcctctccggattcagtaccttgtttaaagcggtaagattcgtatcatacaacaaagtacaatgataaagcaccctgttcttgtgtacgcactgggcactccccgatattttcagaccatcaagatagatacccagccgttcatctccttttgccggcaatcctatctgttttaagaaatccagtatccgatgaagataaagactgaaatcaggcaagcgggacactgtttcgataaaagttaaattgacattacccaaatcatgatatacagctcccccacccgaaaaccgacgggctatttgaatttgttgttcttccgcccattcccggttcacttccaactgtacagattggtgttttcccatcactacagaaggagtgtcctgccaaagcatgaaaacagaatctgtttcctgcttcagcaaatactcttctgccgccagatgaaaataaatatctgtaaaagtgttatgaaagcacctcatgataaatctctccaaccgtaggatggggaaatacattcttctgaaattcctcaaccgtatagcccttctgaatggctattccggcaatcacaatcaattccgacgctggatttccaagcatatgacaaccgataatatgatcagcttcatcaagtatcagcttacatattccatttacctgttcgttttccgcaacaaaacgtccggaataagccatcggcaacttcgtaacacgataaggaatgccctgtttggtcagctcttcttctgtcttacctacaccggccacttccggattggtgtagacaactcccggcacactgttataattcatccggtcttccactcctaaaatatgattgattgccacttccgcctcccgaattgccgtatgcgccaataaagaatagcctgtaatatcaccgcacgcatatactccgggatgagaagtctgaagatattcgtctactttaaccccattccgatgaagttctatattcagcttatccaatccgacattggtaatatttgctttacgccccacactgagcaagatcttttccgttttgatagtagaagccttcccatctttctctatgacgactccgtcaggtttcacttctattacttttgtattcaagtagaaagtgactccacgttttgcatattctgtacgaagcatactgctggtttccttatccatgactcccagtatctccggcatcatctcgacaacatgcactttcactcccatactgttgaagaaagaagcaaactccattcctatgactccaccacctataacaaccaacgtttcaggaagctctttgatctccaaagcctcttttgacgtccagtaactaacttccgacagtcccggtatcggaggaataaccgtatcggaaccggtacataccagcagatatttcacttcatatctttctccgtcacaaatgatacggatcagcccgttttcttctccttctataaaggcttctttttccacgatcgtcactccgtaagagttcacggtcatctttaccccaccagtcagcattttcaccgttttctctttacggctcattattttagttaaatcaaacgaaggagattcgacagaaatgccatatttggaagcactcttgatgctatccagaattttagcagaatataacaacgttttagtaggaatacatccttcattcagacatatcccacctattgcctttttttcaaacaaaacggctctcagtccgtttgcccctgccctttcggcagctgtgtaaccagcagggccaccaccaataatagctatatcaaagttcataatcgtatctttttagtaataatacgattataacaaatgagagaagagattagttgtatgacagatcaatcatcctacttgatcgtcagctttttgagttcttctaatgtaccgttgaatacattgaggtctacatcttctttaataccgggtacatttccgacatcagtatgttgccagaaattccacttgccctgatatttcaccgaatcgacataatagtgagcgatccaataaggataagcattgaaaatagaatcgtccagataacgggtcttgaacttataagaggtataaagaatgggcttcaccccataatgggattctatacgatccaaccagcgcttaatgccttgctgcaattcttttttctcttttcgaccggtcacttccacatcgagaaccggaggcaggtcgccggaatccagtttgaccgtacgtataaaaaagtccgcctgtttcaaagcatctgtaccgggaatatagaaatgataagcgccacggataaagccatgattacgcgcattagcaaaattggtttgaaaggtagtatcgttatgatctcccccttccgtcgctttcataaaaatgaagtgcaaaggagttgccgtctgtttattctgtaaaagtctcccccagtctatttttccttgataatgggaaatatcaatcccatgaatatcatatccggaaggaatacaaactccatattcctttaaaccattacaaggtttccaccgataagcataaggacgtataaagaaataatagaaaaccatagagaaacaaccgacaattgccacagccaatatatttcgaagccaaccaggcatcgaataatgctgcttcaccggtgcctttttcggagcacgggaaggtctggaagaagaaaccgtcctcttttttggggtagtggaagcagttcttttcttttggacagcagaaatcggattattacgtgacgacatttactttgagtgatgaatgtaatatagataggcacggattacacggaatacacggttttaagaaatagtataactaaaaccgcgtcaatccgcgtaatccgtgcctgaaagagctcttcattgcaactgtttcttactacagtccggtgaagttttcttatttagcttgttccaattgcaaagtcttagttgcctggtcgcaaacttctgtaggaccaaagtactgaatcggacccggatatacataatccgtttcaacagcccaacggtcacgctgtgcagcgaatgctttgaaaggagcaccatccaatttcactaatgctttctggatcaccggtttcatttcaccgtggcggcgttccatattcatcatcatggtgataggcacaccacctgcaatccattcggcagcaggagcagttgtgttgcgtacagaagacatataaccggtcttaccgtcagcaatcagcatagaagctgtgtatcccaaagaatagcagtagtcagcatcaaagtttgacggagcagcgcaacgtccttcgtaaccgaagaagtggtgctgtgcagcaaacttacccacatatttgccatcttctttccaagcagccaatttggtagctaccatttcagacaacagtttttctgtttcgatcagtgatacctgaacgtttccgtgcgggtcacgatccagtgtcagctggcgagctacaccttccggcagacttgcatagatagcagagttttccggagacagcttacggatgatgtaatcacgttgatgagacttcttgatctgagagaactcttctgcatttgcagccaggaagtcgttcaattcagcgatcagacgcttcatagccggaataaattccaccaatccttccggaatcaatactgtaccgaagttatttccctgtgcagcacggtcagctaccactttagcgatagatgttactacatcatccagagacatatctttttcttccacttcttcagaaacgatacatacgttaggctgtacctgcaaagcacattccagtgcgatgtgagaagccgaacgacccatcaatttgataaagtgccagtatttacgggctgagttacagtcacgctggatgttaccgattacttctgcataagtcttacaagctgtatcgaaaccgaaagaagtttcaatcatatcgttcttcaagtcaccgtcaatcgtcttcgggcaaccgatcacctgtacaccgtacttcttggcagcatagtattcagccaacacacaagcgtttgtattagagtcatcaccaccgatgataaccagtgctttgatgcccaattccttgatgatctcaaatcccttttcaaactgagcttcagtttccagcttcgtacgtcccgaaccgatgatatcgaaaccacctgtgttacggtattcgtcaatgatgtcagcagtcagttccatatagttgtggtctaccagaccgccaggacccaagataaagccgtacagcttactttcaggattcagctttttgataccgtcgaacaaaccagagattacattgtgtccgcccggagcttgtccgccggaaaggattacacctacgttcatagcaggaagttgaacagcttcacccgcttcgaatgtaatcaacggcattccgtacgtgttagggaataatgctttgatagcttcctgatcggctacagattgagtagcagcacctgctacagctttaacggctcctgttgccaatgctttcggaagtttgggctgataagcagcccttgcgatttgcaatgcacttttagtcattttctttatttttatttaaaggtgttagtaagtttcttgtcaaacttgaaaagcgttgcaaatttcgcatttttcctcgaattatgaaagagaagccctcattttatttcgctgcatagttacagaggctattgcttccagccaccgccaagtgctttatacagttgtactacggtgatcagttcatcacgaatagcgttactcagaccaatttgtgcgtcaaaataaccacgctgggcatcgagaacatccagataattgatcactccattgatatattgcaactgcgccaaatccatataactcttagccgaacgttccagattggcacgaagcgcgtacacctcttttatcttattaaagttgacaatcgcattacgtgtctccttgaaagccgtcaggactgttttctcataactatgtatttctgcttcataggccgcttttttgcctttcaacgcagcacggttttttccccagccaaaaataggagtcaataaagcaccttccataacggcataaggcgattttagaagttctgacaaagacgtgctttcactaccgaaaccacccgtcagtgccagacgaggaaacatattcgtataagccacacctacttttgcattggcagcgatcagcttctgctctgcctgacgtatatcgggacggcgttcaagcaaagtggaaggcatccctatcggaagagtttccgggaaattaaactcctgaagcaaacgggaacgggctatgcgattcgggtattctccggccagaaaagcaatatcattctctttcagcgatattttgcgttccagatcaggaaccagagtagctgtacgtgccaactctacctgcgcctgacgataagaagtctccgaagtaagtcctccttcaaaacggatacgtgccagacgaaccccttcttcacgagcttttaaagtctgcttgacgatatccagttccgtatccaaggcaaccagctcataatatgcctgtgccacttccgccacaatcgtcatctgaagcgcacgttgcgcttctactgactgcagatattcggcgatgctggcagaacgtgcccatcgcagatttccccaaagatcgagttcccatgaaactaggaactgcgcttcaaaagtatccgatttcttaaaagcatctcccccatgattttcaagttcacgctcggcagtcactttacctttaatatcgggaagcagcgcggcggtggatatccgtttctgagctgccatttccttgatgcgggcagccgctatcaacatatctttattatggtccaacgcacggtctataagactgcggagtgtggaatctgtgtagatttcctcccaatcctgatctccaaagctgaccgtatcctgatgttgagccagactatcgggtaaatgaagatcaggacggacgtagctcttgcctactttgcaggaagtcagtattcctgcaaaaagtagtatagcaatatatagtttattcagtttcattatttcttatgttttaagattttcgactttgttttatacaccatcacaaagaagaacggcacgagaatgataccaaatacgatagcgaatatcattccgaagaatacgcccgtaccaatcgcctgacggctcgccgaacccggaccactcgccagtaccatcggaagcattcccagtacaaatgcaagggaagtcatcagaataggacggaaacgtaatttcgctgcgtagattgccgactgaatcaagtcttcacctctatctacctgcactttggcaaactctacaatcaaaatggcattcttggcggcaagcccgacaagcattaccaatccgatctggaaataaacatcattctccagtccgcacacccaaactcccagataggctcccaatgctgctacaggcaaggatagcaatacagcaatcggcactgtccaactttcatattgtgcggcaaggaagaggaagacaaacaagaacaccagtgccatgaccatacccgtctgaccgcctgcctgtttctcctgataagaaagtccgctccactccagtccgatattatccggaagatggtcacgggcgatctgctccataatctccattgcctgaccggaactgtatccctgtgcagcagcaccccggataacggcagtagtaaacatattgaaacgcttgatacttcccggtcctgtcgtataagaagcattacccaaagaagtcagcggcaccatcgctccattggaagctttcacaaagaacaggttgatattgtctttatgttcccgataaggagcttccgcctgaatatataccttatatatacggttgaacatattaaagtcattcacatacaccgaacctgtatacgctttcatcgtagaaaacacatctgccaaaggtactcccagcattttcactttgtctctgtccacatcaaaataaagctggggaatctcagactgcaaggaagaagacaaaccggtaagctccttacgtttggaagcataatacatcaacgtatctgccgcatctaccaaattatcgaaagtagcctctccacgagcttccagctgcatttcaaaaccaccggagctgcccagtcccggtatgaccggaggagtagacaggtagactttacattcgggatattctctcaaatgtttttctaccgtatccataattttttcaatactggtgctctttctctcttcccaaggtttcagaataacggtcagctcggcacgcccctgattactccctacacgcgggctgcttccggtcacgttttgtacatattctatatatggattcttctccagataagcaatcgcgcgttccgtcactacacgtgttcgctccaaggtagctccttccggcagttcaagttcaatcttaaagtatccctggtcttctaccggcaagaaactagtcggaataatccggtgaatcaacagaatagcaatcaataccataccaaaagcactcaaaacccgacgaggatgtttgatagtacgggtgacggcagctacatacttattgcttccgatacccagccactcattgatctttctgaatactatatttttcttcttgccactatccggtttcaaaatgagcgaacacatcacagggctcagcgttaaagcaaccacagtagaaatcagtacagataccacgatagttaccgtaaactgacgatacagctgcccggtaattccactcagaaaacttaccggaacaaacacagccgccaataccagtgaagtagcgatcaatgcgcttgataatccgttcatcgctttctttgtcgcctcatagggactcagcttctccgtttccat

SEQ ID NO: 4544 - DNA, 38134 bp, Unknown
  gut microbiota DNA sequence
tggtgaacaaggaaactacaatcgcatttatcatcatgaatctgttccattcttagatgttaccgatccgcaatattggttagttgataaatctattaataatcaacaagagcctgaagaaagttctaccgaagaacaacctgttggatggaattcagcagccgaagagaaatcagagcaaacggactcctcccaatctgttgatgagatacggaaattcaagtccatcaaagtatctgggaaagtaccagttgaacgctggactgatttattctccagctttgttgttcctctcaaaaataatggtttggaaatagaaatatcttttaaggctaaaaccacaagtttaaatccattggatgagtcagcacaggtttacaaagtagtaaaggagtcggctatgcagttggggttgaatatagaagaggaaaatctatcttgaattaacattaagtaacaatttatggaataatgaacagagagaaaaagttattatctctattaacccagttcaaagaactgggtataaatcaacagatagattacaataaattctatctctactctattattacccattcaacagctattgagggttctaccgtcaccgaaatagaaaaccaacttttattcgatgagggtatcagcgcaaaaggccgttcaatgaccgaacagttaatgaacttagacctgaaagctgcatacgaacaatcaattgcctttgcaaagagccatagcgatatttccgtggagatgctcaaacaattgtcttctattgttttaaagaatacgggaacgacttataaaacggctttgggggaattttcgtcagcgaatggagatttacgattgttgaatgttacggcaggtaccggagggcgttcttatatgaattactcaaaagtacctactaagctagcggaactttgcgaaaacataaaccaaagacgaaagtcactctcaaaaacagacattatcgagtgttataagttaagtttcgatgcacattttcatttggtaaccattcacccctgggctgacggaaacggtagaatgtgcagattgctgatgaatcaattgcaatttgaatacggaattgttccttccaatatcaacaaagactgtaaagccgaatatatagaggctcttatcgctactcgtgaaaacgatgatatagaactatttcacaattttatgtttgatgaacatatacgcaacttggaacagataatccgcaattatcaagtatcaatagaagatgaaggtttagaatctcgtgtagatgtcggtataaatgtcggcataaatgtcggtataaacgaacagcgcacattagaacttattcgaattaataatcggataactgcaaaagaggtagcagaatcgctctcggtttccttacgacagggtgagcgcattatggcaacattaaaagaaaaaggtttaattaaacgtattggctctaataagtcgggacattgggaaataatagagtaaccattatgctaccaaaagagaaaacgattgaatatacgatctaagcttcaatcaaattaaggagactatgaacaaagaacaagcccaatatatccatatatccttcccttttcgggaagaactctgctcctatacctttcctttcaaatatgagaaagatgaagagcaactgcctttagtcaccctgggttactggcaagggaccgtcgacctcgaaacccacaaacttctcgaatgggaacctaattttggagaatgttatttccaagcaaaagtatgcgatactgggacttataccttacttgatacggaaaagaaaccaatatgcatactcaaaggatatgttcccaatggcgtaattccaccggagaatggtgcaggcgattacattcacttcgccatcagtacggacggaacggtagaagaatggcaaaaaacgtatgacttcactgaattcaatgaacgagcaatccctgttacagaacattcttccacacctctgctctattcccagcaacgtccaattatgaaattcaataccattggatttttcaccgacaaacagccacagatggttgccttctatcggaatatctggggattcaaaacgacttggaatggtaatgaacctaatgtagagatgacctacaacggcatgcgcttgattatgttccctcgaaaggagttcgaaaaaatgttatctcgacgctttgattgccccaaaggtttgaacagtaccatggaactttcgttcgacctccccacattcaatgatgtagacaatgaatatgcccgatgcttgcaacaaggcgtacaaggtgtgatgccacccaacacagagctgtgggggcaacgaacagcctacattgccgatccagatggaaacttgattgaactttcctctttcaatacatcagtgaaagaagaacctaaaaaaaagacatatacgttggaagaaaagcgtcaagaacatggtaatgcctatctgccttgggaaaaggaagcagatgaatatctcatacgcttatacgatgaaggtaaaacaatcaaggagcttgctgaaatattcgaacgcaataatggaggaatacgatccagattgaagaaactgggaaagatagaataggttctttatctttgcaccaatatgcttctttcacaatacaaataatgagggatattcctagattagagtttgcaaccggagcaaaaagactgggcattatcattcatacaggatctcaatgacctcctctgcaatagatgattccataatcctcattgtatgattatcctccgcgttgtaaccaagatagtttacgctaccataccaaacaacagacttatcaataatcgaagcatgaagtgacaacttttcttttacatttacttgtacaccacttaataacatcttatccttatctgaaagttggcgcgtgaacacaataacttccacacctcgtgcagaaagctcagccaacagttcaaggataggaacacgtttagcaaaccacaactttgtggctgatataatgatagatttagaggcgtttaacaaatcagcaaaaaatgaatcctgataattcttaccagtaaaaatagcactttgaccgacaccgaaaagatctttcgaatcactttgttgaatcttatacccaacagacgcataacctttcaaccgccgtttgtacatcacatattgggacatggatgtcaatatagtcataaacctgaacgatcttctttcccggatagtcacgatgcaagcgaccagcatattgcgctactatccctttccacgaaacaggtaatgccagaaataaagtatccaaacgagagcaatcaaatccctcaccgacatatttcccggtagcgataatcacgagcgcctcctctttagaaacattttgcaaacgctccatcttcatccgtttctctttaactgattcagagcctacaagcgtaataacatttttgcaactatcagcaagcatagccgacaatatctctacatgcgaagtaagactggtcaaaacaattggcgaccgcccatcatccaatgccttacacacctcagtcactataagccggttgcgataattgtcatcggctatcctttgtagtatctgcacatagccttgtcatccgtcaactcacgataggaggtgaaacgtgggataagtagacgttcaaatgtttgcgaagtcatctgcatcttagcatcagctgagtatctaatgggaccgcattgcataaatatgattggctgatgaccatctttgcggatggaagttgccgttaatccatacacataacaggcattgcaacacttcaagacgcgctcaaaattcacagccgatacgtgatgacattcgtctaccaacaccatcccataatctcttacaaacggctttacctcatcatcatcaaaacaagattgtatcaatgcaatatcaatcgttttatgaagcctgtttccattagaatccagcgcactaaaaggagaaaacgcaactttgcgcacacgcctatgagaagtgtcttcctcgacataatcaatatccaagaactcttccaaacgagatttccattgttcgagtaatgccttagtatgtacaagaatcaacgtatttaccttacgcttcgctatcagatctatcgcagtcacagttttaccaaatgcagttgtagcatttaacacaccagtattatgagacatcaaacttgcgatggcagtatcttgctcctcacgtagttctcctttaaactttaccgagatacattttcccggatttgtctcgtcttttgcacgataacagacatggttattcatcaataattccacgatggcatcttcacaaccacgaggcaaaactacatattcttcagaaacatcagcacatgaaatgatacggggagtattgtaggtagataatctcatcccctgtttagcataaaactcaggattcttaaatgaagcaatacgtttgatatagttaagcgcctttttcgtccaaagacaaacaaggaggcgcaacaatcttcttttcctgaaatacaagcttaggagctttattagcagaaattacctctatatttttcgtttctttatcgacttctaaaaggtctttcaccaacccattcaattttgcattctctttgtgaagcagttcgttttcagctactaattgtctattagcggcaagcaactctcgatatgtaggcgattcattcataatttattaacatcctaaatatcctaatatatgtttcctcccataattgctccccccttcgaacaatcgattatagtagcaattgccatgagaaaataattaatgatatttcttctggctattactcctcatacctattttctaataaatattcaacaatttctttatctgccggtagccacataacttcattaagggagcttaatactagccaccgtgcagatttatgttcacgaagctctaattcaccagctaaaattgtacacagatagcagtgcatagtaagatgaaaagatggatagtcaaaatcagtagtacatacaaatccatcaatactaatgtcaacacctaactcttcttgaatttcccgtctgagtgcattttcatggctttcgcctttctctattttaccaccaggaaattcccacaaaccttcaaactcgccataaccacgttgggttgcaaagtatttttcattatcatagattatagctgctacaacttctatctgtttcatagcttatattgctttaacatattgtgccattgctggttgttgaagtttccatgtgatattcatagggaaatcatcatgagaagacatatactctactagaccaaaacaatggaaaggacaagtataccataaccatcctttttctcttcacgaacaaagaggattattttgttttgtgtatcagcttgcttagtatatcgctgtcctccattattttgatgagagtctgtgttttgtgactgccaatggaaatagtgttcattaatgagataatcattatactgtgttgaaggagaaaaatccttatctgatttgtttagcgtcacaaaaagtaatgtagcattatgttcggacaaattaaatactcccgttacagaaccttgcatcttgcgcgcttccgtttgcctaccggcaagcgtaaaaatttcctcacgggtatagcaaccgtataattcaagtccaggcaaaacatcctctcctaaaggcatcgtttttagttgaagatgcgcaagcaaataagaaataatttccgaaatctcttgcctaaaatagctgtacatttccttatggatcaattcaagcgcttcataaatactggcaaaacctgttttatccaaacgatcctgaaaaagagcgtaatatagcatcaaagcatacttataatttttagtatcaagatattgcttacttccatcgataaagagttctataaaatgaaggaatgatgcagtattgtggtgcaataagttagccatccctttctccaaccgtttggttataacatcgtctttgtacgcgatacgacctgcagcgcgcttaagcgatgtccagcaattgttactttgataaagagtacgaatatcttgtccattattctctaaaaactgagaaatggtaggtatattagggtaactattgatttctctgataatgcgattcttgttataaatagcactttggatattatcaagaatatattgtcttgctttcttctccatcacgatactgcagcctgatggcaacaaagtgaatccatctttgatttgcttaacaatattcttttcaggattgagcatcaaagcccggaaacgactagcaaagtcatacttacgattagattgtgctacgaagtcaagtacagtgagttccgtcttacctacagaaaggcgcaaaccacgtcctaactgttgaagaaagatcgttaaactctctgtgggacgtagaaaaagtacagtatccacttcaggaatatctacaccttcgttgaaaatatctactacgcagagataatgaatagctccttcacgcagttctttagcaagttgcttgcgtttatcagatggtgtatccgatgttaaactctgagcattaaatccatacagactcaactgttctgccataaaatcggcatgacgtttattcacacagaaacagagtgcacggcacatatattcattagcgaggtatttatgcaacgcttcaacaatatacccagctcgttctttgctgcaaagtttatccgcaagacgctcgatattgtatttttgcccattccaaagagcatcatcactaagatcagtagaatctgttacacaaagatattgaaatggtgtgagcaatcctgcttgtaaagcttgtggcaagcgaatttctgcactaattcgtccaccaaaatctggtcgaagatcacgtccatccatacgctcaggtgtagcagtaagtccaataaggagttgcggtacgaagtgagcaaacaattttcggtagctttctgcctgactgtggtgagcttcgtcaatcacgatataatcataaaaatcagcacctagtttctcaaaaaaatcttcaaaacgggagtttaacatagagatggaaacaaacaaattttcgtattcgctttcatcttgtggacggcaattgcctacccacaaagtaccgaaattggcatcaccaagtacactacgataagtattcaacgattggcgaagaatttcctcccgatgagctgtaaataaaatacggcttctggagtgtatacgacgaaattccttatagtcaaaagctgaaatcactgtctttcctgtaccagtagccgcaacaactaaatttttgaaattcttaagctcttcacgttctacacgtaacttgtcaagaatttgtttttgatgaggaagaagagtaaaatgtcgatatatcacttcattcgaagtatccctaaagatattacgatgtatttctttattaaacttttctatacctccaagtcggaaatcctcaaaattagaactattccagtacatctcaaatgtagcaagagcagtttttattatatgtggattttcaacacttgtaacgcgtatattccattcaagaccttcagtttgagcagattttgaaagatttgacgaaccgatataagcagtattcataccggagttacgcacaaaaatatatgatttggcatgtagacgttcaatatctgtattataagaaatacgtatttcagtattaggcaacgcagcaagctgctctattgctttagcttgtgtagctccgcaataagtagttgttatgatacgcaaacgatttccctctttttggcagaatttaagcagatcatcgagcaatatacggacccctgatactttcaagaaagatacaatgaaatttatctcattagcacttgctatttcacgacgtatttcttctcctagaggaagcaagctactaccgcccgtaaacagattacttacgcgaaagccagagatgggacgaatagtttgtatgcgactttctgcttgtaatagtgcttgttgtctgctcattacctccgttaacaattttgaaggttcagctatctgaatttcatcaataaccccagcttctttcaagatattatttataagatttacgcgatcttcctgattttcgatctcctcaagtttctggcgaatcaccttcccaaaataattggctagtatttgtggagactccgcctcatctatattttatcgcatacaaaccataccttgctgctcaatttcatgaatatgctgctttgttatctggttgataacatgttcgtatatacctttctttagcatataaaagatttatttaaattgtttttcctgcactaccgagacttccataaagctcatctcaccttcaaagacaaaagtaaatataaaaagacagaaaagctaatacaattacttttttctgaatgccaataataccctgttttaaatagatgagtacatccttaaacaataagcctataaaatattcagctaaaatagctgggagaagattaggtctattttaaatagaacagtatctttgtgcatcaataagtttttatgctttatactctaaagcaaatcttttgactttacagaataaacaacataatatggcaacaatagaagaacttacagaaaccattgtgaaattcagagacgaacgggactgggcccaatttcacaatgctaaagatttatcattggcattatccattgaagcagcagaactgaaccaactctttctctggaaatcaccggaagaggcaaatgttgaaaaaataaaagaagaattggcagatgtcctcaattacgcattactcattgctaataaatataattttgatgttgcccaaatcatactggacaaaatagagaagaatgcgcaaaagtatccagttgagaaagccaaaggaactgctaagaaatataacgaattataaccaaacacgatgaccggaaaaagagtattataccaagaaccgcaggctacgttttttcatgatgtaatgaccaatctgtttacagacaaaatgacaaaggccgccacctattataacttacacccaagcaatccagaactaatgtcatggggaaataatgcccctaaaataaaagacttgcttcagttgagcggagttactgatacatatgtgacattcgagtacctcgttccatacaacatgaaacgcattgactgcatcttatatggtaggaactcacaaaatcagggaaatgtagtccatatcgaattaaaacaatgggacaacaagggggttcgggatactgactgcgaaggaaacttcaacgtcgacgacgaagattcagacaccacattccaggtacaggcatacacaggcggaggacaccggctggtatcccacccttcccaacaagtaagaggatacaatgattatctgaccggattcatcgaagtattgagcagcaaagaacttcatatcgaaggactcgcatactgctacaattaccgcaaaaacaaaacacccaataccttatttgatgagaaatacagcgaactcctgcaagcatacaaaacgtacgccggcgacgaagtgcaggaactcgcccaacacctgcagcaagcattaggcaacggtgatggcgaaacgatcttccacaaaatgatcagcagccccatacgcccttctaaaaaactgctggaatcggcagccaacctgattcatgaaggtaatgtatccgcattcgccctaatcgaagagcagattatagcgcgcaatgtcattcttgataaaatccgcaaaatcggtaacaagaaaagtatcattatcgtaaaaggaggaccggggaccggaaaaacagtgattgccttacatatcctggctctattggcgggaaacaagaaaagttataatatccgttatgccacaaaatcaaaacctttactggaaggggtaaaagaccgattgccgcgtggcagtaaggctaaactgctattttcaaatgtaactcagtttattccggccaactgcgaacctaataatatagatgtattgctggtcgacgaagcccatcgcatctctaatagtgcaaacaaccaatacacgccgactgataaacgaaccaatcttacacagattcaaacaatcgtccaagcagccaagatatccgtattctttatcgacgacaaacaagccatccgaagcgtcgagatcggatcttcccaactcattcgggaatgtgccaaagaatacaatgccgatattgtagaagtcgaattaaaatcccagttccgttgcaatggttcggacaactatctggactggcttgaacaagttatctataatgaacctgtaaaatcatccttcaaagaagatgaatttgactttaaaatattcgacgatcctcaaacactgtatgatgagataaagagaaaagacagtatagacggacaaagcgcacgcctgactgcaggattttgctggccatggtcaagttctctggatgagaacggagattttgtaaaagatgttgccatcgggaacttcgcaatgccgtgggaaaccaaagatactattgccaatattcccaagggatatgtcaagtggtatgaatgggcatataaacccgaaggcatcaaacaagtcggatgtatatatacggcgcaaggttttgaatttgattacataggtgtcatcatcggtcccgatttacggtatgacacagagcaacaatgtctgattacagacattaaagaaatcaaagatcctatgttaaaacgaaatgcggcatattttgataactacgcccgcaacatctaccgtgttttaatgtccagaggcatgaaaggttgctatgtatattgctgtgatgaaaatttaaaagaatatttgagagctaaaattagagatagaaaataagaaagtatggcaggctggctggaacttgtttcaaacaggttccaaacaaaataaagcgtttgttttcggtatcatttacaaaaagttgtcctacagacgacatcagatacgaagataaccattaccgttatacacaatcaaaaaaacaaaatatgtatcttacaagtatgactcacgaggaactgtatgccgaagtgcataaggacctcatcgaaatatcgacccaagcaaatatgttcatggataaggttcgtaagaaaacaaagaacatgctgccatatcctttggcgacccagcgtataatcctcaccaccacccgaagaaatgtgtggacagtggtgggaaaacacaattcatatatgcaaggcgtaggatttcaggcttacgcccccgttatcggcgcttcaagcaatggctatatccaaatgtcgggcttcaagccccgtgatatggtgatgcattacacagcgcatttcatgcaacgatataaagaacgttacatcgaccattatcaaatagaccgcaagggagaaaacttattcgagtactttgtgtataacaatccgcaagtcttgtatacccgcaagaataatggcggctatttcatcgtttccgaccatggtatcgctgtagccgatttcagcgacggactaaaactcatgacccatgtcacttttctgggagatgatgaactgacgctaaagaaacagctcatctatgatgaggaaatcaaaatctacaaaggggcacttgagctgaaacggttaaaatcaagaaaacaaaaggatgatctcgtcacgatttggaatgttgccaagaagcataatgcaggtattgagatggtaaaacgatggtaccaatggaatggagtaaaagtggatgaagattatcttcaacaatgcattgatctcattgagaaatataatgtccagtcactcgatcaatttgcggaactcatgtcccgacaataaaaaggaccttcataaaatcttttttattaaagattattacaccaacatatgctaaaacctcagaactatcgagcacgaagttgccagaaagctacggcagccgcagcggctacattgagcgaatcgacgccgtgcgacataggaatacggactacgtagtcagcttcggcaatcgtttccggcgaaagtccgtccccttcggtacccatcacgatagccaatctgggttcggttgccaagacaggatcatcaatggaaacagagttatccgtgagtgccatggcagctgtacggaagcccaacttgcccaagtcgctgagagaaccgtccatccaagtccatggtacaaggaagaccgttcccatcgatactctgactgcacgacggttcaacgggtcacaagagttacgcgtcagtagtacggcatcaattcccagggcggctgccgaacggaaaatagcaccgatgttggttgtatcaacaacaccatcgatcacgacgatgcgccgggcttcccgacagacttctgccatactgcgcaccgcaggacgacgcatggcacaaagaacaccacgtgtcaggacataaccggtcaatgtagcaagcagttccctgctacccgtatagacaggcacattgccacaacgttcaatgatgttggaggcatcgccagtgatatgtttatgctcacacaaaatggctaaaggttcataaccggcgtccagagctctctctatgacctttggactttctacgataaaaatacccttgtcaggctcgatacgattgcgtaactgagcctcggtaagagtacagaatatctcaactccgggatgagacaaagaggatatttcgacaacaggcatattcttatttattactttcagtttgacatacaatcgctaccttgatgacgccgtccagcttgttttcaaagatacgatatgcctcctcaatctcgttcagcgaacagcgatgggtaataagaggagtggtatcaatctttccctcttcaatcagactgaggatctcagcacagtcacagccgtctacacctcctgttttgaaagtcaaattcttgccatacatctcaggcaaaggaaaaagcagaggtttgtcataaagagccacaatcgtgactatcgcattgggacgggcacagtcccacgccatccggaaactatcttcggtccccgccacttccagaacaacatcagctccaccgtgatcactgttttggagtacaaactccttgcagttctcaggtgtcgttatcagtacatcgggataatgttcacggacaaactgaatcctttcaggggacttttcacagacaatgatacgcttcggattcttcagcatcgagcagagcaaagtacaaattccggtaggtccggcaccaatgaggaggacagtatctttctccgtaatctccgagatacgagttgcccagaagcctgtggcaaggacatcaccgacaaaaagagcctgttcatcactgactgtatcgggaatacggttcagtccctgatcggcataaggtactctgacatattccgcctgtccgccgtcgatacggcagcctaaagcccagccaccgttggggtcggtacagttattgacatatccgtgacgacaaaagaaacactctccacagaaagtctcgacattcacggttactctgtcgccgggtctgactgatgtaacttcagctcccacctcttccacgacacctaccatctcgtgtccaaccgttattccgggtactgcacgcggcacactaccgtgtttgatatgcaggtcactggtacagatactgccaagagtcacacgcacgattgcatcccgtgcatccgtaattttcggttccggtttttctcgcaattcaaattttccgtgttcaatatatgtgtatgcaagcataatctcttctttatttaatgaatagatccattgcaaagatagtgatttcaaaaagaaatcgcatagaacaatggtattagcttatcaatcatttctcattcttgaaagaaagccttacatttgtagagaatacaaaacttgtatcccttgctatcataaataaaacaaagtcaacaaatgaaagaagaacccgacagcctgtctgtcccttacaattttgcccgttgcttcaacgaccaatgcccacaagcctccaaatgcttacgccacatagctgcacaatataacggagccgactatctttatatcaccagcgttaatccggcacgctatcctgcggacgggaatcaatgcgaatgttttaaaacggctgtaaaagttcatgtaacatggggacttaaacggttgcttgacaggattccttatgaagacgcagtcagtatccgatcacagttggtgggacactatgggaaaacaggatattaccgcctctatcgtggagaacgaggccttatgcccaaagatcaagcttatataaaacaattgtttcgtaacaaaggaataaaagaagagcctgcttaccaacgctacacagaagaatatatatggtaagttgctgtcatctgtcaccaaacaggagataacagattaattatcaacgaatcagcccgtgacagcaggaggtgattgcattgtgacggcatttttgctgtcacaatgcaatcacacatttattatttgttcccgctacccggtcactaactttacgacatggtaaagcgtaccgctacgtacatgtttggaggggatttcctgctttttcagtattcttccaaatgaattgacccttttcacggacatcggtatcgaactatttctctgaatatcttccataatctccgccggagacaaccactccccttcttcaggctgtgcggcacgaaaataacgaaaaaacaactgttcttccggaggaacttgctcaaattcacgattgttttccatcataatcttttcatcctcctggtcgaaccaatagcgttcgccatgttccaattcatacatggcttgcgcgtaaagctgctcataatctatcggacgattcgtgtcaatcactcccgtcacttcgatacagatgaaacgacggctaccggaaggatcggtcaacaggtctttttgattactcgtagcgataaatgaagcataccggcgcatttcgagcacggcactggcatgaggtttccgcatatttaccacaggcttttgcagaatatgtttcaagaagccctgttgtgtcgaactgacctgatcaaattcatcaatattgatgagcgcaaaacgattgagataaagttccgcatctttctttcgcgagaaatcaatgctgtcagtataataggaacgttccgaaggtggcattatactccggcaaaaggtagattttcgcgtcccttgcgccccgaccagcaatggcgaaacactgttcgcgtattttttatcataccctctccaatgagaaaccatattgagaaaccagcggtgaaacaagtctgtccaatacggattccggcaaggaacggtagctgccaattcacggatacggtctttaccgtcccatccgggaagtcgatagagaaaatcctccaacggattgaatacaggcacgcgatttgaatagatataccgactgatatccctgtcccacagtggaataccctccatttgtgcatctagggcaatgctattcagcgcccgtttgtcgagaggattgaaacgaaaacggaaagacagcctttcccgatattccacctcggcgatttgtgtgttatagcgaaattcataacggcgtttcatgaattcttcggtctgtaaggctagctgttgctctttgctcagactgatatttttgccgaaacctttacattcgagatatacgttgccaatcatctcccggatcaacacttcttgtttatacatatagaaatgaaaaacggtacgtttcacgacttcttcctgaggcaatcccgaagcaaaacaatttttggccaattgtacaaccaatggttgccatttatcttcccgtaattggaggcctgcttcgctaagatctgtataagcttttcgaaaagcagcttcaaaaagcatcaaaaaagcattttctgcatcatatcccggcacggcacgagtcaacggagacttctctgcctgcactgcctcccggaaagtcgtctcttcgggcatcgctgtgggctgcgagagataaaattgcacggaattcggacgatacataatatccggatcataagacaatcgcgaatattgctccaaagtcggctctttgggaagtatatcgaacgggatttggggctgataacatttcacggccagccgataggcgtgagcgtgaaacagttccgcctcttcccgtgttttgggcagtgagttatccggacgagtaaaagtggtccatatcttcaccgtttttccactcgaacccataaaagcgcaacgggtctgcggttgttcactcgctttttgtttcaccagagctatctccgatttattggacaggggaccgacagtcagttcaataataccattgtacgctttcatctgcttctgcccgtttacttttctaaattctgcggcaggaattatctcgggaagcttgtcggcaaacatacaccgatcatttggaagcatatatcttaattcttctctgaaagtggaaaccggacgggattttatctctgtttttactttgtttaccagtttttcaagatccattacgctgagcgctgttgtatctccatttttacggaattgggtaattttcatttatataataataggttgtttgtgtcagcgtcttcgtgtcgttgagactgctaaattactcattatatccgggaccgacaagaaaaaacgaaaatttaatatagaaaaggctgaccctaaagaagcaatctaagctgggtcatgataaggttatagcactgaattagtttcgtcgccttgaaaccatagtttcagcgaagagaaaccatagtttcaaaggcttgaaactttagttccaacagcttggaatcattagtttcaagcctttggaactatggtttcaagcattgggaactttagtttcaaactgcaaaacaaactgtttcttacagtagaaaagatcgttacataccgtgatgaaatcaacgacttcaaaacatatcccgaatcacaaatacaagggtgacagcataattgccatcacagtgctgtcacccactgctgtcacatcattaactatttataatctgatagttagaatgaaatcggtgacagatgacagatatattcttctttttaatttatagggagtgacagccagacggatgcaaagttataagactttaaaatttttcgtgtgttcaaccattttccgccatcgcattatattctgcaattttctctttgcaaagacgttcagtcatatctttcaaaatttcaacacgcgcaataagatattccagctgctcgcttgtgattttgtaatctttgttatagcgggcttcgatataggctcggcataatagattaaaacactctttttcgccatccgtattttgaggaaaaaccgttactagttccatcgaaaagcgctttaccattccaccaaggtcttgaagtctgtgacttttcggacggtaattcgtaaaaaccatcaatatagtattataaagtttctcacatgcttgatgaagcagaaaagcaaaaatcttattccgctgatcattatgcaatgatagtttcactaaatcaagaaaaccacaagcataaggataaagctcactaaattcattttgtgcaatatcccgaatctccctaaaactcaacttccgtggtttagccaattgatatttgccactatcgtaaagcaaaattccttcttttacaatatctgtaaagaaatactggctaacctccagattattgttaaccgtatttatatgttcgacaatgaattgcggaaaagcgtgacgacggtattcaaacaaatcatgatatttgttagtgatacgctccagttttctttctgcccgcttgactgctccgttggtgatgacaagaatatcataatcactctgatacgaggtacgaacaccgaactctattttagtatcccataaaacataattacccctggcataactcccgaacagaataatcatctgacagttatcgacgcttttgcagactaagtccagcagaactgtcagttcttcctgcgttcgcttgggcaaatgttttatagacttcttcatgaacacttattttgatgaccttacaaaggtaagaactttaccataccaagccaacaaggctactaaaaatcttaaaaataattatgcttaaatatctccactatatccataaaactatgtgcaacaacagtttctttcgggatagcagaaaatgctatacccggcagttccctaacataagtatttttcagttcactccagattgttggaaaatccaccaataaaggcgattgacctaaatgcttctccgtccatccttccggtttgtcgaatgtttccttatcatgctgtaacagattctcaaagtcttggcaaaattgttcagaatgcagatatacaacacaatctttatcctgcaaaagataatgcaggtcgtagaaatggcgtatttttgctgccatgtcatacatatatttatccgacaatgaaaaacggatcaacgataccagcttttccgtaaatgtctgtcttttatccaacacattcattgaaaatggtctcatatcgtattcttcgataagattgtcgtttcccgtctgcctaaaaaaatcgctgatgaaacactctattaccttttgttcatacggatagggattggcgaatgaattgatttcaactaacagttgtccgacatttactatttctttgatggctttgccaagtatattcggataagcatacatcgctttatagtatctggaacctttgctcgttactccttgtacgacaaattcatccagtccgacagtcatttctttggctatccgtttaataagcatctttaactgattgccgcttaaggaatttgcatctgaaatagctacatctatatcttcagaaaatcggttaccaattttgtaggctttggaaagcgaagtacctcctttaaatatagctctttctgcatttgaatcttgtgccatcagtttcaaagaccgtgttatccaatagtccttttctatatatacagcctttatatccaactgttccgctgcggcaagtacagcatccgtaaacagcttcttattttcgtgtaggttcatatattttccaattttgtttcgtgggtaatactgatgcagatagtggcaatttgtattcagttatgccatttagagactttcggataatacccaatagttctttatcacaacctgtattttccagaatagcaccacacaacgctcgtacatagcttgtatattgcaaggtacattttacgagtatttttttttgttcatcatccaattcctttattatttctttcaaccgcaaacaagcttcatcgggtgatgtgccgggtatttcgcggatgaaacgaattgcatccaaaatgcgtaatacttctatgtttttccgtgtaatcggattaggctgcaatataaatgaaatggtatatttctctcgtttcacagcacggcggtatttgtttgtacctatctgaatataagaggaaatttgagtcgtcagcccaagcgcattgtaggcagaataccctgtaatataacctatcagctttccatcacgctcaatataatctttggctatttggtagacggaaggcttcaatatgccgaactgtgtctttcgtggcttgtagaactttcctttggacagtttcatcaactcaccggaatccgccatacgattcaaagccttgaccacagccgctttactttgtggaccaaaatcaaaatctgatgcagttaatacataatcatcagaaaaattacgaactaattcctttatctcttttgttatattcatgatcaaaccgctaataacgctgcaaaggtaataaaaagtcccgttttttacgtgaaaaacgggacaattcacaaccgtaaggaaaaggttgcctaattctcttgcacaatatcccgaatctccctaaagctcattttcctctaatctccaacacaatctttcaaagaacagtccgcctataccaacatagcatctctacgaacagtcccttttcagttatccctgccgcaacatttcttatatttctttccgctcccacaagggcaaggatcattccgtccgattttcgttccggagaatgtatcataaaacataccatcaaccattgtttgcattttaggagtgatatccatgcctgctgctttcatcgttggtccggcaacgatacgaggaggagttttcaccgattcacccctaccaagtaaagcagatgcttcggtggacgagtgacctttcaagaaccaacggggacaatcattacaatagtttacagctattccaaccacttcctgaagttcttgcatagaaagaaccttcgtgtctattgccgaaacaatagcagacatcggattttcgtccatctgtattgcataccacagccactgtatcttggcctcagccagttcttcattataacctaatttcctcatcataaatcctttcagttgatccgaatgcggattggaaatatagaacacaggcatcgttccagccgacaaaacctcttcgacggtaaacttcttcaaactttttatagcacgatgtgcatataatctttcctccaagtcctcaacttccaataataagggagatcgaacatacataacagaattatatatatcttctatatcaatcgtcagttgtctcatcaacattgaatttgataaacctttagcaatttcgtcctttgtcattgaacccttcaagtatccggtcagttgcttcaagaattctgtataaggtaagagaccataaagatttaaaattcctaaagcatactgctccagcaccaaacggctgttctcttccgttgatgtcaaaaacttatcaatatggggagcaaccgcttcacgcaactcatcacaaatcatataacgaatcttgtctccgttcaaaccacggtcggtcgcaacaaaagaaagtaattctaatgtactcgtcattatcatattaggttcttccacataggtattggctcctgctttcaccaatttttgaaggagcaaccattcataatgtgtcaactgcggaatccatatatccggacaagtcagaacagcttctgcaagacaggatacatactcttcttttcgcaattttgaaggaatgggaagaagaagcaactgtgctacatctttcaattcttcttttgtactcaatcttaaaccatccgccaacttcaccgacgatttaaacaactctgaatgacattttaacatatagaaggcttattattttgtttaccgacaaaaatagataattcttatgtaggattactatttccaagtaaatatttgctgataaaattagtatttatatctttgtgactcttaagacccaaatacaaaccaattaatgaaaaaattagtatgcgctcattcatcctgcttctctgtctgatccccactattatctgtgcacagaatctttctctggaggaccaactcaaacaggctatcaaaggcaagaaagctgaaataggtattgccgtcattatcgacggaaaagatacggtaactgtcaacaatgacattcattatccattgatgagtgtattcaaatttcatcaggcgttggcattggctgattatatgggaaagcagcaacagtcattgaactttgaactgaccataaagaaagaggatttaaaacccgatacttatagtccgctgcgggatagttttccacagggaggattcaatatagacattgcggatttattaaaatacaccctgcaacaaagtgacaacaatgcttgtgatattctgtttcaatatcagggaggggtagatacggtgaaccagtacatccattccctgggcgttacggattgtgccattgtctgtacggaaaacgatatgcaccaagacgaaagtctgtgttatcaaaactggactactccgctggccgccgcgagactcttggagatattccgtaaagaagcactgttcccacaggaatacaaagacttcatctatcagaccatgacagaatgccagaccggacaagatcgactggttgctccattgctcggcaaagaagttacaatcggccacaagacggggacgggtgaccgcaatgccaaaggacaacaggtagcctgcaatgatatcggcttcgtcctcctgcccgacggacacgcttacagtatagctgtcttcgtcaaagattccgaagagaataatcaggagaacagtaaaatcattgcggacatctcacgtatcgtttacgaatatgtgacgcatcaataaaatagaagtataacaacattaactacgattcttatgaaactacatcatatcgccatctggactttccgtctggaagaattaaaagatttctatgtccgctttctgggcgggacaagtaatgagaaatatatcaatcccaagaaggggttcgaatcatactttatctcttttgatgaaggtcccactctggagttgatgagtcgggcagatgtgcagaataccccgatagaggaaaacaggcggggactgacacatcttgctttcacatttcccagcaaggaggagattcttcgctttacggaagaaatgcgctccgaggggtataccatagcaggtgaaccacgcacttcgggcgacggatactttgagagcgttgtactcgaccccgacggaaatcgtttggaatgtgtatacaagaaagaaccggaagcagaaagaaccgaagcggctctatgcccgaatatcgaaacgaaacgtctgctactgcgcccttttcaggagaatgacgcagaagcattctttgcctgttgccagaaccccaatttggggaataatgccggatgggctccccacaagacgttgaatgaatcccgtgaaatccttcacggcgcatttataggacaggaaggtatatgggctgttacattaaaagatacacagcaattgatagcttccatcggcatcgtacccgatccgaaacgggaaaatcctcaggtacgtatgctgggatattggctggacgaaccgtattggggaaaaggatacatgtcggaagcagtgcaagccgtgctcaactatggcttcaacgaactacagctcagcctcatcactgccaactgttatccgcacaacaaacgttcgcaacaagtgctgaagcgaaacggatttatctacgaaggtacacttcatcaggcagaacttacctataacgggaatatatatgatcatgaatgttactacattcccaatatagcacgccccaccgaacaggattacgatgaactgatacagctgtgggagaagtctgtacgtaccacgcaccactttctgacagaagagagtatccagttctataagccactgatacgcaaccactatctgccggcagtagagctctttatcatccgcaactctcacggaaagattgccgcattcatgggattgagtgatgaactgatcgagatgctgtttgtacaccccgacgaacagggaaagggatacggaaagcgattgatagagtatgccatccgccaaaaacagatcgacaaggtggatgtgaacgaagacaacgaccaggctctccggttctatcagcatctgggattcgagatcatcggacgggatgaaacagacagcatgggcaagccgtatccaatcctgcacttacaactggccgacgataaaaaataagatactgaacccaaaataaaaatggatttacgcacacaactggccacacgcttccatatagagaatatacgggaactacttcattatataaaagaagacgaacggctcagagaggaaatttaccggctgatctttgatgaggatgacgttgtctcttatcaggcattgtgggtttgtacgcacttctcaaagcctgaagtagaatggctgactctgaaacaagacgaactgatagacgcagcacttacctgcccgcattcgggaaaacgaaggatgttactgaacctgctatgccaacaacagctagccgaccctccacgagtagacttactggatttctgtatggaacgaatggtatcgagaaatgagccggcaggagtgcagtctctttgcatcaaacttgcctatcagctgacctgctccatccccgaactacagcaagaattgcgcactatgctggagataatggaaccggaattgttggttcctgccatacgttcagtaagaaaaaatacattgaaagctatccaagcaaagaaaaagaaagaacatccgaactcataatatattcagatggaatatctgggaaatacctgtgacggaaatctgtataccgatgcaaaaggtaaaaaaggcaacgagtttattaataatctgatttcctacaggtcccagtttctgaatgatcctctgtccctgtgaaagaaacacatagagtatcccagccatacaaataatgaccagcgcaatgaccagataattgattccggtatgcaacagtttgcctttcacactggcagatgccatcaaagtaaagatcacggatatactgcccggaccgatactgataggaaacgtgatgggataaaatatcttctgctcgatgctcttccacttgaagctgtccacattctggctggtcccttctttatcggaagaattggaatcacccaacagctcaatcgctgtcttacaaataagtattccaccacccagttgaatcacaggaatcgccagaccgaaaatcaataagaataaatgacctatcagtaaagtgcctacaccgatcattataaagttaatggttagtttctgaatagcagtttttcgttgtgaaggatcaaggtttgcaaagaatccattgacgacaaaaccgtttcctaaaggattgatcaccggaaacaatgccataaaagaagatgaaaatatgattaaaagactacttaaagacataacgctcactttttaattgcttcatgattatttgaatacatatatgatatgtaaaacactcagcagcgcttatggatgccgcaatcatgacaaacctcttattattttgatattttaaccgatttccgtgtatttacatattttacatccaataaataaaacaaaaggccgcttcctttgcaggaaacagccttatcttatcttttcgtcgttactcaattaaaataatacaggaacacagcaatcccttcaagggctttcttcggttgatccttaatctcaattgcaaacttgatttcagcttttgccacaccgcgcagattggtcagtgagtgtagagtagttaccagacgaatgctctgtccggacaaaacagcctgaccgaatttcatcttatccatcccgtagttgatcatcattttcagattgttcacctgaataatctgattccacaggtaaggaagcatggaaagcgtcagataaccgtgagcaatcgtactgtgatacggactgtctacttttgcacgttctgtgtctacgtgaatccactgatgatccagtgttgcgtctgcaaaaaggttgatacgttcctgagagagttccacataatcggaaacacctatttgttgccctaccagcttttcaaattcttcgtacgagttgataataactttttccatcgtctcatcgttttatgggggttatacatattgattaatggggcaaaaataggaaaaataaatgatacgccacctatttacatgacaaaagcgttaacataaaatttcatagatgctcctgtctgttgaatgcctgcttcagcgccgtacttaatatccgatacccttttccattcaaatgcagatcgtcaatagtcagctccggatttaatctgccgttcatcagtaattgatcaaaaacatccaaataaatgacgcctgtccctgtcagttttgcaactatcttctcattcagtatgcggatgaacttgttcacagccgtactgtaatcatcataatcattacgaggaaaaatacaaaagagatacgtttttcgggaaggaaccgcaagaacagctttcacataccgctctacataatcatctgtattttcttcattcagctgataaatgtcattgctcccgaactgaatcactacctgacagtcggatgtatcttcatgaaatgactcgacatacgccagcccttctccgggagcaccgtagttcagacattcccattgagggaaatatacattcagtgcccagaatgccatgtggctgttacctacaaaagcgaattttggtttgtcttccattttattcctctattttattccaactacaaaacaaatatagaataaaattcgcggatttgccttacttttgcaatcaataacgatattcagataagaatcaatgatacattttttcgaccaaccggtttcccatattgcactaccggaaaggtttacataccctttcaactatactcctcatccgctatgtgtattagcggccgaagaagtcaaagcttatatctcgacaaagaaagagtggcaagaggaactgaccctcggaaaaatgttcggagtactgatcgtacaaacccaggaagaaggatcttcctctatcggttatcttgctgctttttccggcaatctggcaggaaagaatctgcatccgtatttcgtcccacctgtttacgatttgctgcaaccacagggattctttaaaatagaagaagaacaaatttcagctatcaatgtccgtatcagtgcattggaagttaatcctcattatctgcacttaaaagaaaaactggacagggaaacggaacaaacaaggctggctcttattcaagccaaagaggaactaaagacagcaaagaaagaaagggaacttcgccgcaagtcatcccctgccctgtctaaagaagaacaggacgcacttgttcgtgaaagccaatatcagaaagcggaattcaagcgattggaacggggatggaaagaacgaatcaaaacgctggaagaagaggttatcacctttgagacggaaatagaaaaactaaaaaacgaacggaagcaacgttcggcagccttgcagcaaaagttattcgaacagttccgtatactgaatgcgaaaggagaaataaaagacttatgtactatctttgaacaaaccgtacacaaaatcccccctgccggagcaggcgaatgtgccttgcccaaattgctgcaatatgcctaccttcaccaactgaaaccattggctatggccgagttctggtggggaaactctccgaaaacagaggtacggcatcacggttattattacccttcgtgtaaaggaaaatgcgaaccgattctgcaacacatgctgcaaggactggaagtagacgggaatccactttcgccccaagcacacaggaaggaagaattagaaatcgtttttgaggacgaatggctggtggtagtcaataagccatccggtatgttgtctgtccccggaaaagaagaggagacggattccgtttaccatcgtgtaaaagctaaatatccggaagctaccggtcccatgattgtacaccggctggatatggctacttcggggttgttacttgtcgccaaaactaaggaagttcatcaacacttgcaggaacagttcatcaatcgcagtattaagaagcgttatgtagccttgctggatagaaatggattgaaccagcaactcgaagaaacaggaaccatcaatcttcctctttgcctcaatccgctcgaccgcccccggcaaatggtcagtgaagaatacggcaaaccggcagttaccgaataccggattctgaactattccgataagtacatacgcatcgctttttatccattgacagggcgtacccaccaactacgggtacatgccgcccatcatcaaggattaaactgccccattctgggcgatgaactctatggaaaaaaggcggacaggctctatctccatgctgaatatattgagttccgccatcccgtttatggcgatatcatctgcatacagaaggaagcggagttctaaaaatagtttcttccgatatgaactaaattctttttgaaatgtatataggggtaattactaactttcaaaaagaacctgactatgaattttaagtttcgaattacaaagtatctggcagtatccgcactggcggtgctgctgttaggagcctgctccaaaaacaacatttatatggatgttgcctatccgaacggagaagaaaatagtgccggagaagagggaaacaatgacaatcctgacaaaaaagatgcactcattactttcagtgcttccgtagaaggaagaaatataacgcgtgccatgtctccgatgggaaaaggattgcagagctggttatgtgcctacccttccaataccaccaatacgatagagggagagcctgtcggtgaaggcaactatatcacttcttctcccggagtgttgacgggaatacaaagttataaaatgtatctcagtaatgatatctatagtttttatgcggtttcctgtaattccagcaaccccgctcctacctttaccaacggcaagtccgaagcattatccaatggggtggattatctgtggtggcatgccctgcatcaggatgtgaccagttcacaagtcaacattcccatcacttaccagcacgtagccactcaggtcgtgataaccataacgggaggtgagaatattacactcaacaaagtactctccgccactattactcccacgaaaccgggagctttcatggatctgtcaacagggatcatttcttcagaagtcagttacgataagcctgccgacatgggaatcaatgatttcacggttcaatatatcatgcttccgctgaaaagttccgatccgatggctttaacgatggaattgatggtcaacggagaaagtttctcacgtacttacaatacgaccattaccccgccagacaatattctggctgccggaaattcatatcttttccgtgcagtaatcaacgaaaactccgtatcattcggtaacgtgagcgtaaaagactggacggatgtagatgaaagcggtaacccgctgtatccgatacaagactaaaatatgataaagtatgtgtcaaaagtaactaaactcccctacgggtatattgacttttgacacacacttcaattatacaacgacacttgtcagcacctgacgtttcaacctgcgataaacataaataaatgcaggaatcaaaaacaaatcagccgctatccatgccatcggatcaccgtaacaaacagcgataaagccgaaagccggcacggcataaatactgacgagaatgcgtgcaatcatctccgacactcccgaaaacatagcgagattagtatatcccaccccttgaatggtatagcgcaggatacaaagtaacccaagcatcgggaagaaagagactgatatatgcaggaaaagttctgttttctccaagatctcaatttccgacggatcaacaaaaatcaaggcaaaagatttggctcccagcatcagaatcaagaaagtgacggctgtatagataaccatcatcagcgtgctggctttaatccccgaccaaatacgttcaggctttccggcaccgtaattctgaccgctaaaggtagccatagccatacccagactctccaacggacaaaggaaaaacattttgatacgcatcgcagaagtaaaagctgccacacacgccgtacccaacgcattattcgcactctgaagcatgatactgccaatggccgtaatggagaactgcaatcccataggaacgccaatggaaagcaacgtcttcgccagcttcgactgatacttccgttctttcggcgtgccccgcagaatgtcaaacttccgatacatataaacgtaacaaagaaaagcggaaactccctgcgaaaagacagtagcaatggcagctcccatcactccccagcccagtaccaaaatacagaataaatcgagaataatattgagcaccgtagccagtaccaagaaatagaaaggtgtcttactatctcccaaagcacggataatgcttgacaacagattataaaagaaagtacaaggtatcccaataaaagtaacaagcagataagcatacgctccttcaaagatattctctggtgtacgcatcatcttcaggatatccgcacaataaatactggtaaagatggctatgaccacagacatcacaacagcaagttgcagactgacggaaacgtaactgcgcatcgtactataatccctcgccccaaacttctgtgccacggggataccgaatcctccacaacatccgttgcagaaacccagaataagaaacacaacggatgtactagccccgacagaggctaacgcattaatacccaaaaactttcctacgattgcagcatcaacaagcgaatacgtttgctgcaacagattgccgaacaaaagcggcagagtgaaattaaaaatcagaggtaatgccggccctgccgtcatctctttagaagttgccatacgtctatgtcctaaaaattggctgcaaagatacagaaaaatccggttgaaagattctaatcccgcaccctctttttattgacataaatcaaaaaaagacgaagtgccggcaactgtctatctcttcaccagtcttttcggcgaaccatgccaggaacaacccagacaataaacttccgtcaaatcaaatccatcggtggaagctgccggatctttaggcacaacttctccattttcgagtacatagaccaaaagacgctctttacggtcattcaccacatatagggcagcaatcttgcattgcggacataataactttctcatgccgcaaagatacgcatagtttccagcaacggcaatcattccagtggaagttctttgcagaatatgcgatctgtttattatctttgccgaagtgaagccagcctccaaagccaaaagaaaacaaatggaaacagataaaaaaccgcgtatcactcaggaaaagagaaccgtagagatcatgatccgtctctattgccggaaaaaagagaagaatgcaaccctttgtccgaagtgcgaagagttgctccgctacgcacatgcccgtcttgaccattgtccgttcggagagaaaaaaagctcgtgcaagaagtgtcccgtacattgttataagcctgccatgcgcaaacggatgcgagaggttatgcggttctccggtcccagaatgttattctatgcccctttagaggcgatacgccatttattctcctgagcggcaaagctataccggcaaaattgtcttaacggtttttccagaatcccggataaaagagtaacagaacgctgaaaagttccagtctgcctatcaacatcagaaaagaaagaacccattttgccaagtccggcaaagaattccacgagtatgcgggaccgcaactacccaaacccggtcccacgttaccgatactggagattaccgtactgaccgattcggagaaaccgactcctaaaaataaaagaatcgtccagccgatcagaataatcaccagataaaaagcaaagaacagtaatacagtcgttacgatggaagaagatacggtttgtttgttaacccgtaccggaagcaccgcattcggatgaagcagatgtttgaattcattccggatggtccgcgccacaatcagtaaccgcatattcttgatacctccgctggtagatcccgtacaacctcccgaaagcatcgctataaacagcaacagccacgtgaaaggaggccacaaattatagtcatccgtcgcaaagccgcaggatgtatgcaccgtagctacctgaaacaatgatttacgaaaagccagctcccatccatagttgttctgaaatacgagtgccaaagtgataagcaatgtcaatatcccgacagagcccagaaaccaatgcgtttcttcatctttaaacaagcggccgacttttcctttcagacacatcaggaataaggaaaagttaatactggagataatcataaagatagcgacaacatactcgatatacggagaattccagtaagaaatactgttttgtttggtagaatatcctcctgtcgccgtagtagcaaatgattgacaaatggcatcaaataaatccattccgccaaacatcagcaggatcgtctccgaaacggtcaatatcagataaacagtccacagccatttcgccattacattgattttgggatgcgtgcggtcatgagtcactccggtagtctcggcagaaaagagctgtacgccgcctgtggtaaagatcgggagaatagcaatcgtaaaaaagacaatccccagtccaccaatccactgcgtcaggcttcgccaaaacagcatcccatgtgaaagggactcgatatcatcgagtatcgtagctcctgtggtagtgaatccggacatcgtttcgaagaaagcattggtgatggtatcaatgctcccgctgaaataaaaaggaagcatcccgaaaacggtaaagaatatccatgaaagagtgacgacacaatatccgtcccggcggctcatcttattctccgctccccgtccgtaaagcaataataatcctcctgctacggcattaatcacacacgtataaagaaaatacttataatcatcctctccgtaccccaacgaaataccggcacacaaaaggaacattcccaactcaataaaaagcaacgtcccaagcacccgtcctatcattttcggattgatcatgctgttgcttttagcacgcgcatacacactattgtctgatatatactcttccataactcatgaattactctgcacgaatcccatagctaatagtatgccaaaacagccgtattctttttaagctgctatttatcagcaacatactatttctgctttgaaaaacgagaagactcctaccctaccaaaatgaaaaggtttcctgtcaaaacgaaaaggatggctttcaaaatggaaagttcccctttcaaaatagaaagatttgactatctttgttccaaaaagatgaaacgagccattatcataggcgccacctccggtatcggaaaggaagttgcccaacgcctcctgtccgaaggatggcagatcggcatagcgggcagacgccagtcagctctcgaagatttccggcaaatcgcaccggaacagataaaaatccaatcactggacgtcactcaggaagacagtgccggaaaactggatgcgcttatccatcaattgggcggtatggatttatttctgctcagttccggcatcggtttccaaaatatggatttgaagatggaaatcgagctgaataccgcacgtaccaatgtcgaaggtttcacacgaatggtggataccgctttttcctattttaagaacaatggaggcggacacctggctgtcatcagttcgattgccggaactaaaggtctgggagttgcccctgcctattctgcaacgaagcgctttcagaatacatacatcgatgctcttgaacaactcgcccacctgcaaaagttaaacattcactttaccgatattcgtccgggatttgtagccactgacttgctgaatgacggaaagcattatcctatgctgatgaaaaccgaccaggtaggccgcgacattgtacgcgcacttcatcggaaacagcgggtagctatcattgacggacgttatcgtattctcgtattcttctggcgaatgattccccgatggatatggaaacgtttgccggtgaaaacaaaatagcaagatcggataactgagaacttattgaaagtaactatatttgtaaacagataaaagagaattatttatcatgcttttactcacttaaaatcaataaaaaatggaacagaaaatttgtcagtgttgtgctatgccaattgatgaaacgacattcggaacagaagcagacggcagcaagaatgaagagtattgccagtattgctatgcagacgggcattttaccaaagaatgcacaatggatgaaatgattgagctcaacctgaactaccttgaggagtttaataaggattcggaagtaaagtacactatagaagaggcgcgggcaacgatgaaagagttcttccctcaactaaagagatggaaacaataggctaaaaagggactgacccgaaaattcttcttccaaacgtatctttgtcacaaatatccattacagcaaagagaaaatgacttttcgtgcttttaggtcagcccctatttattcaactatccgcattcatttccggatggcgttcaagccacctcactgcataggagcaggtagctttcggtttcatcccgttggcgagtgcaaagtcgtaagcagctttcaccagtgcggcagcaattccgcgtccttctatcggtttagggacaatcgtgtgaataatatcaagataatcacctaacaggcgatattctacaaatgcggtacgaccgtcgacttccgtcttgaatagtttctgttcgggctgatgagtaattttgtaatccataatgtttattttaaagttgttcaatccattgtagccgattcgtatcatagccacgacgttcggcggcagttactaatttcttttttatatcttccggcagttggggcgtccgactcaatatccagagatatttatcggtactgctgcctataagagcataattgtaattctcctgatccaattccatcacataataatcggaatagaaattcaagaaaaaagagactttcagtttaccgggctgtgcagggtcgggaatcttggcgtgtccagtggctgttttacaaatatcgtaaggggaattgcgtttatatccccgattctcaacacgaattgttccatcggaacggagggtataagtagcggtcacttccataagcccacgttcgaaacgatgatcataacgggctatctcgtaccaaagccccatatagcgtttcagatcaagccgatctaccgtactgtgatctgtctcctcaaacaacttctctatggtaggaacggaaaaatggaatccggcttccagcaaacgtgtaggacgcacactctgtccggctgtcagaaaagaggcggcttcaccgtagagcaaacgaaagaccgtttgcggaacaatcaaagttgtccacgcatgatacgcctttcccatcgcacgtgtaaacgtggactgtgaaactgcttgaggagcaaccaaattgaaaacacctctcaactcttcattttcaataaagaaggccatggcacgacaaaggtcacgaatatctatccacggaaaaggttgcgtacccggccctatgacggcggcaacctttgttgcgcgtagcgggcgaagcatctgttgcatcgctcccccatcgggagaaagcactacaccgaaacgggtaatgacaagcctggtcggttgcggacaacgcttcgcttccttctcccacgcataacaaagatcggacagaaaaccatcgccacgagtctgtgtatactcgtccgattccaccaaagaggggtaatatcctacagcagaggccgaaatcataagtttcggtttggttttgactgcattcaaggcacggataatgcggtgtgttactgttatccggctattgaaaagctcttgtttatgttccggcgtccagcgctgattgataggagcgcctgccaaatttataatgacatcgcaatgcgtcagcgtctgaaccaaaagtccggacataccttcccgaaacatcgctcttcccaaaggaatgatccgatgtccacccttttcggtcagatagttagaaagatgtttgcctatatatccggtggctccggtcattgctatattcatcttgattcttcgtttttttaactatactagagaaacgtatcaaaagcagaaaaggttctttgaaaaaagtaaaataaactatttcattgcagttgttatatatattgataaactctgccccctacggaggtatgcttgtgccaacactgtggcacagttgtgccaatgcggtggcacagccgtgccaagcctttggcacaactgtgacaagctgttggcacaagtgtgtaaaagcaaggcgcagtattagcatgccggataacgtctctcaacatctcagaagaaagtgacactccggtaaacggatgtattttgttctgccgaattagggctattctgattaataagcattatctttgcaagagaacatttatagaaccattaaaaagaaagaacatgattgaggcacccgaagcgctctatctatgcgagcaactgaacaagactgtcaagggaaaacgaatcacaaatgtattcaccctgttcactcctcacaaattcgcttggttttccggaagtcccgacgagtatgccgaatggctgaccggaaagacaatagaccacgcacgttcacaaggaggcatggtagagatgacaataggcgacaaaatgctgatacttacggacggagtaaatctccggtattacgcacccggaacgaagctgcctgccaaacatcaactcctgatcggctttgaagacgaaagctgccttatcgcttccgtgcgcatgtatggaggaatcatgtgttacagcaaggacgccgccaacggcgtactttccgaatattaccggacagcgaaaagcaagccgcaggtcatgtcggacgctttcagcaaagaatatttcctcggactgattaatgatgaaagtgcgcagaagaaatccgccaaagcctttctggctactgaacagactgttccgggactgggaaacggtgtattacaggacattctgtatcatgcccacatccatccaaagaaaaaaatagcagcattaacggacaaagagaaagaaaatttgttctatcaagtaaaggagaccatgaacgatatctaccggcagggtggacgaaacacagaatcggacctgtttggagaaaatggcaagtatacagcttgcctctctaaagacacggcaggcaaagcctgtccccgttgcggagaaaccattgtcaaggagaattatcttggcggtagcatctattactgccgtggttgccagatattggaataagaaccaatcaaatgactaaaagaaaacagaaaatgaagaaatttaccaagatcaactacattctaacctttatattagtgttctgcatcggagctaccctgcctattctgatcggtagcagtcatgtagacgaacagcattccgccaaatcggaagtgccttattgcgtcacctcacctaccgtccccgagcaggtgacttttgacggagagacgatcgacctccgccgttacgaccgccgagaacggatggatcgggagatgatggcgttcacctatatgcactccaccaccatgctgcttatcaagcgtgccaaccgttacttcccgattatagaaccgattctgaaagcgaacggtatccccgacgatttcaaatatctgatggtcatcgaaagtaatctcaacaacatagcccgctctccggccggtgcagccggattatggcaattcatgcctgctaccggacgcgaattcggactcgaagtaaatgagaacgtagacgaacgttatcacatcgaaaaggcaacggtagccgcctgcaaatatttcaagcaggcttatgccaaatacggagactggatggctgtatctgccgcctataatgccggacaaggacgaatttcctctcaactggaccagcaacttgccagccacgcaatggacttatggctggtagaagagacttcccgctatatgttccgcctgctggcagtcaaggaaatattcaagaatcctcaacgatacggattcctgctgaaaaaggaacacctgtacccgcctatcccttacaaagagataacggtcactacccccattgccagcctaagcgattttgccaaacagcagggaatcacgtacgcccaacttcgggacgcgaacccttggctacgcgaacaaagcctaaagaacaggaccggaaaaacatacgttctccagatacctacacaagagggaatgtactatgatccaaaga

SEQ ID NO: 4545 - DNA, 14958 bp, Unknown
  gut microbiota DNA sequence
atgttttgtgcgggctgtttgttgccattggtttaaaacatatccgtgaatctgttgtttatacgatagatttattttaattttgtcaccaaatacgatgaaacaatgtctcaattacctacactcattgccgatcttgcgctgatattgatctgtgccggcgtcatgactttgttgtttaagaagttaaagcaacctttggtgttgggatatgtggttgccggttttctggcaagtccgcacatgccttatacaccatcagtaatggataccgccaacattaagacatgggcggatattggcgttatcttcttgttgtttgctcttggtctggagttcagttttaagaaaatcgtaaaagtcggaggttctgctatcatcgctgcctgcaccatcatcttttgtatgatattgctggggataggtgtcggtatgggattcggctggcatcggatggacagtctgtttctaggtggtatgattgcgatgtcttctactactattatttataaggcgttcgatgacttgggactgaggaagaagcagttcaccgggcttgtactgagtattctgattctagaggatatactggctattgtattgatggtgatgctttctacgatggcggtaagccataactttgaaggcaccgagatgctggagagtattggtaaactgctgttctttcttattttgtggtttgtagtaggtatctatctgattccggagtttttgaagcgttgcaggaaactgatgggagaggaaactctgcttatcgtatcattggcactgtgtttcggtatggtagtgatggcagccaatacagggttctctgctgcattcggtgcgtttatcatggggtctattctggcagaaacaatcgaagcggaatctattgaccggttggtgaagccggtgaaagatctttttggcgcaattttctttgtatcggtggggatgatggtcgatcctgcaatgattattgaatatgcaatacctatcattgtaattacgatcgcagttattttggggcaggctaccttcggaacattcggcgtgattctttccggcaaacccttgaagacggctatgcagtgcggtttcagtttgactcagattggtgaattcgcatttattatagcttcattgggtgtatctctgcacgtgacgagcgatttcttatatccgatagtggtagcagtttctgtgataaccactttcctgactccttatatgattcgtctggctgaaccggcttcttcttttgtggatgctcatttacccgcttcctggagaaagttcttaatgcgttattcttcgggctcgcaaacagtacttaatcatgagaatttgtggaagaagctgttgctggcaatggtacgcataactgtggtatattcaatagtcagtatatccattattgcactgtctttccgttttgtcgtcccattctttaaggagaacctgcctcatttctgggcatcattattgggggctgtttttattatcctttgcatttcgcctttcctacgtgctatcatggtgaagaaaaaccattcggtggaatttatgaccctgtggcatgataaccgtgccaatcgtgcaccattggtgtctactattgtcatacgtattatgattgcggcgttatttgtcatttttgtgatatcgggattgtttaaggcatctattggattgattattggagtggctgtgcttgcagtcttgttgatggtatggtcgcgtcgtttgaaaaagcaatctatattgatagaacggcgtttctttcaaaatctgcgttccagagaggtgcgtgcagaatatttgggagagaagaaacccgaatatgccggacgtctgttatctcatgatctgcatttggcggatttggagattccgggggaatccacttgggcgggaaaaacgttgatggaactaaatttgggaaagaaatatggcattcatatcgcttctatcttgcggggaaagagaaggattaatattcccggtggctcggtgcgtctttttcctatggacaagatacaggtaataggaacggacgaacaattgaatgtatttagcagtgccatgcaaagtggtgcgaagatagactgggagatgtatgagaagggagagatgactttgaagcagttcattattgatgcagactccgtttttctgggtaaaacaatccgtgaatcgggtatacgggataagtatcattgtatgatagccggtgtggaacgggaagatggcactctgatggtgccggatgtaaatgcaccgttcgaagagggggatgtagtgtgggttgttggtgaaaaagagaacgtgtaccaattagtcgatcaaaaaaacgaaaaaatacaggtgaaataaaagcagaacgactatttttgctttgtcaaaacataaaaataagaatatcatgaagagtgatccaaaagaatgtctgtattgccagaacaatgaaacgttgcataatctgatgattgagattgcgcagcttagtgtatcacgtgtgtttttgtttaaagagcaaacttatcgggggcgttgcctcgttgcttacaaggatcacgtaaatgatttgaacgaattgagcgatgaagaccgtaatgcatttatggctgatgtggcacgtgttacccgtgcaatgcagaaagctttccagccggaaaagatcaactatggtgcttactcagataaattatctcatttgcatttccatctggctccgaaatatgtagacggacctgattatggcggtgtatttcagatgaatccgggaaaagtttatttgaccgatactgaatatcaggagctaattgatgctgtgaaagcaaatctgtaatcaacagttggtaaaataataaacggtgaataaacttgtaacttcatgctataagtttattcaccgttcattatttacttatcttcgtcgaaatcaaagtcgaaatcaaaatcatccataaattccggagctgtgaattcctccagacttctgcggtcttttttggttggacgtccggttccccgtgcgcgatcaatgaatccgctgattttactcatttccaatagttcgtattggtcgggagtggtaacgttttccattacatcgggtacaagctttgcgcctactcgcttctcaatagcttgcagcactttgaatgaataggtaataggcggcttcttaacttgaactacatcacccggctttatcatgcgagatgcctttacgtatgctccgttgatagtgacacggttcatcttgcaggcttcggcggcaattgtgcgtgtcttgaaaatacgaacagcccacatccatttatctattcttgcttctgccatatattgataatttattaattaacagtgtaccatgtgtcatggtggagtacttaatgaccgtttgcatatatacgctgtgaaatagtcaattgtaaatactcctatttcttattgaactggttcatggtaatatcaatacctgccagacagaaacttttaatgatttctccggctgtttccagtctttcatccattgtcttgcgatcttcgtcagtaaagtgtccgagtacataatcaatctgtccgcctttggggaagtcatttccgataccaaagcgtaaacgggcatagttctgagttcctaaaatggctgctatgtgcttcagaccattatgtccggcatcacttccttttcctttcagacgcagagtgccgaaggggagagccagatcgtctactactattaacacattttccaaagggatgttttctttttgcatccagtagcgaacggccagtccgctcaggttcatgaaagttgacggtttgagcaggattaactggcgtcctttgatcgaaaaactagtggtaaatccgtagcgtccgtcaataaagggaggagcattgttgattcttgccaatgcctctactgtcatgaaaccaatattatgccgggtttcatgatattcgggtccaatgtttcctagtccgacaattagatatttgatcattgttttttcgtaaaaaacagttcgtgaatataaaaagaaaaacgcaaattaacgcaaactaatgcagactgaacatctgctttaatctgcattaatctgcgttttgctatatctctttacagggataatctcaaattactttccagcggctgctgctgcacctcttgctgcacgagtcaacttaacagcacatacaactgcttccttagcgctaatcagttcaagaccttcgaagctcagttcgccaactttaacagtcttacccaatcccaggtgagaaacgttaacagtcagtttttcaggaattacattgtacagagctttcactttgatcttacgcatctgcaatgcaagcttaccaccggctttcacaccttctgcaagaccttccagttgtaccggaacttccataacgataggtttagcttcgtcaatctgatagaagtcaacatgaagaatgttgtcttttaccgggtggaattgaatatctttcaggatagcgtttacttttttgccatcgatatccagatctactacgtaaatgtgcggagtataaaccaagttacgaagaccttcgttagtcactgtaaagtgaacaacttcaccagctccgtaaagtacacaaggcacaccaccgttcttacgaatttcttttaaagctcttgcttgttccgaagagcgttctgcaatagttcttgcagttccttttacttcaattgatttcatttcttaaaaaattgtgttactctaaattaagttattttgcttaattcaccattacacgatgtggattatcacatgatgttgcaaaaaagcggtgcaaaagtactgtttttttttgaaatatcaaagagttacctctttaaaagtcaatatcaatcttaatttcgttttccagcttgtcctcttgtgcttcttcggcaagagcttcctgttctctttttatatcagcttcttcgttcaggcggctgatgtaatcgttcatgtcactgtggttaataaaactgatggcttctgtcaatcctgccataaatttctgaaaatcctccttatataagaagattttatgcttttcgaagctaacctgagagtcatctccttctcccatcaccactttcttactctccgtaatagctaaaaacatttcatctttacggttcttcttcacatcgaggtaatagatgcgtttacctgctttgatggacttggagaaaacgatctccttatcattcatgtctgcgttcattttctttttaaaatcttccatatcattgggtccgttaataatcggcctcaaaattggatattttttttaaactgtcaaaagaaaaagcgcagagaatcaaatactgcattaaaaaatgtgatttatttgtggaaactcattaaaaatatctacttttgcagttcgataataacagtattaatttgaattatgatcaacagagttcttattcgtcttaagattatacaaatagtgtatgcctattaccaaaatggcagcaaaaatctagactcagcggagaaagagttattcttcagcctttcaaaggcgtatgacctttataattatttgttaatgctgatgatggcattaacagagtatgcacaaaaacgcattgatgcggcaaaagcaaaactggctcctactaaagaagagttgtatcccaacacaaagtttgtggataataagtttgttgcacagttggaggtgaacaagcaactgaccgagtttatatctaatcagaagagaacttgggcaaatgatcaggatttcgtcaaagagctttatgagaaaatagtagaaagcgatatttataaagattatatggcttccggtgacaattcatatgaagctgaccgcgaattgtggagaaaactctataaaacatacatctttaataatgattcccttgatcaggtactggaagaccagagtctgtactggaatgacgataaagagattgtagatacctttgtcttgaaaacgattaagcgttttgaagaaaagaacggagcgaatcaggaattacttcccgaattcaaggatgacgaagatcaggaatttgcacgccgtttattccgtcgtacaattctgaatgccgactattaccgtcatcttgtgagcgagaatacgaagaactgggatctggatcgtatcgcatttatggatatcatcattatgcagaccgctttagcagaaattttaagtttcccgaacattccggtgagtgtttcgttaaatgaatatgtagaaattgcgaagttgtatagtactgccaagagcggtagctttatcaacggaacgctggacggaatagttaatcaattgaaaaaagaaggtaagttgactaaaaactgatacctttgtccatatagtagaaactaaaacttgattatttatgaacttattgactgtattattgcaagctcccgcagcgggaggtggaagtatgatgtggatcatgctgatagctatgtttgttatcatgtatttctttatgattcgccctcaaaataagaagcagaaagaaattgctaatttccgtaaatctcttcaggtaaatcagtcggtaattactgcaggtggtatccatggtacaatcaaagagattactgatgattatatagtacttgaaatcgcttctaacgtgaagattaaaatagataagaattctatttttgctgatgcttcggccgccggcaatcagtctaaataatctttagtaaacaaataccctatgctcgatcgtaggaaattaagatatacatatttaagactatccaagagaattaaggatttcctgcttagtgataaaagcagggagttcttaatttttttattttttttcctgatagcaggtgggttctggctgattcagactcttaataatgattatgaagcggaattctctattccggtgagaatgaaggatgtccctaataatattgtgctcacttcggaacctccttccgaacttcgtgtccgggtaaaagataaaggaacggtacttcttaactatatgttgggaaagagtttctttccggtaaatctgagttttcctgactataaagggcaaaataatcatgtgaaaatctttgcctctgaatttgaaaagaagatacttattcaattgaatgcttcttctaagatactttcaataaaacctgatacattagattatatctattcgacaggtaaatccaaattagtacccgttcattttcagggaaaagtgactgcagggcttcaatattatgtttccgatactatttgcagcccggattccgtattggtatatgctccggccggaattttggatactataacaacagcttatactcaagaggtaaatcttgaaaatatatcggatacgattcgtcagcgggttgccttggataataaaaaaggagtgaagtttgttcccgcctcggttgaactgactttcccagtagatatttatactgagaaaaccgtggaggtgccgttgcgtgggattaacttcccggcagataaagtactccgtgcttttccatcaaaggttcaaataacttttcaagtgggcttaaagcgttttcggagcattaaagccagtgattttgtgattaatgtttcttatgaggaattgctaaaattaggatcggataaatatacggtgaagttaaagtcggctccccgaggaatcaatcagatccgtattgtacctgaacaagttgattttctgatagaacaagtttcttccgatggctattaaaataggtattaccggtggtatcggtagtggaaaaagtgtagtttccagattgctggagattatgggaatccccgtttatatttcggatattgaggcgaagcgtatcactcatacaaatgacgtgatacgtcgggaactttgtgccttagtcgggcaggatgttttccagaatggagaattgaatcgtcctttattagcatcttatatattcggaagccccgaacatacaaaagaagtgaatgctgtcattcatccgcaggtaaaagaagacttcaggcgctgggtggtagagaaaggtgatatagctatggtcggcatggaatctgccatccttttggaagctggctttaagcaggaagtagactttgtggtgatggtatatgcaccgttggaagtgagagtggaacgggcaatgaggcgtgaccattcttcaagggaattgataatgaaacgtatcgaagcgcaaatgtccgatgagataaagcggaatcatgctgattttgtaattgtgaatgacgatgaaacccctttaattccgcaggttttgaagtttatttctttgctatctaaaaataatcattacctttgctccgcaaaaaaataattaataaataaaagaatatatactatgttgaagactatcctgtctatctccggtaaaccgggattgtacaaactaatttcgcaaggaaaaaatatgttgattgttgaatcaatcagtgcagataaaaaacgtttccccgcttatggtaatgagaaaattatctctttggcagatatagcaatgtatacagatgatgctgaagtgcctttgtatgatgtgctggaagcaatgaagaaaaaagaaaatactgcagttgcctctattgaccctaaaaaagctactccggagcagttgcgtgagtatttaggagaggtattgcctaactttgatcgtgaacgagtatacgttgcggatattaagaaactgatttcttggtataacatcttaatttcgaacggaattacagaatttaaatcagaaccagaagctgaagaagaggttgcaactgatgaaaaataagtcatgaaacattgatggcttaaatgcataaatgtaataaggaaagcgtgataatgattcaaattgtcacgctttcttgtgtttatataagtatgagtaaacaaagaatcccctttagtgttctttaaacaatcttatgtttgcatgaatattttattgtttatatagtaaataaacatagtttttctctatctttgtaactgctaatatacgcaaaaatatggatgtaataacaaataaagaggtaaacgtttatcttgataatgaaaaaggaacattgtgcttaacaggaatgttggtaggtacaatggtatttttatatgattcgcagggggagttgaaagagaaacatagatttgccttgccttcactcactttggagatatccagaaaaggtacttatgtcttagtcatgagtcatcctaattgtcagccggaagtaagaagaattatatattcaggaatataaaaagccgatatgctcacttgagaacataccggctatccttataacaactaactataatttagtttctgaacactaatccgtctccgtttgagtcaacaatgattgctttgcttctgtcgacttcctgagacaataactttttcgacagatcgttcagtaaataacgctggatagctctttttactggacgggctccaaattcaggatcatatcctacttgggataagaaactcaaagcagcatctgtcatttccagttcaactccgttttctgcaagcatcttttgtacacctttgatttgtaagagtacaatttgcctgatttcagtttccgtcagcggcaggaacatgattgtttcatcaatacgatttaggaattccggacgaatggttttctttagcatattcatcacttccttcttcgtttcttcgataagttcttccttattcgaaccgctcagtttctccatctgactttgtatataagaacttcccatatttgaagtcatgatgatgatggtgtttttgaagttgactactcttcctttgttgtcagtgagtcgtccgtcatccagtacttgcaacaggatattgaaaacatccggatgcgctttttctatttcgtcaaacaaaacaactgagtaaggtttccggcgaatggcttctgtcagctggccaccttcatcgtatccaacgtatcccggaggtgctccgaccaaacgagaaacactatgcttttcttgatactcgctcatatctatacgcgtcatcatcgattcatcgtcaaagaggaattccgccaatgcctttgccagttcagttttaccgacaccggtcgttccaaggaaaataaaagaaccgatcgggcgtttgggatcctgtaatccggcacggctacgacgtacggcatctgcaaccgcttcaattgcttcgtcctgtccaatcactcgttgatggagttcgtcttccagatgcaataatttatctttctcactttgcatcatcttgctgacagggatgcccgtccagcgtgaaacaacgtcagcgatgtcttcagcatccacttcttctttgatcatggctttatcgccttgcataccacgaagtttctcctgcgtatcttctatctctttgtccagagcctgaagctttccgtaacggatttcggcgacttttccatagtctccttcacgttctgctttctctgcttcgaacttcagattctcgatttccactttgttttgctggattttatccatcagcgttttttcactttgccatttagctttgaaagacttctcaacttcttttagttcggccagttctttgccgataatttccagtttcggcttatcattttcacgcttaatggcttcacgttcgatttctaactgtttgatcttacgtgagatttcatccaactcttccggaacagaatctacttccatacgtagtttggctgctgcttcatccatcaggtcgattgctttgtccggcaagaaacggtcagtgatgtaacggctgctcagttctacagctgctatgatggcatcgtctttgatacgtacatgatgatggttctcgtagcgttctttcaatccacgaaggatggaaatggtactcagagtatccggttcatctacctgtacaatctggaaacgacgttccaatgctttgtctttttcgaaatacttctgatattcatcgagagtagttgcaccgatcgaacgtagttctccacgtgccaatgccggtttcagaatatttgcagcatccattgctccttcgcctttgccagcgcctaccagtgtatgaatctcatcaataaacaagattatatcaccttctgatttcttaacctcattgacaactgattttagtcgttcttcgaattctcctttatattttgctcctgcaaccaatgctcccatatcgagagagtagacctgtttgtttttcaggttttcgggtacgtctccccggaggatacgatgtgccaatccttctacgatagctgtcttacctgtacccggttcaccaatcagaatcggattgttcttagttctacggcttaatatttgcagtacccgtcggatttcctcgtcacgtccgattacaggatccagcttgccgctgcgggcggcttcgttcagattgatagcgtatttctccaatgactgatagttgtcttcactggattgagaagtaactttttctccttttctgagttcattgatagcgttacgcaattctttttccgtcattccggcatctttcaagatggtggatacggtacttttcacagttagcaaagccagcagaatatgttccaatgaaacaaattcatctcccatttctttagaatactgggttgccttctgcaatacttcattagattctctacttaggtaaggttctcctccggatactttaggcaaagaatcgatctgtttgtcaacgactagggctacctgttgcccgttcattcctaatttttggaagatgaagttagtcacattttcgcctaccttcattactccatgtaggatatgagcaggttcaatcgcctgttgtccccgactttgtacgagatttacggcctcctgtaccgcttcttgagatttgatggtaaaattgttaaagttcatatggttgttctcctttcttttttcatgattttaataacacttgaaagggctcaaaagatttgccaagtagaaaaatatgacaaaatagcatgataataagagagttagaagacaaaatgacgtttttcatctgaatgatactgacgaatttgccgcgaaatgaagtgaataaataaaagtattgtagtatctttatccgctgtaatcatattataaataaggtatgaatgataaacctcaaataaaactgtctgaaacagtagtgttgattgatgctgctttcttgaattttgtaattacagatatgaaaggttactttgaagagactttgcgacgttctttacaggatatcgacctttctatgttgaccacttatctgactctggatgccggaatcacggaagggaaaaatgaagtacaatttctttttgtttacgataaggagtccgatcagcttgtacattgccatccttccgatttggtgaaggatttgaatggagtcgcttttcagagtccttatggtgaatattcatttgcaagtgttccttcggaagggatggtttcacgcgaagatttgtttttggatttattgtctatcgttgctgattcggctgatgtgaaaaggatgattgtcgtttctttcaatgaagaatatggaaagaaagtatccgatgcgttgcatgaagtgaaaggcaaggagattatccagtttcgtatgaatgagcctgaagtgcaggtagagtataagtgggatatgttggcatttcctgttatgcaggcattgggaatcagagctgaagaactatagtccttgtgtttaattcttgattttgaattttaatcctcaaataactcaaataaaaaggtgtccgattttcgtttaaaagtatttcagagcgtagcgaagaatctgagttttacaaaggcttcgcaagaattgtttgtcagccagcctgctatcactaagcatattcaggaattggagacttattatcaggctcgtttgttcgaacgtcaggggagtaaaatctcattgactgttgccggtgaattactgctgaagcatagcgaaaagattttagatgattacaagcggcttgaatatgaaatgcatttgttgcataacgagtatattggagagttgaaactgggagctagcacgacgattgctcaatatgttctgccccctttattggctcattttattgcgaagtttccacaagtcaatctttccgtccttaatggaaactctcggggagtggaggtcgctttgcaagaacaccggattgaattgggattggtggaaggtatttttcgtttacctaatctgaaatatactttgtttttgcaagatgaacttgttgcggtagtgcatgtgaacagtaaactaaatattcaggaggaggtaacacctgcagaattgccgaatatccctttggttttgcgtgaaagaggttcggggacgttggatgtatttgaacgagccctgtcgcaacacaatctgaagctgtcttctttgaatgttctgatgtatcttggtggtacggagagtatcaagctctttttggaacatactgattgtatgggaattgtttctatccggtcggtgcataaagaacttgtggccggcactttacgggtagttgagataaaagggatgccaatgttgcgcgaatttaattttgtgcagctacaagggcaggagggaggattatctcaggtttttatgcgctttgcggggcatcatagcaagaacttgtaggtcagacttcttccatacgaaccatctcccaaccgcagaactgtattacgatgcagtgaagttgcgtgccttggcataatagacggactttcggacttgcggcataaccatgaatttgagccaccgcttcttcccattgttcggcagactgggcatcaaacttttctttaggcagatattttagttctactatatagctgtgtgcaatttctgcatagcgttgcaggtcaggcatgagaaacatgtcgcaaaagccatggctcaactctacctcaggtgtcgtcaagtaatatgcattgacgctaagataggcagtgaagaatccttgaatattgcgttctccttcaatgctgctacgcacggaagaattctctttataagctttggctataaattccaatgcaggtcgccattcaccgtcaaatgccatgttattgaagagtatctctatatctatcagattgatatagtggtggctctgatattcttccaagatatattcataatattgttttcggacatttgtattagggattcctaagatagtcagatttccacgtgttccgatgatagtcagcatgccatagtaaaaaagcaggctgggaaatatttccggattcgtaatctggtctgcggaaaaagactggaataggttagtgatgatttttccttcttcggcaatgcgtttgataacgcctttgcgattgccgtcaagacgatccagttggatgagttttttcatcttgttataatccgttcgggtattagggtcaatcatctgttcgggagatgctcccaactgaatccgattccgaaggtagtaaagtaccatatcgcagttgaacattttgggatcagaactcaggctttgacgtgcaaaacaataattgtcataccacggcttcatttccagaatcatttcttcaatatctccatgcagttgccctgtttccttgtaatattggaacatagtgcgcacatctttttcagaaaatcctagcatctggttaaataccggactggtactgatgttccaaccgatattataaccgctcgacaagtcgtctagcgttacgggactgacaccgatcataaagatacggtcgaacatccctttatagtttttgaaggcatcacggtagaagccgcttgcgtgggtgatggcacgatatatttcgttgcctttttcattgaggacgacattggtgaagttatcgtattcatctataataagatatag

SEQ ID NO: 4546 - DNA, 53510 bp, Unknown
  gut microbiota DNA sequence
ggatacgttaatgttcgtaaacttgggtaagattttatagatattgtttggagaggacttagaattcaccttcttatatattctatcaacggtttaatctgaatcctagctaggtttcaattaccattttgtaaaaaacactttcgggttgatattgacagatacccatccccagtcttgccaactcttatgatttccgcctttcacagcatccatcgtcttcgttccaagcataaaagaataaccggcagagagtttcacatctttcattacggaccaattgatctgatagtcaacttccgaaccgagtgacttcttcaaatcttctttaaaatctacttcagtagcagtagcaaaataatgataattgagttccatatctaccttggcagatgcacgaaaacgagccccaagacgaccatctattaatccgggagcaaatcctttgttgaatgcagaagcgtagaaataatccatgctgccatagaatttatgatgcgtcccataaagagggtcaaaagccttaaatttactactaccttcttcatttccgctcaaataatcaaagcttacaaccattccccatgttttattgaacgcataagctgccgtagcacttgccatgaaagcagaaacactctcggcatccttgttcttacctgtttggtagtagaaagcgccatccaagttccatccgctatttttatatgtaagataagttcccatcgtttgcaagtagcgggtatgagaatcttgagtgagctgattccctgtctctaaccctaaattcataaacagtaaagaagccccgaacggaatcttatctgctttatagtgataccacacagtctgcatattcttgtaaggctgaccaatagaagaattgtaataagtaccacctgccgttttttcatcattctggttgaaagccagaatagcatgtatttcattattcttattggcatatcccagtttcaacgcatcatgataacggcctgccacattccagtccagtccgcccaaaatacgttcatcatcataaactaacgtctgacgacctaactgtgcaaagaagccttttccaaaatccagctttgcccatgcctcattcaagataaagcgaccattcttgtcaatctgcggatcttgcccccatactccgacatgctgtgccgacatcttgatttcaaggtccgaacgcttgtagtccagtgacaaacgggcacggttattaatgaatgatgcagccttctgcccttcattgcgagggactaaagcaccgtttcgatactccgcacgaggtctgatttgcatagacatcgaaaattcattttccttctccgtagtttgtgtgtatgccatgcttggcaatagcataagaacgaatgaccaataaaatgttttcattgatatttcaatttaagttataagtatgtacactaactccttgtgccgatggaaggtaattgattccataccaacacatttgtaataagacaaatgatactaacagaatgactaatgccggacgactcttcaacggtctgcccagcctgaaatggatatataccagataggagaaccaagtagctgccgcccatgtctctttcgggtcccaagcccagtagtgcccccacgcttctttcgcccagatagctcccgtcagcattcccaatgtcataaatgccaagcccacataagtcaggttatcgcataagtccatctctttccgttcaatatccttctttttgaaccaaagcagatagacagccatgaccaccgcagctcccaacatcgcataagcaaacatatacactatgacatgaggggcaaaccacggactttgcaaagcaggcatcagcgttttattgtgaatctccggtttaaagatattgatacagataaataccagtgagagaatgcaactgaaactaagaatccatttatatttccaacgcacgtacgttatcaaaccagccaatggaaggaagaaagaataccacagacgtgtctctcccatcgtccgcatcggaggacgttccagagaaatccacataccgaggataaaactgaaaaagatagccagccccaacaaggtaaacccataagcccataccggcttctttccttcccaggcagcaaacgcgcccaagccccagcaaatcaatgcggctatcgcaaaccatataaaatgttcccaactcattccgtatcctcctctttcctcttttgtgcattgacaaacagacaaattgctccgagcatcatcatgatgatccctgcatatactacaggcaaccacgggtcgcgaaccagctcaaagacactgatatcgctccagcgacctttcgactcatcataactaagctgataaattttccatcctgctatctccatcggacgatttacttcaatcgtactttccattatcgttccttcctgtgtgtagacttttacttccgaagcaaaacgttgcggttcccgttccggcatcaccagactcgtcagagagtcgagacgcaatgccttataaggaaaaagaaaactaccacagctcacccacccttctttcgtctgttggttctttcggttgacggccttcagatacactgcatatgtcgctcccatcgaatggaaatctgtaaatttcagtgtgtcctctgtagctacggaggcagccatcggaatagactgttcgacaaacaagtcccaatccagcagactgccctcggaaactccgttttcaagcagtaaatgcacaggagacttttcggggagtactccccccgtttcattgtcaatcagcatcagtttcggaggatattcatcaatcgtaaaatccttcagttcgatagccaacggaagttctatcaattttcctttatcatcggtagccctccattctgcgtttcccattcgggtagtcatcttcaagcgttgcatatcggcatttcccaaagtagccgtaatcaatgccacgagcaatcctacgtgattgagaagaaaggatagtctgccaatcctgaatggaaagctggcacggaatatggtcagtcccaatgcagtgaccatccaaaagtaaagcaggacgaaaggccaggacgaaatcatctgcgaaaatcccagtatatcattggaagcatgaccggaaggagcctgccggataagtcccatgatcaccgtcatgccgactacccataccagggaagaaacggcagcggaataatggctcaaccatccaaacagatacacacgtttacgaagaaggtgcatggctaccagcgctatgatataaaccactaacacaatcgcattgaccggacaggcaaacaggccccagttgatggctcccactgccatttgcagcaaaatacctatcaccagtaatcccgcaccaatcaccagcccttctttataactccacggtttgctccacatatatccctattttacttttgtgccagacgcccgtttgcctttgccttctccagccatgccggaacggtcgttttcaggaatttctccttagcagctctttcagcatccatatcaagaccgatatattcctgtgctttggccttcgttgaaatgtccggcatcggaacgtcttccgtatacccatgcttcgctaaaactttggatacagccagacgagcctgcatagcacggtccagaccatgagaaagaattctctgaatctcctgcggtgcatggaaagaacctccatgtgatgccacaccgaagtcccaacgccattgtgcctgacgaatcaatgcaagcacatctttcatctgatcttctgtagcacccttatcccaggcaaattttgcttcgatatgcgcctttgccagttcctgttccagacggttacggatttcatttgccttgcgctgacgctcgtacacattgttacgtaatgtttcttcactctcacgatgacaagtctgacaggtgcggtcaatcattgccaatgggctctgaatgtgatggtcactgaatttcacgcccccttcactcttataaggcatatgacaatcggcacaagaaacgcccctttgcccgtgaatacccatctgagctatttcatagtcgggatgctgggctttcaagatcggagtacggcttaacttatgaatgtaatcatagaaacctgcctcatcataatatgcttccatgtcttctacagtgaaacctttatcccacgggaaagtcaaatatttaccgtcacccttaaagtaatattctacgtggcactgcgcacagaccaatgaacgcatttcctgtggagtagcttttgtgatatcttttccctgacgctggaaagcttcaatcaatgccggacggctgatatgaagattcattgtttccggatcgtggcagtcggaacagccgatcggattcacgatttcatcaccaaaggcagcccatttgttattatagaaagaatcgactcccaatgcttccatcatgcggggaacatccggactcttacaagtccagcaagtagaaggctgagggccatcgtgcggacctgcaggagaaccggtacgaagtgacgccgtaatatcctcgatagcatgcatatgtccgcgcggagtggaatagtcttttgaaaatgcatatcctgcccacagaataaccatttccggacgtttttccaaagcatcaacagcgacattgccattaaactcgctttcaaaatcagtctttgccgtttccgtccaagtctgatattcgcggggaaaatcatctttaaacagttcgttgcgtgcttcaatacctttaatgacagttttgcggttattaaagatactggcgacttccgccctcctctccatcaacgcagaaacacataatcctaaaacaaaaacaacgaccattgaacctccgaacaacagccatccttgccatgattttaatttcttttccattgtatatcggttttattattttattacgtagttatgtatatgcttattccttattattaaccatcttccggagccattccggtacaggcgattcgggaagagggacgatagctgccggagtagcggacaacgaattcttaccaccatgaggtacatcccgatgacagtcccagcaagcctttccttctcctaccatagacatcatataatctatctttcctgtttttacaaactccgtattcagttgtgtatggcaacgaatacaattgttcataatcacctgcgaactggcctcgtgggcctgtatcacttgtggctcacttttggtaaggaaagctgcgacgtgcttcataccatccattcctttgaatgtccatttctttacaatgttctcgtgaggaacatgacaatcgttacaggtggcatcccgtgcatgtgaactgtgaaaccatgtggcataataaggagacatgatgtgacaattcacacacgctgccggatcatcgcccagatacgtatgtgcccgaagcatgtacataaataaagctcctccgcctacaataataccgccaatgataatggctattatcttcgatctgtacgaaggaaaaattcggtttataaatggtaacttcatcatagtgaaaaagtatttttcacaaaagtaaagctttggaaacacaaaaggtgtaataactattacaccttttaaagaaaattatacgaacactgattaataagagaaaaaagatactccatcccgcccccgttttgcatggcaggctggctattttatttattcatcgtgatgatgatcgtccctttcggcggtagtgctcagtacaatattgcgcgcaatgtaggtttcgtttcctgcggcatccgtgcaataaaccatcagatgataatcgcccggagtagcattggccggaattacaatatcgtggtgatggatatgcgccgttttctttccggagatatcataagacctgttgaaactgaaatcgacagtggcttcgcccgtagcggcagccctgctctttccatgcgaatggtggtcgaaattactatgtatttcaatcatatatgactttaacatgacgtcgtccgacagatccatttcaaaatgtactccgtgctcgtcgccaattttcagttcttgcccttcttccggttcacttagttcaatcaccggtttggtggtatcgctatccgaatcgtcacaagaaataaatgcaaatacagacattgccagaaggctgatgatcgggaggtaaagttttgttttcattacagtaattttttaaatggaattttgattaataattggaagtttcgtcccggttccggaatttctactttcctgtaaaaactaagatgattgtaatatctggtattggagatattacgggcggtcagggttatttctatctcgttagtcctgccaaccggaatattcagcgagccacccaaatgaaacaggttagcccccggtgtacggtcctcattacggtctacacggttctgacgggcaataagttgccactccgcataaagcatatagtgttttctttgccatgtcaacgtattccgcataccgaacggcggagaaaaacttaacggaatatgctcgtcacagttgtaggtgtagacgtattctccggagatacggtaattgaagtgacgcagaaagttaatgtctatcgtagcctccgttccggcaaacagtgcttcggctcccgtgtagcggtaaatctgtccggcatgcggcagaactgaccattcgcctgtgggacgcagaaagatgtagttactgaaccaactgacaaaaggagacacggaaacggaaagtccgtgatatcgcaggttgtaggaagcatccatctgccatccttgctcggatttcagagaagcatctccctgctcgtgacggaaagtgccgtgatgtacaccgttagcagccagttcattggctccggggaggcggaagctacgtccgatgttcactttcaccatgtgctgaacggagggtgtccataccagtcccaaagaaaaggaatagtcaccgaaatgctttcggacggcatgactgttccatttataggactctacttgttcatcatcatatccttgcctccgaaggtaatccgccagataaacgtcctcgtgcggagagatgccaatataaccataatcatatcgcacgcctccactgacagagagaatgttattaggcttatacgtcgtaagccagagcaatccggtagtagaacgatggtattccggcaacaagaatgaatagccggaaatgtcgttctgctgatgttgcccatcccaccccaacgtatgctcccatgaagaagagccaataaagcgggcttttaccgaagcactgtatgtgttcagatcgaaagccagttctttatccgggtccttctccggcgcaggctgggagccgtaatgagtatgaaaagcactccattcctcccgatggttattctgaaatcccaaatcaccggacaggatcagtttctcccaagcatattgctgatgtgtggttactttcagatgatttaccttgctgtaaggcagttcgatattccggctgtctccgtcatcttctacgcgcgatgcgtcggggacaccgtgtgcgcccggaaagaaccccgtcttctgatagacattactgatggaatagtctgctttatagccttttcgctgatattgggtgaaaaggccgatattgcgttccactcctgccgtatttttcagtttacgcccatagacgggcattttctgagtcaggtagacaatggtatccgtagggatgcggtaatcaccgaagtgctgttcggaataacggatttgcacataccaggcattctttttaagtcccagcatcagcgaacctgccagtgttccgttgacggatttgcccaatagggtgacatcgccgaagagcatattcgcagaaggtatgggaggagaggctatatcaatcactccgcccatggcatcactgccgtaaagcagtgaggaaggacctttcaagacattgactgcttcgatattaaaggcatccagttccagtccgtggtcggctccccattgctggccttcctgcttgattccgttttccaatacggctatccggttgaatcccatcccccgaatcatcggtttggagaagccggagcctatgtccatagcttgtactccgggaatattctccattgcctgcatgaagtttcccgtaaaatgtttgcgcagaaaatcctgttctatcacttcaaccgtaagtgcagacttcttggcttgacgctgttggtacgactcggtcacaacaacatcaggcaaaagcatactcttgattgaatcggacttctgtgcgtggacgggtaaggttacaaacaaccctattacgcccgaaataattccgatacgcatcaattacaatcttttatataatgtgtaaaatgaatgtgaggacaagttacaatgaacctgtcttcctagaaaatatgaatatgtaattatgcggcaggaggcgctcgtaggtgatgcgaataagttcgtttgcagacaaccttatcctgataagtaatcggctcgtaaggaacgagcgtcaatatacagtgaaattctaccgactgaggttctgtaaagagagaaagggagtatttacatatggcacaatcctcggcatgactccgggaatgttcggcatgagagcatgacgtttcatcttcacttccatgatagtgaaaggttttcactacaaagaagggaatgaatgtcatgaataacatccatgctatgtatgctcttatttttctcttgtgatacattctcccctatcgttttaacagaatagtgaagcaaagatactcgtatgaaacaaaaggtgcaaattatctgacttaatatgtgttattaaaagaatagtaataaccgattctaatccaatatattttcaggtatatcgtttgagcctgccacaaaatactgaattatatttgtttctgtatctaccgcattcattgtcacaggagatgctgaccttgttgatctattaattaaatcagctttcatattccagtcaatacctaacaatatttctataagagtaaacatacgttctgatgtattagatatattgtattcataggttcttttatcgttcagctccttatcaaaattcaatatcatataacaagtactgtttttaataagaaactggtaatttcccgtacattctttcttttccattttttcatcgaaaagataaaaatccctatctgaattatttataaaaaatagattttcacctccggtgtagggtacttgtgcaggatgtgcaactttcaggttcaaataactatcgactatttttatttttaaatcaaccgtttcgttagttacattatccttgacagtaatggtggtttctcctttttgtttgggtttcacaactaaattacccatatctatcggacttgataaatcaatatctatgcttaaaacatctgtattttgaacggttacggtatagtctctattaccacctctgacggggatattttttgctcccaacaaaggacgctcataatatcctttctcaaatgacagagaatatatttcttgcttttcatcgtctccacaacttacaagggtaattgtgcaaaggaatagaaaaaatattcctaataatttctttgttttcatatttgtattttaagtgactgcaatagttcattacgtattatttcattaggagaagtataggagcattataatcctctaatttaggaatataatctgttttatccacataataaaaacctcgttcacgcaaatctatgaaatcagctactgcataaggtattgttattcttgccataatcttactattttctctatatacacacaaagatacaaaattgttagcaaaaagaaagatggttttctgttataatatcattcttcctgtttccacacataaaagacagttcgtcctgctcccctcttgcgaagagttccctccttgatgaaagtattcaaatcatcaattgctttcaatcgggggagtccggtcagtctgctatattctatacgcgtgattcctccgtttttcttcagaaattcctgcaacatttggagacggtcttcaatggatattttagcattgtgagttttttcattggagttctcaactcgttcaagttctatctcccgctttattttctttttaaattctttggaagtacgtaaatgaacattgtcaaaacggatagactcggcgcgaatttctttcttagtcatcactttatgggtacacttcaacgaaatgctgaaatgtccaagttcgcccaattccacgatgtatccatccgccaaggcttcggccagttcatcaactacagcgccaagtactccttcaattatattgtgcggaaaaggttggtgacgggatacgcgttctataaaatcttttttcgaataagttccactcggaacaatgcgggcatgaaggggttgtttctcccctgtatcattagggtccggagtctcatacaaatcataaaatgcactcattagtatattttttattagttgtttatgtgtctatcagtttattcgctaacatttcagtcctcttatactaaaccttaactttagtttagcataaaaataatcgtctgacaactgtttctttttcgtctgacagttgttagacgaaaagataacagttgtcagacgaaagttcaacagctgtcagacgaatagctcatcgcatacaaaggtacagttttatgtaatgcgaactgtaattcttagcaagaaaaaaattattcaatagcaaaacgcgccgtcatctcataccgcaatgtaataacgcgatattgctcagtggcagctgtccccatactgacattactctgtgcctgataaagagaataaggacttacatagctcgaagccggttcgacaatacgaatgacctcacccagtttttgtcccatagcttccacaagataagatgccttttcacgtgctgctttcaatgcttctatcttaccttgtttacgatagttcggcaaatccttgtgcttcagctccccgatacgcatggactcgatgcctttcgtatcaatcttcttaataacagcatttatcttttcgaagtcagtaaaccggatgtccagttgcttacctatcagaaattcttttcctttctgacgccaatagtctccaatttcctgcacacgaatagcctcatccgaaattcctgccctacttagcacccgacgcaaatctttttcaatccattccaacggaactttcgttttataatcttccggcttggaattcggcacaaattcctctttccaatattcctttatctgaatcaaaagatgaatctcatccggcacaacttctatttcagaagaaccggttacctcaatatatcttctctcactctcctgagcatcggcaacaacactccatacacataaaacaatagctaataaaaacaactttctcatatctctgaatttataatagtacttagtttctgaattccctgtcccatatcagacaaatgtagtaataaaaaatcaatcaatgcctgtttttaccataaagctatccacaaagtccatcataacaagcaaatgttctttatccatcaacaggatatctccgtcctttactttatatttctgcggctctttaccggaaagaagcgaaatcactccctgttcaaacagacgccttagctgagtgctggaaagaagaaaattcctttttaataaagacgacaatttcagattaaattcaaactcatatttgatttgaatctttatggttgcatcgggcacacggattatatcttctttcgagaagttatccgtaacctcatattctacactatcataatccgttttcaaatgattcctgccggcaagttcggcagaaaaagcatatttccaggctgctttccgatcgttcatggaaaagctatgaaacaggactttatctatcaaatccggtttggtacgtgacagcaaagtaatgttgcatgtattatcgcatttcacacaccgatatatcagccagacatcgatgttctttttctgcgcattcattctaaacttatcactacagtaaaaccggtcactatcgcaatgactgcatttcttaattaataaaggagaattctttgcctttatctcccatgtaaatgttgtatccataaagcaaagttggatataatccatttataaaattcacaagatgtcacaagatggcgtgaaatttatccgtcgagctcctccatcatcttctgtattttatccttcaacttatcaagaaattgtgtcctgctcttcttccgattcctaatttccaagaagatacgataaaagtccccaatctcgatattgaaaagtatctcgcaacaaaaagcgatgtctttcagactggtatttccattattaaagcatttgcccgcatagatcgcatagatgaattcaaccaaggcgactttactatccgtccattgcagcaacttactgtctactatggaggtgaatttaagatgcagtttgtctgacagcgaatcgatctcgtctgatacatattctatcaaatgactattcgccagaatcattgcaacgcttgaatcgtgtaaggtggtaaaagaagaatccctatccagcaaatgacaatgaacatcggaaagaatatcataattctcacggataaaatattggttatcaagttcggtctgaccggcacgataataatcatagaagctattattcaaaaatgacttctgtatattttccagctccatctttaaatatttgcattgagccgacagggatttgccgacacggttcttttcaatctgatataaacggatataaaacatcagcaagccggaaatctgcggtttccagactttaaagaactgaatttcttcttcaggattctgaaattgatattcggcaactgcccttttcagcaaagtaagtgatgtctgtatgacatctattatctgctttatccgctcgagaagggcaatcggctgttgctcaatccttttaatttctttttctatgttcagcttactatttcttacgaaattttccattcattctcaatgtacccacagctttcgaaccgtcaaaaggagtctgactaaaagcctgaataccaaattgcactcgtcttaaaaaaacgatgcagtgaataataaaattgataaaatgaaaaaccggttcaagtagaactactcaaacgaaagaaattagcctgtggtttatgaggctaatattaagctataacaaatttaagaatggtgcccaaaatagttgcttttagaattcagatgcaaatataactgattttttatgattatgtgaagtttatatgaaaatttgaaaacagcctgcgggaagctacagaaaaatactatctttgccttcggttcttcacaaacacagtgatgaaaccattctttttaatcacataaataataaaagaactatgatcagattaaatgtttttgttcgtgtaaacgaaacaaaccgcgaaaaagcgattgaggcagcaaaagaactgactgcctgctctttgaaagaagaaggatgcattgcttacgatacttttgaaagcagtacccgccgtgatattttcatgatttgcgaaacatggcagaatgctgaagtattggcagcacacgaaaaaaccgctcattttgcacaatacgtaggtatcattcaggaattagctgaaatgaaactggaaaagtttgaattctaaatgaatgccagatagacgaaaaacacgtcttccagcctaaacataaaagagaaaaacagtccttactttgggaatgtctttctcttttttcgtacacaaatgtaccgttacctgtcaattttataatcgctccagatcaagattagtcaagctttttatgaataaaggtaccttcaatccagtaggttgcgtgattggcggtgaactttagcaatacatagcccggatctgtaggaccaccgggaaagtgttcgataaaccagtcctgccaaagttcctgcttcagtttctcgtctgtcacgacttccacttctcccatcaatgccacactgtcccccttctcctgaaaacataatcctgctttcggattcgataaaaaatcaatagtctttaatgaatccgctccggtggacatccagatagtggaaattccttctgctgcaattttactcattggcacaggacggggatagccttccttgttcacagaagcaagggtgacaacttcgcatttctgcaataactccgccgctttctctttcatagtttttgttgacataatcttattgtatttattttatttcgccacaaagataacggcacagatgtccgttctattgtaaaaaatcgacttttactaatccggtgctaaggttcgatataagtcagcgttatatcctccggaactgtaagcgaaaggaatgatgaaggtgtattgcccgacaatgttttgatttcttttgagaaatgtgccaggtcataatatcctgcgtcgatggcggtagtcagcaggttgacaaaggtcgtgtttctcagtaattctactgcattcttgaatttaacaattcggctatattctttaggggtgaatccggtgttatatttaaacttccgttcaaaatgacgctggcacaggcatacctcatccatcagactacgaacagaacgcttccctgcggactgattgattatattcaccgctgcggcaacttgggtatcaacaggctgatagttatgtgcaagatacgccaggagatattcttcaacgacctgaatccgtccccggacatcattctgctcacataacctctcgataaaggtactgtcaaaaaccgcctgcatttcattcgtactgactctgtaattcgcaaactcatgcaaaggcaactttgtaaatccggataacccacaaggcagaaaacgaacgccaaactgatgaacgaattcggcataagtgacaagctccgaatatttcgtcatcggacccacaaagtaagaacgataaggctgcatgaccagcgtttcttcttttaccttactcactgcttctcccaacgtaaaaataaaatcggtacaaccatccggcaaaatatggatacgcatgccatattccggagttcccttaaattcccaataattatcgatatagggagcgagtagacgagagggctgatattctgtgtacatcggtctattttatacgcaaatataaagagaataaatgctaattcatgtattttgcaaaaaatatcatgtacatttgtgtttcaaaaaacagcaaaacgcatgaaggactttgcagctatcgactttgaaacagccaacggaaagcgcaccagcgtatgcagcgtaggggttgtcatcgtgaggaatggaaaaatcgttaagaaaatctatcgtctgatccgtccttgccccaactattatacgcaatggacaacagccgttcacggactgacttacgcagatacggaagaagcggaagattttcctgatgtatgggcagaaataaaaccgcttatagacggtcttccgcttgttgcccacaacagtccttttgatgagggctgtctgaaagctgttcacgagctatacgaaataacttatcccaattataagttttattgtacttgccgcacttcacggaaagtgtttggaaaagagttgcccaatcatcagctacatacggtggcagcccgatgcggatatgatttaaccaatcatcaccatgctctcgccgatgctgaggcttgtgcacaaatagccttgctcatcatccccgagcctaaaaagccaaaagttgatttgcacaccggaagcttattttaatacgaaagctccgtaaatgagcaatataaaagacactaccactattattactgtcaataatagccgtagtgtctttaaaatagattgctaattatgaattctgcttatagaatagactttgcaatacccatttccaaaccgcgaagttctgccaatccacgaaggcggcctaagcaggaatatcccggatttgtcttcttcttcagatcatcaatcatctgatgaccgtggtccggacgcatagcgatagaacatttacgacgttgttgcagaagaatcaggctcttcattacgttgtacatatctacatttccttccaggtggttagcttcatagaagtttccttcttcgtcacgctgtgtactacgcaagtgtacaaagttgacacgatcgccaaaacgctccatcatacctgcaaggtcattgtcagcacgtacaccgaaagaacctgtacacaagcaaagaccgttagattcgttaggaacggcttcaatcagttttttaaagtcttcttccgtacttagaatacgcggtaaacctaaaattgtataaggaggatcgtccggatgaatcaccagcttcactcctacctcatcagccacaggcgcaatttctttcaggaagaagatcaagttagcacgaagtttctcagcatcgatatcattataacgatccaatgcttcctggaactgttctacggtgaaactttcttccgatcccggaagtccggcaatcatattacgaaccaacaatttcttatcgtcttcactcatttgttcgaaacgggcttttgctttagctatttcttccggagtatagtctttttcagcattcggacgtttcagaataaagaggtcgaaagcaaggaaggccgccctctcaaagcgaagagccttagaaccgtcaggcattgtataggcaaggtccgtacgtgtccagtccaatacaggcataaagttataggtaactaccattacaccacatttagccagattacggatgctttccttatagttttcaatatatttcaagaaatcaccggtctgtgtcttgatatgttcgtgcacaggtacactttctacaacagaccaagtcaggcccacttcttcaatcatttgcttacgcttcatgatttcttctactgtccacacttcgccgttcggaatgtgatgaagtgcgtttactataccggtagcgcctgcctgtttgatatcccacaagcttactgggtcattcggaccataccagcgccaagtttgttcacatagatacataatatgataagtattaagtaataagtaataagtattaaatggagaatgcgtcgaaacctccgtcgataacagctactgtacctgttacgaagttagaagcatcactgatcagataatgaatagttccgtaaagatcttccggttcaccgaaacgattgaacggagtatgagcaagaattgtcttagaacggtcagtcagagaaccatcagggtttgtcaacagcgcacggttctggtcagtcaggaagaatcccggggcaatagcatttacacgaagaccgttaccgaatttcaaagccagttcgccagccatatatttagtgaagttagcaatagcagcttttgcagctccgtaaccaaccacacgtgtcaacggacgaagagctgattcggaacagaagtttacgatagaacctttcttctgttctaccatgatttcagcaaataccattgtaggcaataccgtaccaaacagattcagatccaccactttcttaaaggcatcaatctgcaagtcaaagaaagttttgtccggagcaattgttgcgcctgccatattacctccggcagcgttcagcaatacgtcaatacgtccataggctttcatgatctccactttgttaccttccagcacttctttgtccattacgtccgtatacaggaacatagcttcatttccttcagctttgatactttctaccaatgccttacctgcttcttcgcttctatcgagtacaacaactttagctccttctttagctaagtatgcagcgatacccttacctaagattccggctccaccggtgataacaacaactttgtcctttacgttaaataattcgttcatggttcttttatttatatggtttataacttattgttcagataatatttcagattttcttttagaagaatatcaatcggcatcaggttcaccttttcggggttctgcttgaacagcaaatgattgcacaatgacttaatgccatcgtacccctgtcgttcggggcgctgtgcaactaatgcagtgataacaccatcggagagcagttgagtattcctttcaataagatcgtagccaaccaattttactttttgcattcctcttgctttcaggtagtttcctaagatatagcaagttgaattaaagatgattcctccttctatagttgcattcgcttcaaagatttcatccagtttgataaaattgtaaaccgaatcattgattttcaattctacttcatgcaaatttccggtaaatcctgtttctttcagataatgacaaaagccttctctccggttttttccttgatttgagtcgttttttccactatgaataattcgtgccatcagaatatccgaagtcgaagaaatcttgtctgtcaataatcgcgcagcaatcactccggcatcataagactccgttccgaaatatgccaactgatgttgcccttcaatattggagtcaacataaacatagggaatttcattcctgtcaagctcttgcgaaagccgtataacagagtcggtaaacagtgttgcaatcaataccccatctactttttcatccaacaggttgcggacaatatcatcaaatgtcttgttattgtattgatcgaaaaagagtttagtgatcgttatattataagattccatctctgaagccgccttatcgataccatcggaaatagcttcccaatattctccgtgcgtaaaagaaggagtaattgccacaaaatgatattgttttttagatgccaacgaacgcgccatcagattcggctgataatgaaccatttccagaatagtctgaactttcttcctgttctcttcagatacccgtccacgattgtgaatcacccggtctaccgtaccgacagagactcccgccatcttggcgatgtctacaatacgaatatttgagaattctttgtccatttactgataagtatcttgtttttcgacgacaaatgtaaaatgaattattgaattaagcaaaagtgtgtgcgcacacacgttctactataaaaatgctataaatatgatattcagatatttaataaaggaaggcaagtaatacgtatgttgttaaacataagaaaaataatggaaaaagccatcaaatatatgtttgggaggtaataaacaccatgacagaaaagctttttatctgtgaaaagaaacaaaaagagggatataaaaggtaaaatgtgtacgggcacacactgatttgtttatgcataaacagatatgagggatagtgacagtatttggttaaggtaaattttcaagaagaaagctattagtataaaagaaaagtgataaccggttattttaaacctgattaccactttcaaggatgattatttctcccatttttcttttgcttttccaactgctttatcagcctcttcagctactttatctgcgactttagctcctgtttcaacagcttttaagccaagattcatcgcttttctttcagcttcggctgctgctatttcagcatcacgaccgatacggtgaatagcgttataaatatcactttccaactgtctggcttttgctgtacgtgaaagacgataagctactgcaccaaggattgaaccaattccaagtccaatccagaaattcccatgtctacattccataattaagttctgtttttagattaaaaataaattatataaaatctttatttagatttcgagaataaagaagcaatccataataccagaatagctcctacggtagaagttatcaaacttccaatcaatcccgaagccgcaagtccgaaaagggcaaatacccaaccgcccagcactcctccgagaataccaagtaacaaatttataataaggccaaaacctccgccacgcattatcttacctgcaagaaagccggctataataccaataataatataccaaataaagcccattttatcctccttttttatttaacaacatcaggtaccacgaatagttcagtaagtcaaaaatgaattaacgacaatttacactccaaacgccactataaattcactaaagagataatttgagcaacagtccggcaaatatttttcttagcgacttccggcttcatggctgtttctaaagacatgggcgaaggaatgatagaaaagagaccttgaaaacctgcctgattcagaatttccgtatcctctatgctgcctgccacaacaatgaccggtatcccttgtcgtttcgcctcttctaatattccggaaggtacttttcccattaaagattgacggtctgttctcccctcaccggttatgatcagatcagcaccttttattttctcactaaatttcaatgtttggagcagtaaatcaatgccgggctttagttcagcattcagaaaagcaagaaaagcacctcccaagcctccggcagctcctgctccgggaacgtgagtgatttctcttccggtagttgaatggatcaatcgggaaaaagactgcatacccgcatctaatttctctatcattgcatcatccgcccccttctgccgggcaaaaacatgcgcagcgccttccggaccacaaaagggatttcgtacatcacaggctatcgtgaaacgagtatcttcaagtgcagggtgaacggaagaaaaatcaatagcggcaattcgatgcaggatttcgcctccttctcccaagactgctccatccttattgagaaatcgggctcctaatgcttgtaacatacctactccggcatcattcgtagcacttcctccgataccaatgacaaattcccgatatccctgttcaatagcgtgcaatatcaattcaccggttccataagtagtggtcagcatcggatttcgttcagtttctgataatagcggcagaccattcacggtggccatctcaataaaagcaacgcgtttatcacccgaaactccataagtggtttctatcgggcgcatcaaaggatcattcgctatgatcttctgataagtgcctcgtgttgcttctaccaagacagtcaatattccctcacctccgtcggctatcggaaaacgaatgacttcacaatccggacaaaccagctttatgccttcttccaccgccttttccacctctgatgaggaaagacaccctttgaaagaatccatcgctactactactttcttcattacttatagatttaatagtgacaaatatattgagaaacgggaagtttacgtacctttgcagtcattttttcaggaacatttcaaaagaataggtattatggtacagaatcaggaacaacccgtaggaagaattacgttttctatcctcattgcattaagcctttcgcattgtctcaatgatcttttgcagtccgttatatcggcagcctatccattattcaaagacgatttgggactcaactttgcacagatcggccttatcacactggtttatcaactctcggcttcggtattccagccaatcaccggaatcatcttcgataaacatcccgttgcctggtcactacctatcggaatgagctttacaatgataggaatgatcaatctggcattctccaacaatctttattggatgctgatctctgtttttctgatcggaatcggttcttccgtcttgcatccggaggcatcgcgtattacttttcttgcttcgggtgggaaacggggactggcacaatcgttatttcaggtaggaggcaatttaggaggttcactaggtcctttattggtagctttgctggtggctccttatggcagagagcatctggccgtttttgcgctttttgctttggctgctatcggtgtcatgtacccgatctgcaaatggtacaaatcttatctcaaccgaatgaaagagcaaaaggctacagtgaaaaaggctgtacatttgcctttaccgatggataagactgctttatctatcggcatcctactgatattaatcttctcaaagtatatttatatggcaagccttaccagttattatacattctacttgattcataaattcaatgtaactgtacaggaatctcaattatacttatttatttttctggtagctactgctatcggaacattgctcggcggtcctatcggcgaccgtgtaggacgtaaatatgtgatttgggcttctatcttaggagctgcaccttttagcttactgatgctgcatgccactttagcatggaccatcattttaagtttttgtgtagggctgatgctttcgtctgcttttccggctatcctgctttatgcgcaagagctgctccctaccaagttagggttgatttccggtcttttctttggttttgcctttggagtagcaggtatcgcttcggctgtacttggcaatatggctgataaatttggaattgagtcggtttataacgtttgcgcttatatgccgttattgggattagtcacgttctttttgcccaatttaaagaaacagaagatacaggtataaaaaaacgaccggtatgcatcgtcacgacgtataccggtctacaagttaaggtcaaagtcaaaaaattaagagagctatttataagttagggtttgcattaatctctttttcagggatagcatacagataataagaactgttcgctgagaacgctttaccatccggaaaattaaggaaccaatgtcctaacggatttcttttcgcaaaactgccgccttcctgccagcaatccacttccgttttctgcatatcctcagataaagccatgcgttctaccgccttctgattacggagtacatccgttataccgaatccttctccccaaagttcgcgtcggcgctccatcagaatttcgtcaatcacctgctcttttgttttccctgtcacatcataattacctacgccacgggcagtacgtaatgtattcaatggggcaacagcctgatccagtgctactccatctctgaccttggcttccgcttctatcagatacatttctgccgaacgcatcagtaccagatctgcagtatcatccgaacgcatatggaatttcttataacccagatatccttcacgcatccattggaaaagaggcagacggatgtcacctttaacaaaagtatccatcaagtgcgggtcggccataaagctactgtaagctccgacatacgttgcatccagatagtagaaattataacttgcatccgattgcgaaagtgtttgaggagatccccaaatccattccttattggaaatattattaaaaccttcgtactcggcagtggtagtcattaatgaatatcctttgcgtgcagcttcggcagctttggcggcctctccccattgtcctgtcaataagtaagcacgtgccataagaccgttgacaacatccgtattcggtttgaatttctgcccgtctcccttgcggacgtagtttgtcagataatcctgtgcaagattcaaatcatcaaagatctgctgataaacttgcgccactgtcgatttgcctttcggcttggtaccgcttgtagtcggttccgtatatataggcacacagggagcatctttatctttcaaatatgtaaactgataatgctgtaccaaatgcagataacaaaaggcacgcaaagccaatgcctgtccctgtgcctgccgaagttcctcggagtcacccttaatcgaaatggcagtgttgcagttatcaattgtcttatagatcagataccaggcaaacgaagttcttccatcggaaggaatcgccacatcattaaactgataggaagaattgaacccatatttcggacgggagacaacatcgcttgccatcatatcatcctgacattgaagtgcccgataaccaatattggcatacgtcgtgccgtattcaaacaggttataccaagctccgttgaagagacgttctgcatttccggctactgctacctgatcagagcttaccgcatccgtaggttccgtatccagaaagctactgctacaacttgtcgccagaaacagtccggcaacagcagtaagtatagattgaatttttatctttttcatatatcgtgtaattttagaaagatagattgatacctccggaaatagttcgcatagccggataacggtaataagtgatacccgtgattccctgttcagggtcaagtccctgattccggtgaatagtgaacaggttatcgccctgcacaaacacctgaacactgctcaatgccagtttgctgatccactgtttcggcagatcgtaagatagcgtcaggtttttcagtctcatatatgaattgttctgcaagaaacgggtggaagctgagttccagttattggaagtagtgctcaaagcaggcacgtctgtataacggttttccggtgtccatctcttcaatatctccgtagaccagtcacggccttccaaacttccgttgtgcagaatcatagtaatatcacggttgtagatatatccgccgatgctataagcaaagatggcggacagatcgaaccctttccatgaaagcgatgtattgaaaccaccataaactttcgggagggaagatttattgacgtaataataacttgccgaagcataatcgcttgttgtgacacgttttccggtcaaattatcattggcatctttctcatccatataccacagcggattaccgttgtcagggtctactcccgcccattctttcatatagaagtcatagactgaccgtcctacctgcaatttatttacgccactttgcggcatatccttcagcggaagttccgtcaccttattcttataatgcgtcaggttcattccgagtttccatacccatccattctgattgataatggttccgttcagcaccatctcgatacccgtattcttcaatgcgcctacattctcatcaatagaaccatatcctaaggaaggagcgatcggacgggaataaagtaagtctttggaacgacgcgtaaagaagtcgaacgaaccggaaaaacggttgttaaacagtgagaaatcaacgccgacgttaaagttcaggttcgtctcccatttcaggttcggagtagccatacggtcggaaaccaaggcattctctccgagattggaaacgatggtataaagtcccttgcttgcataataagtacccagattatcatttccctgtgcaccgtagctcatctttaatgtcagagcagaaagccagttggcagtggaagccataaaactttcacggtcgatacgccatgaagttcctaaagaccagaagttaccccagcgagtctccggggcaaaacgagaagaaccatcacgacgaaaggaagcggagaaaaagtatttattctgatagtcataaagcgcctgggtaagatatcccaccaaagcataatcgatacgataaccggaaccacccgtcaactgcgagccgactaccagttcgggcatatcgggctgtgccatcttcgtacgtgaagcagtcagttcatcataacggtacgaataggcttccattccggcaagcacattaaagtgatgatcaccgatggttttatcatatgacgcgatgttgttccatgtccatgaaaaagtacgtgagttcaagcggctggaaccacctccgttttccagagccggaccgattttcggattcgtataatccagcgtattatagttgatcaggtcgaagttgaaacttgttttgaatttcagcccttcgatgatcgtagcttcgagataagtacgaccggaaaattcatctttcatccgttccgatttatccaaaggcaaggtagccggcaaattccagttagccatagaaccggaaggacggtatgagccgaaatcgtagatacgatccccattatcatccagcttgtagctgccgtccgtattcatttcataaataggataaaatccgggcatagtacgtcctgccgtaatcacgttgcttgttttggaatccgaagaaaccggataattctgcatggaatgggcaaaactcaggttgatgcttcctttcagccaggaagtcatttcactggtcacgttcgaacgaaggttgaaacgttgatagccggattcgagtgcaatacctttatcgttcaggtagccggcagaaaagaagtattgattagcctttccaccaccggaaacactcagattcagttcggtacgaagcgcttgctgctccatcgcgtcactccagtcggagttccataacggacgagcacctgctgccagctttccgtctgtccccacaggttgcggatattgtgtgccgtaaggattcggaccgcctcccatcaattttgtaaccaagtctttggaagcctgcgcggctgcggtggcaggggtataatcagagctcttggcgtactggttacgaagcgcttcccagtaaagttcgaaatactgattggtattgacacggtcataatcgcgtaccgcacgactggaaccacccagtgtagctttcaccttgacagtagctttcgagtcctgctgtccttgtttcgtagtaatgataatcacaccgtttgcaccacgcgaaccgtacagagcagcagatgcagcatctttcaatacggtcatggaagcgatgtcgtcaggattgatcgagttgacgctgccatcaaaaggtacgccatcaaccacatacaacggggcactggaggcattgatcgaaccgataccacgaatacggatttcggcatccgtaccgggctgaccgctggaagcactggcttgcacaccggataccgtaccttcaagtacacgagatacgctggaagtctgtaacttctcgatctctcccgccttcatagtcgaggcagctccggtaaaactatatttcttggcagtagcataagctacaaccatcacttcttccagttctttgctctccgattccattgtgacattgatcacattccggttgttcaccgcttgttccactgtccgcaatcctacaaagcggaacacgatagtcccattggcaggggcttcaattgaatagtttccatcgatatcggtaatggtgccggaagaggcccctttcacttgtacggaaacaccgggtaaaggctctccttcagaagtcacagtacccgttacgcgtttctcttgttgtgcttctgcatacactacattgccggcagaaagcaatagaaacgccactaataaacgtaaatagattctcataattttgtggcttaggatttatttgcttgttctaactaacagaatacatatctcatttgtttaggaaacgaaacatttttttagacgattattagtataaatcaacgaaaggtagtacattcgtgaaacgaacagcatcaatcataacaacgaaaaatcacaggatgaagcaaattgttctatctctttttctgtttctgtcactctccttacaggcccaggctgaaaggagagatacccttatgagcgatagtctgcaaactgattctgtgataccggccaaaccaagcgcttttaagagagcgatcaggaagttcatgaatttcagtgacttcgacaccctttacatcagtcccaaccggtataattacgcattgatgactacccatttcagcaactttgaatattattccgttaccagcaatctgccccaaccgcagaagctgagtttctctcccaatccgcataacaagataggattgtacttcggctggcgatggatcttcctgggatggtctgtagacgtggacgacatttaccggaagaccaaccgaaggaacaagggaacagagttcgatttaagtctatacagttccaagctgggagtggacatcttctaccgtcgcacaggtaacaactataagattcataagatcaacggtttcccggaagatgtccccgccaattactccgaaaagttcaatggaataaaagtagatatcaagggattgaacctatactatatcttcaacaaccgcaaattctcctaccctgccgctttcagccagtcaaccaatcagcgcaggaatgcaggttcgtttatcgcaggcttttccatttcaaaacataatcttgagttcgactatgcagaacttccggctttcatactggaagcgatgaatcctgccatgaaagtcaacaatataaaatacaccaatgccaatatcagtttcggttatgcctataactgggtatttgcccgcaactgtctggcatgcctgtctctcactcccgccatagcctacaaagcctccgatgtagatgcagaaacccatgaagggaagacatggtacggcaattttaacctggattttctgatccgtgcgggagttgtctataataacggaaaatatttcgtcggcacttcatttgtcggaaagaattataattaccaccggaacaatttctcactggacaacgggttcggaacactacaggtatacgtcggattcaatttcaatttacgcaaggagtatagaagaaaaaatacaagataaagggtgtgtataaacgatacaaggtaagggtttatatttgcagtatattattgtatcgcttgcttatccaaagaatctttgtacatttgccccgttcttaacttcaaaaaacaagaacctgatgaagaaacaacgccacatacagaccacacgttcccttctttcccgcttccgctactggggcaggaagaactatgccgcatttgcgagtatgggacgtgaatttcagatcggtcatctgcataccaatgtggtagatgtggctcttcgcaagcagaatgcaaaagttactatcccttatcatacatttatgacacttcaagaaatcaaagaccaagtactggcaggcttcgacatatcgtccgcccaagccacttggctggccaacatggccgacagcgaggcgctttatgccgccgcgcatgagattaccgtcacctgtgcttcgcacgagttcgatatgtgttccatcatcaacgccaagtccggccggtgtccggagaactgcaaatggtgcgcacaatcctctcactacaagactcaagccgagatttacgatctcctgcccgctgaagaatgtctccgacaggcaaaatacaacgaaagtcaagacgtcaaccgtttctcccttgtcaccagcggacgaaaaccttctcccaaacagatcagtcaactttgcgatgcggcccgccttatgcggaaacattcgtccatccaactttgtgcatccctgggattactcaacgaagaagaactccgcgccctacacacagccggaatcacccgctatcactgcaacctcgaaacagctccttcctatttccccacactctgctccacacatacacaagagcagaagctggccactctcgacgccgcccgccgggtaggaatggatatctgctgcggtggcatcatcggcatgggagaaacaatggaacaacgtattgaatttgctttcactttggcggaattgaatgtacagtccatccccatcaacctgctaagtccgatccccggaactccactggaaaatgaaaaggcattgagcgaagaagaaatcctgcgaaccatcgccctgttccgcttcatcaatcctaccgctttcctgcgtttcgcaggaggacgttcgcagctcactcccgaagccatgcgcaaagccttgtttgtcggcatcaattccgccatcgtgggtgatttgctgaccacactcggttccaaggtttccgacgacaagaagatgattctggaagaaggttaccacttcgccgactcccagtttgaccgcgagcatttgtggcatccttatacttctactaccgatccattgcctgtctacaaagtaaagcgggcggacggagcaacgatcacactcgaagacgggcggacactcatcgagggaatgtcgtcctggtggtgtgctgtgcacggatacaatcatccggtattgaatcaggcggcaaaagaccagttagacaagatgtcccatgtcatgttcggaggactgactcatgatccggccatcgagttaggcaaactgctgttgcccttggtacccccgtccatgcaaaagatattttatgcggattccggttcggtggcggtagaagttgccttgaagatggccgtgcaatattggtatgcagccggaaagcccgacaagaacaatttcgtaaccatccgttccggttatcacggtgacacttggaatgccatgtccgtatgcgatcccgttaccgggatgcacagtcttttcggttcatcgcttcctgtccgatatttcgttccggctccctcttcgcgatttgacggagaatggaatccggacgacatcatccccctgcgggaaacgatagagaaacactccaaagaactggcggcgctcatcctcgaacccattgttcagggagcaggcggtatgtggttttatcacccgcagtatctgcgtgaagcggaaaaactctgcaaagaacacgatatcctcctgatcttcgacgaaatagccacaggattcggacgcaccggcaaactctttgcctgggaacacgccggagtggaaccggacatcatgtgcatcggaaaggcactgaccggaggatacatgacactgtctgcagtattggcaagcaatcagatagcagatactatctccaatcatgccccaaaggcttttatgcacggtcctacctttatggggaatccgctcgcgtgtgcggtggcgtgtgcttctgtccggttgctactcgactccggctgggcagagaatgtgaaacgaatcgaagctcagttaaaagaagaactggctcccgcccgcaagtttccgcaagtagcggatgtacggatattaggagccataggagtcattcagacagaacgttcggtgagcatggcatacatgcaacgccgcttcgtagaagaaggtatctgggtacgtccgttcggaaaactggtctacctgatgcccccgttcatcatctctccggagcaattaagcaaactgacttccggagtacttaaaatagtcagagagatgtaacttaactatcttctcaaaaaatgaatagattatgattttagactctatcaatcaagaacttctgactttaaaagagaagaagaattaccgttccctcccacagttgattcatgatggaagagacgtgacagtagacggacgacggatgctgaacttatcatccaatgattatctggggttagccaatgaggtgtctttaagagaagcgttcttaaagaccatcactccggaaacctttctgcccacttcctcttcctcccgcctgcagacaggcaacttcactgcctatcaggaactggaacagcaactagccactatgttcggagcagaaagcgcccttctgttcaatagcggataccacgccaacacagggatacttcctgccgtcagtgatgcccgtacattgatccttgcggacaaactcgtacatgccagcctgatagacggaatcagattatcatctgccaaatgtatccggtaccggcacaatgacttagcccagctccggcgtcttcttgaagaaaaccacggtatgtatgagaagataatcatcgttaccgagagtatcttcagcatggacggagacgaagccgacctgcaagcgctggtacgattgaaacacgattacgctaaccttcttctctatgtagacgaagcccacgctttcggagcacggggcgagaaaggcttaggatgtgccgaagaacaaaactgcatcaacgacatcgactttctggtaggaactttcgggaaggcggcagcatccgccggcgcatatatcatctgccgacagaccatccgggaatatctgatcaataagatgcgtacctttatcttcacaacggcccttcctcctgtcaatatccagtggaccgcatgggtactgaaacacttcgctgatttccggagcaaaagggagcatctgctgcaaatcagcaggaaactgaaagaagcactgaccgagaaaggatataactgtccttccgtcagccacatcgtgccgatggtggttggagcaagcgaagataccatcaggaaggcagaagaattgcaacgcaagggattctatgccctgccggtacgcccgcctacagtacccgaagggacttcccgtatccgcttctcattgacagcggacatcacagaaaaagaaatcgatacacttatagaaatcattaacggatgaagcagacttttattatcaggaacaatggaaagcaccttctactattcttcgcaggatggggaatggacgaaacgcctttccgacatatccatccggcggaatgtgactggatgatttgttacgattatcgttcgctggaattcgatacgactttaatacaggcatattccaagatttcgctgatcgcatggtcaatgggagtctgggcggcttcgcaggtaatgaagcaatatccctccctgcctgtttcccaaagtaccgccatcaacggaacactttatccgatacacgaaacgaaaggaattacgccatccgtttttgaaggcaccctgcaaggactgaacgcacaaaccctactgaaatttcagcgaagaatgtgtggttctgctgctgattacaaggcttttcagacaatagctcccaaacgtccggttgaagaactgaaagaagagcttgccgccatccggcagcaatacttgtcatccctcccttcggagtttgtctggcaaacagccatcatcggagataacgatcggattttccttccggaccatcaagagcaggcatggagaaacaaggcagtctccctcctgcacgtcgaagctgcccattatcagcaggagctttttaatgaggtaatcatgaacattaaataatcattgatcaatgaataagacaattattgcagaacgtttctcaaaagccatctccacctatccccgtgaagcaaatgtacaacggcagatagcaaataaaatgatccgcctgctccagaaacatattccctctccctgtccgaaagtgattgagttcggatgcggaacgggcatttactcccgaatgttgctccgcacccttcgtccggaagagttgcttctgaatgacttatgtccggagatgaggtattgctgcgaagatttattaagagagaaacaagtctcttttctttccggagatgcggagacgatttcttttccggataaaagtacgttgattacttcctgttccgctttgcaatggttcgactcgccggaggagttcttcaaaaggtgtaatacattgcttcacagtcagggatactttgctttcagtacttttgggaaaaagaatatgaaagagatacgtgagcttaccggaaagggactaccctatcgttcaagggaagagcttgaagcagccctgtctcttcactttgatatactgtactcagaagaagagctgatccccctttctttcgaggatccgatgaaagtgctgtatcatctgaagcagacgggggtgaatggtttgtcagcgcaatcatccctctatccgaagcatgagaaacagacttggacccgtcgtgatttgcagcatttttgcgaacgttacacacaagaatttacacagggcacttcagtgtccctgacatatcaccctatttatatcatagcaaaaaagaaaaaagtatgaaacagaatgtatattttgtaagcggtatcgataccgatgccggcaaaagttacgcgaccggctacctggcacgcgaatggaataaaaacggcaaaagaaccattacgcagaagtttatccaaacaggaaatgtggggcattccgaagatatagacctgcatcggcgcattatggaaatccctttcacccaggaagatcaggaagggctgaccatgccggagatcttttcttatcccgcctccccccatctggcttcccgactggatcatcgtcccattgatttcgacaagatcaagcatgctagcgaagtattaagcgaacggtatgactgtgttctgcttgaaggcgcgggcggtctgatggttcctctgactacggagctcctgacaattgaatatatcgcacaggagaaatatccgcttatcttcgtgacttccggaaagctaggcagcatcaatcatactcttctgagtcttgaagccatacagaaacgggacattgtgctggatacagtactttataatctctatccgacggtagaggataaaacaattcaagatgatacgatggagtttatacgaacttggctcgaaaagtactttccggaaacaaagttcttattagttcccgaaataggaaagtgagtataatataatcacttgtagttactacccgcaacacttccccaacgcctcttccaatgctgcttttgaaaccggcttcgtgacaaagtcattgcagccggcttccaaagcctgctccttgtccgcttcgaaagcataggcggtcaaggctatgacaggaatctccttcgaataggaacgaatgatgcgggtagcctccagtccacccatacgaggcatcttgatatccatcagaatcaaatccggctggaactgtttatacatctccaccgcctcaaagccatctttcgcccatagcagggtgtaatctttgccgatcatattcttgatcagtacaaagttgctgtccacatcttcagccaccagaatcttcttgatcttctgcatcctcttgatggtgtggctgatgtatttcgtttccgaaacctcggaaaatgcaatacggtcatccgagcgttctttataaggtatcgtaaagaagaaagtcgatcctttgcctacttccgaagtggctccgatctcccctcctatcttctctatgatcatccggcagatggcaagtccgagacctgtcccctgcgcaaacgagttcaacttgacaaaacggtcgaaaatatgtcccaccttgtcgggagctattccgatgcctgtatccttcacataaaaacggatacattgattatcgactttaaagccaaagcggatttcaccggaaagcgtgaatttaccggcattggtgaggaagttggtgataacctgcgcaatgcgattccggtcttcttcaataatcaggtcatcgtcttcattgtccaagataagggtcactccttcctgcacacgatccttatgaatctgatagatattccggcatacttcacccaggttcatcggctgtctgacgtattccaatgtaccggcttctatcttagacaaatccaagatgtcattaatcagctgcaacaggatctctgagttctgattgataatgctcgaatagagtttttcttcttcaagggtttcggcagaaggcaacaaattggagaaaccgacaatcgcattcagcggcgtccggatttcatggctcatattggcaagaaaggcggtttttaatctgtcggattgctctgccttgatgcgtgccttaatcagttcctgttcgatattctgaaagttagtgatatcccaggagataccgatcagaagcggttcgcgcccttccatcgggacaagcgctttcagtgtctgcacaatacgggtctcgccggtggccgccacgtaggtctcctgcatatcgatccgttcatgcgtccggatcaattccaaatcatccctgcggaacctttcggcatctgcacgctccggaaagatctcaaagtctgttcggccgattgcccgggaggcgggaatcttggaatgttcggcaaatgccttgttccaatacaggtatctgaaatcgtcttcgggatctttcacatacagatagacggggacattattcagaatgccgtccagcaggagattcaattcacgaagttcatcccgcttcttgatcacatcggtaatgtcctgcgtaaaaaaccagataagttccgtatcatcttcctgtgtaaggtaggtagagacttggtgtactctgtttttctcctcacctttgcgcacatacgctgcacggtatgaaaagctgccgccattatcgcgtatatctttcagtttggcttcccataactccggtgtgcgcatagagacgggcaggtcgtatattttctgggtacccatctgctgggtgacaccgtactcttccataaattgcttgttggcatataccagcgttccgtcactggaaacggcaagaatgctgtcactgactttgtcgagtacgcttttaaatatctccagctgttgctgggtggccactctctccgtgatgtcacgacacataatcagaacgtattcttcatccaacggaaaaatccggttctcgtagtaatggtgagagccattgaaatccatgtcgtgatgcgctgccgaaacagtccgcgtggcgatcactttctgcatattggcatggatgttctgataggcttcgggaggcaccatctggcgcatgtgcattccttcaaaatctttgttggatatcccgacatgattggtttcttcattggatacgacttcaattcccacttcgtcgtggttgaacacagtcagcatatccggtaaggaatttaatattttaacggcatacctttcctgaaagctggtggagctttcttcgggttgtttattctgttccagagatcgaagttgtcgcttcagttgctcattttcttttctaagcaactccaattcctctttcagtgcttcttttgtttgttcgttgttcataagacatccggatataaatacgtacttatctgccaaaagtaaagaaaacttttgagataagtacgtaaaacacctttattttttttgagaatcattcaatcaccataatccggtcgttcaaaccgaccttcataccggcttcgacaaagacttctttcactactccatcggtgacagaacgaatctcgttttccattttcatggccaccaatacgcaaagcgggtctccacgcttgacttcgtctcccttcttcacatatattttcaggatcacccccggcatcggagcctgtaccacctgacgccctacggcttccgtaccggcacgggcattatgtatcttttccatctctccctgtagctctatctgataaagctcacccttattcataatggtataagaattattggaagaaggggaaatctgcactccatgcgagtgatgatcaatgatgatcgaatgaatggagtcgcctcccatattgtaatcgacctcatatattttaccgttgaccgctattttcttgatcggtccgtcttccagaatctccaccttatattcactgtccggcatatccagaagcttggcataataagtcgctaacgatgtacccatatctttctaattttaatgaatgaccaacttaactttcaattttcaactctcaacttattcaataattattagcagtcatctgcaacttgccataatacttccagagagattcgcccactacagggagcgtggtggcacgggatgcagcttctttctccctctcgtaatgccttacggtggcagcgatcacggcaacagtcggatcagtattctgacgacgcttcaagtcctccttgtcaaaacgggtatcgataaaagtcgtatcatattttccttcgaggaaagcggcattcttcaacacacgctgatggaaaggaatcgtcgtcttgatgcccagaatcttatactcacgcaaggcacgtgccatgttggagatggcggattcacgggtacgcccccagcagcagagcttggcaatcatcggatcataatgcagtgaaacttcgaatccggcataggcggcactgtccagacggaggttacggccttcgggagcttcacgaacagttatcactccgggagaaggcataaagttattctccggatcttcggcgtagatacggcattcgatggcagctccgctgaattttatatcttcctgcttatacggcaacggattgcccgcagccaccgtgatcatgtcacgcaccagatcgacgccggtacattcctccgtcaccggatgttctacctgcaaacgggtattcatttcaaggaaatagaagttctggtctttatccatcatgaactccagcgtgccggcactgtaataaccgatccgcttgcaagcctctacggctactttcagcatcttcttacgggtttcgtctttcacaaacggtgacggagactcctcgattaccttctgattacgtcgctgaatggaacattcacgctcgcccagatgaaccacattgccatatttatctcccataatctgcacctcgatatggtgcggattctcgatatatttctctatatagaccgcatcattaccaaaagaagtacccgcctcggactgagacaaacgaagagccgtttccgcttcttcttcggaacggaccagacgcatcccctttccgcctcctccggcaagcgctttcaacataataggataacctacttccttagcaaccttcttcacttcttcgatcccctgtacggaagtttccgttccgggaacgatgggcagccccgcttcacgcatgattttgcgtgcctcagtcttgatccccatcttagcaataatatcggcaccgggcccgataaagatcactccttcttcttcgcaacgacgggcaaagtcagcgttctccgacaagaacccatatcccggatgaatggcggctccggtctttttggcaatggccagtatcaactccggcttcaaataagaagtatcctccggcgaattggagatgcaataagcctcctccgcatagcgaacatgcaaagcccccctgtctacatgcgtgtaaacagccaccgtcgaaatatccatcacccgacaagtacggaagatgcgcatggctatctctccacgattagcaactaatattttctttatcataatctgtttcttttaatttatcactctccattttcaactttcaactttccattttccatttattaaagtggaatgttcgagtgtttcttaggcggattggactgacgtttgttggccagcatttcgaaactgcgtatcaggcgcaaacgggtaacggccggatcgatcacttcatccacatagcccagttccgctgcgcggtaaggattggcaaacttttcacgataatcgctctgaagttcctttcgcctttcttcgggagtctgtgacttttcgatctctttcttgaataggatatttacggccccgtccggtcccatcacagcgatttcggcagtggggaaagccagattgacatcgccacggatatgcttggaactcatcacatcataagcgcctccgtaagccttacgggtgataacggtcactttcggcacggtagcttcgcagtaagcataaagcagtttcgcaccattacggatgattccgccatattcctgatctactcccggaaggaatcccggaacatcgaccagagtcagcaaaggtatattgaaagcatcgcagaagcgaacgaaacgggcagcctttatagaggcattgatgtccagtgttcctgccagcaccagcggctgattggctaccacccctatcgtctttccgttcagacggatatatccggtgacgatgttcgcggcaaattccgcctgaagttcaaagaagttattatcgtcggccaccgcttctatcatctcctttatattataaggttgattcggattggtaggcaccaagtcggacagttcgggtgtcaggcgggtcggcgagtcgttggtgacaacaaaaggaggctcttccatattgttgcccggcagataagaaataagttcgcggatgtaattgatacattcaatatcattttcggccgatagatgcgccacgccggactttgtcatgtggatgcccactccacccagatcttccttgcttacttcttcctgtgtcacactcttgactacgtccggtccggtgataaacatatagccggagttcttgaccatcagaataaaatcggtcagtgcaggagaataaacggcaccaccggcacacggacccatgatagcactgatctgcggaatgactcccgaagccatggaattgcgaaggaaaatctccgcatatcctgccaaagaacggacaccttcctgaatgcgcgcaccaccggaatcattgagtccgataataggcgctcccatctgcatcgccatgtccatcactttgcaaatcttcttggcgtgtgtctccgaaagagcccctccgaatacggtgaagtcctgtgcaaaaacatagaccagccgtttgccaatcattccgtaaccagtcactaccccgtcaccggagaatttctgtttttccataccaaagtcagtacatcggtgggttaccagtttatcaagttcgataaacgaccctttttccagaagtaagtcaatgcgttcacgggcggtcagcttgcccacagagtgctgtttctcaatacgggcatccccgccacctttttctgctttcctgttcagttcttccagattcttgataagctctttcataggctgtttgtattaatgttatgtgtaaaaatagtcagtaataaattaattagttgtcatattgattacacaaaggtatttttatatagtaaacgtatcatttgccgaatttgttagcatttatgcccttaaacatctttatggcggatacgggcaaggaatcttttctacgggtttacacaacaaagtcacacaatcatgtgtttatcgcatatcattttaataaaacctagaccctaacaaaaatgagaacaattaaacttttattagcagccggtttcctgctcgtattgggtacaagtgcgtatgcgcaagtacaacggaatgaaacctatttacccaaattcgccatcaagaccaatgccctctactgggctacgagcactcccaacctgggattcgaagtcggactggcaaagaaaatcaccctcgatgtatccggcaactacaatccgtggaagtttggcaacgaccgccagatcaagcactggctcgtacaaccggaattgcgctactggctctgcgaacgtttcaacggaagtttcttcggcctgcacggacactacggagaaatgaatgtcagcaacctgaatatattcggaatggggcacgaccgctatgacggcagtctgtacggagccggcatctcttacggataccagtggattatcagcaaacgctggagcatggaagcaaccgtcggagtcggttacgcccgtctgaaatatgataaatatgcccgcggtgacggaggtgaaaaactcgggcacaacactcgcaactatttcggtccgaccaaaatcggcctcagcttcatttatgtcatcaaataatcgaactttctaaaacttacaatgatgaaaagaaaacttatctatctatttatagctcttgcagccaccatacttccggctcatgcacagaaatttctgaatgatgcgctcacgctttcgaatgtatccttatggcaacaaggaaactcgctttatgtcggcatgacggtcgacatggcaaacctaaccatcggctcggcacgtagtctcagcctgatccccctgctgacggacggacaacataatgtcccgctacaggagattatcgtcaacggcaaaagacgcgagaaagcctatctacgtggactggcgatcagcaaacaggaatccacggctatcatcgtaccttataataaaagagaaacgtttaattatacgcaggtcattccttatcagccatggatggcaaacgcatccctgcaactggtagagaacctatgcggatgcggcaactatcaggaaatgaacgcgcaggaactgataacgaacgatgtatctaccgaagccaaacgactgagtgccatgtctcctatcgtagcctacatccagcctacagtggaagtggtgaaaaaccgcagtgagcaatacgaagctcatctggacttccccgtcaacaagtctgtcatccttaccgacttcatgaacaatcactccgaactggtgaatattcattctatgtttgataaaattcagaatgacaagaatctgaccgtacaaagcatcagcatcgaaggattcgcttctcccgaagggccgctggctttcaacgagcaactctctaaaaaacgtgcggaagctctgaaagattatctggtcaagaacgaaaaggcatctgccaaactgtataaagtgactttcggtggagagaactgggacggactggtgaaagctctcgaatcctcttcgatgaaggataaggaaaccttcctgaatatcatcaaaaatacaacgaatgacgtgaaacgtaaacaggaaatcatgaaagtcggcggcggcgctccttatcgcactatgctgaaagagatttatccgggactgcgtaaagtgaactgcaaaatcgactacacagtggtcaacttcgatgtggaacaaggacgtatcatcatccgtgagaatccgaaatatctgagtctgaacgagatgtatcaggtagccaatagttatccgaaaggcagcaaggactttgtagatgtatttgatattgccgtacgtatgtatccgacggatgctgtagccaatctgaatgcagcggctgtcgccttgtcacagaaggatatcaataccgcattgaaatatatggaaaaagcggatcataccactgccgaatttctgaataatacaggcgtgtataacttcttaaacggagatattcaacgtgctacagcagcctttgaacaagctgccaaattaggaaatgaagctgctcaggcaaacttgaaacagttgcaacagatcatgaatatgaaaatgagcaagtaatagcagaagggacggaagtcacttaaaacgatttttcaggcacggattacacggatttcacggtttggggttacctaactcttaaaaccgtgttaatctgtgaaatccgtgcctgaatatatttttgacacattcacaaaaagaagttggataaaattagagtcacatatccatcaaaacgaccttttgttttgttatattaagtattcaccaaaagttgactatttaaaatttagaattatgacactaatccttgctattattccggtattgctattaattgtattgatggcgtttttcaagatgtccggcgacaagagcagtattatctcgttgattgtaaccatgctgatcgctcttttcggttttgccttttctgtagacaatctgttttattcctttttatatggagcactgaaagcggtctctcctattttaatcatcattctgatggctattttcagttataacgtattactgaaaacggaaaagatggagattatcaaacaacagttcgcttccatctctacgaataaaagtattcaggtattgctgctgacttggggattcggaggattactggaagcgatggcaggattcggaacggcggttgctattccggcggcgattcttatcagtctaggattcaagccgatattttcggcgactgtcagtctgatagccaacagtgtcgctacggctttcggtgctatcggaactccggtattggtgttggcaaaggaaacgaatctggatgtgctacaactcagtacgaacgttgtattgcaattatcggtactcatgtttctgattccgctggtcttgcttttcctcaccaatcctaaactgaaagcactcccgaagaatatatttctggccctgctggtcggaggtgtttctttggtcggacaatatctggctgccagatatatgggggcagaatcgcctgccattatcggaagtattctttctatcattgtcatcgttctctatggaaaactgaccgcatcgaaagaagaaaaggctcggaaaagtacgctgaaaaccaaagatatactgaatgcatggagcatctatttactgattttgttcctgatcatcctcaccagtccgcttttcccgagtttgagaagtacattggagaataactgggttacaagaatcagtctgcctgtcaatgctactaccgtaaactatacaatctcgtggttgacccatgcaggtgtactactcttcctcggtacttttatcggtgggttgatacagggtgccaaagtcaaagagctgtttatcgttctttggaatacggtgaagcaattaaagaaaacctttattaccgtgatctgtctcgtgggattatccaccattatggatacttcgggaatgattgctgtcatcgctacggcactggctactgctaccggaagcttgtatccgctgtttgctccggtcatcggctgcctggggacatttattacaggaagtgatacctcctccaacatccttttcggaaagttacaggcaagtgtggcaggacagattcatgtcagtccggactggctgtcagctgcaaatacggtaggtgcgacaggcggtaagattatttctccgcaaagtatcgccattgcgacttctgctggaaaccagcagggaaaggaaggggaaatactgaaagctgctatcccgtatgcactggcatatgtggtgattacaggaattatcgtttatattttcagttaaccacccgaaagaataataacaggataatgacactatcgccttgatatagtgacattatcctgcatacataaaggcgaactaaaaagtcggtagtaacctcaaactctcctccttcgggaaggaggagtccccgcagggggaggtggtaggtaagcatataactttgattatcatcaatctatgcatccacctaccaccccgactttcagccacccttccttcccgaagggaggggaatgggagatagaaccgactttttagtcactttatatattttttattactcacagctaaatcagcggttcccgaatcaccttcacgggattcccccgttgaagatgattatgattactccagttttcctgcgcctgaatcatcgcctgttccatcgtccatgacgaaagtttcaccaacaggcgttccgttgccagcttcttgttctgccattgtgaacgttggtcggaagctaccacactcatcccggacgggatgtgaacggcacggaccgcggactctgtcttgttgacatgctgcccgcccggaccggaagcccgtaaggtttcatagcggaaatctctttctgtagcctcctgactctccgacaacacaaacgaatgcacaccgacaaaccagtttttccgcttgtgataaatgcgatacgggctttgggcaatccattgcaccgttccctcccattcatccgccagttctccgctcgctgcgccttgaagagcaatggtagccgaaagcagtgtccggttgaccggccccacttcacgttctaccatttctactttcagtccgcttgcctgcgcctgtcttactattctttcgagtaccaatgccaccacccggcaacattccgcaggtcccctgccggaagttatctgtaaatagactttctccttcatcgccttattctttattcattcgtacgatgcgaggcataaatctaccttgcacttccaccaaagtctcctgtgtgtacatcacgcggccgatgtctttatatgccagaggtatttcctcgatacttccgcctatcaatgtcacgtctgcctgcgacagcatctttttcaaagccgactgagtgaaactctcctttgctttctgacgggacatcgctcttccggctccatgagaagcagagcacaaggatgcttccacccctttgccacaaaccagataacctaccgtagccatacttccgggaatcagacccgcctgtcccttttgtgcaggagttgcccctttgcgatgcacaatcgccatacgtcccggagctatctcctctttccacgcaaagttgtgatggttgttgacattcgcaacaggtttcagtcccaatgccttagccagattcaggtgaatacgctcgtgacaggcacgggcatagtctcctgccagattcatactcatccaatactcctgcccttcttcggagtccagactcagccatgcaaaatgctgcgcctcccgaggaagtttgcagacttcacgggccaacagactgtaatgtttggcaatagcagcacccaagccacgtgaaccggaatgagacagcaaagcaacataactcccctccggaagattcagcacattatccgcctgcaaagcaatttcaccgaactccacaaagtgattcccacctccggagcttccgagttgccgcacggcctttccttgcaaatcctttaataaaggagtcaaccgaaattcttcccggtccagcacttcatgctcctgttcaaagcccaggccgccatccattccgaaatgtgtaaagtctttcaaagcctcctttatctgataagaatatcgtttcaggaagtctgctttcgcatcaaataccgtcagactcatccggcaaccgatatcaaccccgacagcatacggtatcacggcattatcagtagccagcaccccaccgataggcaatccataaccggcgtgcgcatcgggcatcaacgctccgccgaccgttacaggcaggcgcatagccagattcatctgttgtttggcaagagtctcgataaacttacctccataagttttatacatcaatggctcttcccgtaagtcgtaagctacgaactctttcgcaagaatagtaggcgacaggcgttccgccagcttactccatatttcattgtttttataagattcgggatgttcgagtatattgctcaaagtcattgcaatctgttccttcgtgtcatgtttgcaatatttgcctacaatgtctactaccagactacgggctacattatcccgatatcccagtttacttaaatcttttaatcgtattcccatactttttttctgttcgcatactacaccccgtccgcctcaacagcagaaagtaaggttatacacagtatgccaatgcttcggatacggatacaaaacatccatccacagcattgaagtgaataatttgaaaaataaaaatgtgattgcaggactaatcaactataaccgccagcagcagagttgcggtaaacgtaaaaaacaagatgtcgcaaagccccgtcttcccgacgagacaacttagtcctaatttgaaaatattatagctccaacataattaataccctttccatcattttaaagggtgaatactcattttatcgcaacaaaagtagtgcatatttttattacttccaaagataaaaagacattttttagcgttaaaggagcagtgatgggaaattttgccaagtgttccagtcaaatcgctatttcacgggaagctatttcgccttacctttgcaacatagaaaacaaataaaccgaaaagatttatgaaactgattaaaagcattatgagcgctttcgctatcgtactggccaccacagcctgtgcgggaaatggcggagaaaataaaaagagtaatgaaccaacaaaggaggacaataaaatggaagtagtatcattaaataaagcagagtttttaaagaaagtatatgattttgaagccaatccgaatgattggaaatttgaaggcaaacgtccggcaatcgtcgatttctatgcaacatggtgcggaccgtgtaaagcgctgcatcctgttctggaagaactgagcaaagaatatagcggtaaggtggacatctatcagattgatgtggaccaggaaaaggaactggctgccgcattcggtatccgcagcatccccaccctgttactgattccgatgaaggaagaaccgagaatcacgcaaggggctttgcccaaagaccagttgaagaaagcaatcgacgaatttcttttgaaacagaacaacgaagctaaataaactaatttcgactttttctcttgataagtaactgccctctatcagtatttttatgactgacagaggacaggttcttttataagctcccctttatcttccgatatagtatcagattaaagactaacggatatatatgacataaaaaacatctcaatgatctgtcaccatctttgttgtttcatcacgaatccttcaaagaagtcatcccgataactattcccgatagcaatctcgtacgacttgataaatatatcattgttgtcgaacgaatcaatatgagttgtgttaactatatacgacttattaacccgtaaaaaagagtccttcggcaataaatcaaagaccgctttcagactcatacgggtgatgatgcgctgttcgcccaactgtagaatcacataatctttcaaaccttccaccaaaaggatatcagaaaagttaaccttgaagtatctgcgttccgcctttacaaagaaatactcagctgctacaatcgtctcaatggcttccttttcctcctgtaacaataaagaatgataagactgcgccttctcaaccgccttctgaaagcgctccgcctccactggctttatcagataatctattgcgtccacttcgtagctatccagtgcatactccgtataggcagtggtaaagattaccaatgtccgtttggaaatggtacgggcaaactcaattcccgtaatgccgggcatttgaatatccagaaagacaaggtctactacgtgctgctccataaagtcggaagccgtggcggcactgttaaaacttcccaccagctgaaggcattccgcctcctctatcagcaatttcatagcctcacgtgccaatggttcatcgtctacaataatacaattcataacgttatacataaagttaccatataccgattttcattctctatctgctccaattcataacaatcgggatataacaatcctaatctacgctgaatattcgcaagtccgatccctcctaccttgttgctgacagcaaccgccggcatcgtattttcacaacggaactccaactgattctcctctaccttaaaagaaaggtgtacagacgaaggatgttcgctatcaaaactatgctttaccgcattctccacaaacgggataaacaataacggctgaatccagatggagtcaatgtccccttcctgctccattgtaaactgaaaatgatcccggcgtatcttttccagattcagatagtcgttcagaaaacggatatccgaggctaaagcaaccctttcgcgcgaactgtcatttatctgataccgcagcaaatcttccagtttgaaaagaactttggaagcttcttccggattccgctttatcagtacattggcgttattcagcatattgaacagaaagtgcggattaatctggctcttaaggaacttcagttccgattgcaaagtggtagattccagctgatcaatgcgcagattatgacgcagccaatgagtgaacaatgaaatagctgccgaacctgcggtgacaaaccccatagtgagtatccccgaaaaggtattgatgaaagtagcaaatccatcgggattcctgacaggcaaaataacttcaaaaagcattccctgcgtaactgaaaggaaaaggatgaccactaagttggtaactatcgcagccagaacataaccacccaaacggttctttagcagaaaagaaggaaccaggacgtacagattggtatatatcaccgcattcatagacaaaaaatatacaaggcagcctccaaagcgtttcaagaaagagaccatctgcaaaggctcgtaccagaagacattgatggtaatcagcaggacaactatctgcaagaggatatgtctgtatatcctgcaatgaggacttagcagaaaagcggtgacacttttgccgttcatggttccgtcatcgggattcctgtcaagcgtatttttatcgtttgtatttattttcattgttcccctccattcagttccagtcttacaccttctgtagtcaaagatattccgtagcgctcgccatataataagtccagcctttgtctgatccgttccagtcccctgtttacgagattaagttgcgggcacatacaagtgaatacaatcgtacccttctccgctttcagatgaatgtccagagagacaggaagtgatatctgctgttcgtgcgtcaaccccatgatatgctgcacgaaaggaatgaagagcaaaggaggaaccagcatcctgttcacctccccttccgaagtaaactgataacggaattgcggaagagagctttgctccaacatcagatagttggtaaggaaggtgatttcactgctgagcaatacttttcgccgactgcaatcatataactgatagcgcagcaactggctcagcttcatcaacatcttcgaagccttttccggcttggtcaatgtcagttcacccgaatgatgcaacgttttgaaaagaagttcggggctgacctgttctttgagctgttccacttcggacagtacgtgcgccttttccatctgtgaaacacgctgattctcaatcatccattctttcagaagcaaagtcatcgttcctcctatcatgcaaagcgttgacagcataaaagaagaaatgtagtccatcagcatgggaaccgagaaatacgatccccgcgcatgaagctgcggccaatgggagtaagcaaggtattctatgaccatctgtatcagcagcgcaatgaccatcgccacagacagcactgacagataagccatataatgccttttcaataaatatttcgggaataaccagaaaagattcaggcagataacaccgacgtatgtgagcatatatataaacgtgaacacataaatccatacgcccaatatatcccgatagtccataaaaatgatgaacacctgattgaaggagatagtgcccaacaccatgacaagtatcagataccgcatccatcggaatgccggacttacgagcaatctatataaaaaggtcgattcgttgcctgctgcagttgtttcagttgccatatgcttcattgggtacgaagataaaacattttccgttaaggtctctataccggatatctaaaattcaagcttataactcacattagtcagaacggtagagccgtcggttgcgtctatctttccggttttcacgttatactcatgtccgtagtgctctttcgtgcccataaagttcaagcccttcacagcaaattcatgagatacttttttcttgttgatgcgatagctgacggtataattgccgataaacatgggcgaatactgtttggagaatgccttcctttcgtcgtactgcacttccttgtccggatgcttcatggttgcttccatatcaatcggggaatagcggtcgccgccctgcaaggtcagtttcaggttgatgctaaaaatattctgtttgttgcgtcccagcatccattctttgccgatcagtccgttgatgacatagttgcggttgaacttcgtgttgtaccatacaccgtctccgccacggtaacgggagtcgaacaacgaaccggagatcatgtaataaagtcctttttccagaaagcgttcgagggttatgtcaatcccgatattccggcctcttcctttgttgacaagcgcatcttctacataaaagtcggagcggttgagtacggaataggaactgtccgccattaccggtacatcgtgcagaaactgtacataaggttctattttcagattcatgcggtccgaaatcttatagccgaaagacaacatgatgtgctgcgccttggtgaagtcgaggttcttgttgacggattgatttcccgtgctcttcgttttcacaaagtagacgtccattttctccattcggctgtatatgccgtaagctaaagcaaaggtcgctttcggggtagcttgccatttcagtccggcacggggttcgacagaccatttattattcagcgtcaggtattgtccatagataccggcgttgagagcccaacggtcgctcagtccgacagaagaactattgtaagcagaaatcagactcgtattgccatctcccttcgataccgtttccagcagctgagcttcgtatggagctatggcaaggttcatgtcataaaacatggcagtataagtaaatcctgtcttattggtaaagcggttgctgaatttacggttgaaggtgctggtcagtatcaggttggtatgccttgattcaaggtccatataaggagtcgattccaacgcatgattgaacatggaagcgcctccgtccaactgcgagtaggtagcggcaacggttgttttcagtgatgcgtcactattgaaaaagtaacggtgactgatacctccggcggccatatactgcttgtcacgtgattcgctgcggtcgcccagatattcccatttctcaggattcctctccatgtcactcttaaatttgtctatcaggctggttccccataccgagaaagtcccggccatctttgtgggaaagtttagtttgaagttcaggtcctgatagtccatcgttccaccgtcaagattcagtagtcctgtggtagagtaacgataattgaagatatacgaggctttatgcttcttgctcaaaggaccttcggaagcaacgtcaattcccatgattcccacttgaatcgtgttttcgttcttttgattgttaccgttgcgcagcttcatgtcgaacacgccggacactgcatttccatattcagccggaaaagctccggtgaagaaatcggaatttccgagtacctgtgagctaagggaagaaaggattcctccacccaatgtggcaatatccgcaaagtgattcggattcgggatttctacatcctccagcctccattgcaacagatggggtgcattgctatgaatcgaaatgccattcgaagagacgctgggcgccactccggcaaaagcggaaaccagacgtgcagggtcgtcgaatccgcctgcataacggctcgcttcttccacgctcagcatacgtgctccggtagttgccatcttattcatcgcttcttctttgttcgtccgcgcacggaccactacttcactcagttcgttgacgctttctttcaaaggtatttccaaatagacctcctttgcggaagtcaccagtatttctctgaaaatgccgggttcatatcccatgaacgctgcctctatcgtatgtctcccgacgggaacctgcggaatggtgaaacgtcccagactgtcggttgtcgtccccatcccctctttatctgacaatcttactgtcgcatacggtataggatatttggaatctccgtcaacaaccaccccacgaatggtctggaccggacgccctttccgctccgatgtttgcccgaaagcaaaggctgatacacacaaaccgatcaacagcaatatccatcctccataacggtacagtttccgtgtgagttcttcgcaaagaactctttcaaaagttttaagtactactccgcattcatctgccggaatccccgaacggtttgctacttcccctaa

SEQ ID NO: 4547 - DNA, 14331 bp, Unknown
  gut microbiota DNA sequence
cgccagtctttattgactggcggggatttcttgttttggcagtttaggaaaaaatagctatatttgccgacgacaattattttattaaacgtttaaagcaaattaaaaggtatgaaaacaaaactttttttggctgctgtagcagtaacattttctttcgctgtgatctcttgttctggtaacaaagctaataacgctgccgcttctaaaggtgaagaagcaacagttgaaactgtagaagctgttgctgttgaagcaactgactcttgctgccaggcgaaagactcttgtgctactgcttgcgataagaaagctgattgcacagaaaagaaggaatgctgtgataaaaagtaatctattgatttagaacgataaattaaaagggggtatagtgtgtccgcactatgccccctttttctgtttgatgaaatacggggctttattagtaatacttttctgctaataaccgactttaacttatgaaatgaaattattttcgataaaaaagtaacgtattatttggtagtacagaaataatccatacctttgcaccgtcaaactataaaagagacaaaaaatgaatcagatgtttatacatattctactatgcggtattattattctactatcaaaggttagtggaagtgagtgctgcgcgtaaatgtgtatactgaaaatatacgaaagcctttctcacttccaagtgtgaaaggtttttttttgagccaataataacataaaatgatagaagatggacaataggttatttatttttgataccacccttcgggatggtgaacaggttccgggatgccagttgaacacagtggagaagattcaggtagcgaaggcactcgaaactttgggggtcgatgtaattgaagccggcttccccatctccagcccgggagattttaattctgtgattgaaatttctaaagcggtgacttggcccactatttgtgctttgacccgtgctgttcagaaggatattgatgtagcggtagacgctttgaaattcgccaagcataaacgtatccatacaggtataggtacttctgactctcatattaaatataaattcaactccaatcgggaagagattatcgaacgcgcggtagcagcagtgaagtatgcacgtcgttttgtggatgatgtggaattttatgcagaggatgcaggacgtacggacaatgaatatttggcacgtgtggtagaagcggttatcaaagcgggagcgacagtggtgaatataccggatacgacgggttactgtctgccttccgaatatggtgcaaagattaaatatttgatagatcatgtagacggcattgataacgcgattctttctactcactgtcataacgatttgggaatggcaacagcaaatacgattgctggtgttctgaatggagcccgtcaggtagaggtgaccattaacggtatcggcgaacgtgctggaaataccgctctcgaagaaatcgcaatgattatcaagagtcatcatgagatcgatattcagaccaatatcaatacacagaagatttatccgaccagccgtatggtatccagtttgatgaatatgcctgtccagccgaataaagcaatcgtaggtcgcaatgcttttgcccattcatcgggtatccatcaggatggtgtgttgaagaatgtagaaacttacgagattatcgatccgcatgatgtaggcatcgatgataactctatcgtactgactgcccgtagcggacgtgcggcattgaagaatcgcctgtcgttgttgggagttaacctggatcaggaaaaactggataaggtatatgaggagtttctgaaactggccgataagaaaaaagatatcaatgatgatgatgtattggtattggcaggagcagaccgcagccagaatcatcgtattaagttggagtatttgcaggtgacaagtggtgtcggtgtacgttcggttgctagtctgggactgaatatttccggtgagaagtttgaagcttgtgcgagtggtaatggtccggtggatgctgccatcaaggctctgaaaaagatcgtagatcgtcacatgacattgaaagaattcactattcaggctattagcaagggaagtgatgatgtaggtaaggttcatatgcaggtggaatatgataatcagatttattatggcttcggagcaaatacggatattatagccgcatcggtagaagcttatattgactgtattaataaattcaaggcataaaggaacagcgaaagtggtattgaaatacgtaccctgcattaattataaatcatacatagtaaaaatagatataacagatgaatacattatttgataaaatatgggatgcccacgtggtgactacggtggaagatgggccgacacaactttatattgatcgtttatattgtcatgaagtgaccagtccgcaggcttttgccggattgcgcgagcgtggcatcaaggtattgcgtccggaaaaggtattctgtatgcccgatcacaatactccgacacatgatcaggataaaccgattgaagacccgatctccaagactcaggtggatacactgacgaaaaatgcgaaagatttcggtctgacccatttcggtatgatgcatcctaaaaacggaattatccatgtggtaggtccggaacgtgcactgacactgccgggcatgacgattgtttgcggtgactcgcatacttctactcacggtgcaatgggagctatcgctttcggcatcggtaccagtgaagtggaaatggtactggcttcacaatgtatccttcagtcaagaccgaaaacaatgcgaattaccgtagatggcgaactgggtaaaggagtgactgcgaaagatgtcgctctgtacatgatgtctaagatgactaccagcggagctaccggttacttcgtggaatatgcaggttcggccatccgcaatctgactatggaaggacgtcttactctttgtaatctgtccattgaaatgggagcacgtggtggtatggttgctccggatgaagtgactttcgaatatatcaaaggacgtgagaatgctccgcagggggaagcatgggatcaggctatggaatactggaaaacgctgaagagcgatgatgacgccgtattcgatcaggaggtccgttttgatgcagcggatatcgagccgatgattacgtacggaaccaatccgggcatgggaatgggaattacgcaaaacattcctactacggaaggaatgggagaggctgcacaggtttctttcaaaaaatcgatggaatatatgggattccagccgggtgaatcgttactgggtaaaaagattgattacgtatttctgggtgcttgtactaatggccgtattgaggacttccgcgcattcgcttctctagtgaagggacgcaggaaagcggataatgtaatcgcatggctggttccgggatcatggatggttgatgcacagattcgtaaggaaggaattgacaagatattgactgaagcgggatttgcaatccgtcagccgggatgttcagcatgccttgcgatgaatgatgacaagattcctgcaggaaaatattcagtatcaaccagtaaccgtaactttgaaggtcgtcagggaccgggagcccgtactttactggccagcccgttggttgctgctgccgctgcggtgacaggagtgattaccgacccgcgtgaactgatgtaatttcaatcgtaatttgtaaatatttaaattgtaaacagaaagatggctaagacaaaatttaatataataacaagtacttgtgtaccccttcctttagagaatgtagatactgaccagattattccggcacgttttctgaaagcaacgactcgtgaagagaagtttttcggtgataacctgtttcgtgactggcgttataatgccgatggttccttgaacaaagattttgtgctgaacgatcctacatatagcggacagatattggtggcaggaaagaacttcggttcgggttccagccgcgaacacgcagcctgggcgattgccggatatggtttccgtgtggtagtatcgagcttctttgccgatattcacaaaaataatgagttgaacaacttcgtacttccggtagttgttactgaaggatttttgcaggaactcttcgactcgatctttgctgatccgaagatggaagtggaagtgaaccttcccgaacagaccatcactaataaagcaacgggtaagagtgaacattttgaaatcaacgcttataagaaactttgtctgatgaacggactggatgacatagacttcttgctaagcaataaaaataaaatagaagaatgggaaaacaaggcgtcaaaatagagatcatggacacaacgctccgtgatggtgaacaaaccagcggagtatcttttgtgccccatgagaaactaatgattgcccgtttactattggaggatttgaaggtagaccgggtagaggttgcttcagcacgtgtatcggaaggtgagtttgaagccgtgaagatgatttgtgattgggcggcccgccgcaatctgcttcagaaagtggaagtgttgggatttgtggacggtcatacttcggtggactggatacaacgtaccgggtgccgtgtcatcaatcttctttgtaaggggtcattgaaacattgcacccaacaattgaaaaagactcccgaagaacatatcgcagatattatcaacgtagtacattacgcagatgaacaggatatcggagtgaatgtatatctggaagactggagtaacggaatgaaagattctcccgaatatgtgtttcagttgatggatggcttgaagcagacaagcatcagacgttatatgttgcccgatacattgggaatcctgaacccgctgcaggtgatagaatatatgcggaagatgaagaagcgttatccgaatacccattttgattttcacgcgcataatgattatgatctggcggtaagtaatgtgctggctgccgtgttgagcggtgtcagaggactgcatactacgattaacggacttggcgaacgggccggtaatgcacccctttccagtgtgcaggctattctgaaagatcatttcaatgcaatgaccaatattgacgaaagccgcctgaatgatgtcagtcgggtggtagagtcctattccggtattgtgattcctgccaataaaccgattgtgggagagaatgtctttacacaagttgcaggcgttcacgccgacggcgataataagaataatttgtattgtaatgatttacttcccgaacgtttcggacgtaagcgtgagtatgctttaggaaaaacaagtggaaaggcaaatatccgtaagaatctcgaagatctgggactggaactcgatgaagatgccatgcgcaaggtaacggagcgaatcattgaactgggggacaagaaagaattggtgactcaggaggatttgccgtatattgtatcggatgtattgaaacacggggcgataggcgagaaggtcaagctgaagagttattttgtaaatctggctcacggtctgaaaccgatggcgactttaaagatcgaaataaacggaaaggaatacgaagaaagttcaagtggcgatggtcagtatgatgctttcgtacgtgcgttgcgcaaaatttataaagtgacgttaggacgtaaattccccatgttgacgaattatgcggtatctatcccaccgggtgggcgtacggatgcatttgtgcagacagtaattacctggaactatgacgaacaggtgttccgtacccgtggacttgatgccgaccagacggaggctgccatcaaagcaacaatgaagatgttgaatctacttgaagaataagttgattttatattaacatgcatttgatgcttccgatatgacagagattaattaactttgagtagtataaaagataaaaagaaaagtaacatggattttaaaattgctgtattagcaggcgacggtatcggaccggagatttcggtacaaggtgtagatgtaatgagtgccgtttgcgagaagtttggccacaaagtaagttacgaatatgcaatctgcggtgcagatgcgattgataaagtaggtgatccgttcccggaagaaacatatgaggtttgcaagaatgcagatgctgttttgttttcggccgtaggtgatccgaagtttgataatgaccctactgcgaaagttcgtccggagcagggattgctggcaatgcgtaagaaattgggattgtttgctaatattcgtccggtacagacattcaaatgcctgatccataaatctccgttgcgtgcggaactggttgagaatgcggatttcatctgcatccgtgagctgaccggcggtatgtacttcggtgagaaatatcaggataatgataaagcatacgatacaaactactacactcgtccggaaattgaacgtatcctgaaagttgcttttgaatatgcaatgaaacgcagaaagcacctgactgtggtagacaaggcaaatgttctggcttcttcccgtctgtggcgtcagattgcacaggaaatggctcccaattatccggaggtgacaactgactatatgtttgtggataatgctgccatgaagatgatccaagaaccagctttctttgacgtgatggtgactgaaaatacattcggggatattctgactgacgaaggttctgttatcagcggctctatgggattgcttccttcagcttctaccggtgaaagtactccagtattcgaaccgattcatggttcatggccacaggcgaagggcttgaatattgcgaacccgttggcacagattctgtctgtagctatgttatttgaatacttcgactgcaaggaagaaggtgcgctgattcgtaaggcggttgatgcatcactggatgaaaacgtacgtacacctgaaattcaagtggccgatggtgccaaatacggtacaaaggaagtaggacagtggattgttgactatatcaagaaggcttaaacagatattctgaataagatatatggaggctggattctttaaatggagttcagcctcttttttgttcattccgtttctttgtttttttactgaagaaaatgagtccgttgggagaaaaaactagtcggactgttaaaaagtaaaagagtaagatatttgctaatgaaaaacagtacatttgcacagattaatacacaagtgctatgacaaaaaattatctattcttactgttgggtttgctgcttgcagcgtgtagttctgatgacaaggacgaacaaccgattttagtaaccaatgttgtaatgcctgcttcgggaacagtattcaagcccggtgagaaggtaacgataatggcgaaaggatttcaagacaatgatgaaatcatgttcgatattcgctggccgcttcaagacgaagtgctgcatgaaggatatgctaaaggaggacggggtgttataacggaaaagacggctacgagcattacttttctggctcccggacactggcctgcttctacaacggaaatcttgttacgccgctccggtcaaatgatgtctttaggaaagatttcggtggcggatggacaggcacccaaagattttcagctttatggtatcattaattcccgttccaatacccaccgtcctcatgctatcgaatacatcaatcttgaaaagcctcagacggcagagatagtacgacttgcagacaatcaagacttctcttgtgtagtcaaccttcccggaagctggagccttagtggagtatggacgaaggatgatcgccgtacgaccggactttatgatctttctatgaactattgggaaaagccgggagctgatcagcttgtaacaatggggatagcgaccgctaactctgtatttggggtatatcaaggcggagaccgtttatttgttaaaacagttaatgtgatgccctataccagaatgtatgtgccggagaaacctgattatggttttctgctgcccgaagggatgaaggctgaagcattgtcacgttatccctgtatacaaatgagtgatggaaatatactctgttcggctgataacggcgatggaactttttcaccagtagtcttgaacgggcaaaatatagaagagaaaagtatatatgttggcgaaccgatagaggctgtggcattgatccctttttggatagttaagcctgtagaaggtatgggaacggctaaatatacacgtgttggcggatatatcgtatcgaagagaaatggtgctacaataacagagggagatggaacagaatttaggctatggaacccgactacaaagatgctggatgaacctttcaccacattccctaatgctgcgtgttcagtagccacacttgtttcggatgattttaagaaacaggagctttatgtattgtttgatggtagtcggaatggaaggctgatttatgtatatgatttactaaaaggtagctgggagtcattatatccagggggcggatttccttattcagaaatcgtattagcccgataaggttattactcagctcttctccgggctactatgcacaaaggccctttttcatgcttatatgaagcaatggagacaaagccggactgcaagagtatggatttcaattcatcacaagaacgaataatcatcccgtcaatcagatttgtccaagttttgactgacaggttattcagttcgcagcaaatcaggaaatgtccgtttcgctttaatacccgtgttacttcggtgaatgctttcggaagatcgttccaaaagtaaaccgtctcgaaggcagtgaccacgtcgaacatttcatcggtataaggcagtgtgtctaccgtgccttgttctataaaacagcgggtggaaagatatttcttgtttttcttctgtgcgaaaaggacactttccggtgaaatgtcaatgccgtatgcttttccttgcggacagcgatgcatcagctgtgtaagattggctccgccaccgcaaccaatgtcgagcacattccatttcttattccatactatatgtgacattccccattcggaaagcaaagtgtgccgtttgttcatttcccggagaatgactcttccccaaaagccttcaggctttttgagattgtggaataacttatggatgatatttcttttgcccatgttataaactaactttgcacgatggaatagatgataatgcctgctaaagtcagcaatccggtatagatcataacttctgtttgtttcattccggcaccctttccaggaacaggagtgtctgactgaagtcgtgccgttaacttgtgggcgataaagtagaacagccaacctccgaatccaccgataatggctcctgctactaaatcaccgggataatgtaatcccagatacaggcgtgtataagagttggtaaatgcccaaagtacgataaatatgcttaaccagcgtttacggaacaggcaaatcagaaatatggcaagtccgaaagaattggcagcatgacaggaagggaaaccgaatcctcctcctcgtcttccattcacaatatagaccaaatccgctatcggattttccggattggagggacgcagacgacctaccaacggacgaagaaaactattgcacatctgatcggcaaacgtgatagtgagggcgatcgctaccacatagcacaaagccactttccaatgaaaattcttgagcagtatatataagatactggcatacatcgggacccatataactttacctgtgaatgcactcatgaagtaatcccagaaaggcgaatgtattccgttgaagaacaaaagcagttgggtgtctatatccgaaagaaattctatcataaaataaatcgtattattaaaaggtggatttgtctgatcttatcgtttagccaggtcatcatatagtttctgaaggaaggctttgcctttttccagattggctcctttctctgtcccctcatctatctggacggtgttggcatccagattgtacactaattgattttccgcagtcaccatgccaaacagtgtcggttccgtgaaatacccgaagtggggagaagacggattaaagatattcttgctgaaagtaaagtcatcatgcggcaatccgagctgagaaagtagcgtagcggcaatatcgatctgcgaagcgtatgtgtctactactcgtggttctttcacggctcctccgatcagtattagcggaattgtatgcccttccagcggattttctaccggacgcggataagctcccaaatgatccggtacaagtacgatcagtgtattcttccacatcggggtctccttatactgtctcacaaaatctcctacgcaactatcagcataggcgaaagcattcagcactttatcgtctaatcggtagaacggaacttcaaacggctcgtgactgcttgatgtctgcacgattttaaagaaaggttcctgctgcttctcttctttgaggtctttcaggaaacgttggaaaagtgtatgatccggtgctccccatttaccctgacgttcggacaaaggaaaatccgtctcggagataatcttctcaatacccgatgaaaccagataagagcgcatattggtgaagtctgcatcccctccgtaatagtattccaaactgtatccggcatttttcagactgcgaggaatggaaggaagtccgtccgttttctcaggatacttcattatgctggtactcggctgaccgggataaccactgataatagatgccagtcctcgatccgtccggaaactgtttgcgtagaaattagtgaataacactccttctttaccgaatttatccatattcactgctacattcggctgtccccccattgtttccattaagtgtgtagaaaaactttcgaggataataaagatgatattcgggcgttgagtatttagaatttgcgggatactgtctgttgctgccacaggtttatccagcatttcggccaacaggtcatctgcaactttcgggtccataaaccgatattgcttatcgaaattgttttgatgggtagcagaatacataaaactgaatgccggattgatggctgcatgattcatccgttggttttggctatagtatactttgctcaggttcattgtcgatacggaaaaaccgccacggataggaatgaagagcgcagctgtcagtaataaaaggacgagagatacatactgccgctgataaggtatcttcaacggtgctttctcccggataagtacggcgtagaaaataccgtagaggatggctgcatagatcagcatagctaggattccgagtaatatgaaccagaagctgacgcttgccatggcatctttcggagatgagaagaagtagaagatcggggtggcatccagccggaatccccagaaaccgtataagcccagatcgatgatgaagatgcaggacatcacaaaagcgatgattccgaagtaaccttgccggatgcggcgtagtatggaagattttgtccaggcggaagcgataagcaggaagcccgggatggcagtcagatatcctgccagtgagaaatccagcggcaagccgtgccacatcacgctgaaataatcgccgattgaggcgtctgtatagagttcatggtagtaagccatgaaaataggtttttgaaggacaaacagaagaacgaacaaaaaataagtcgtgagaaattgcaggattctctttttcatatctataaacttaaaaatattgaacggagacaaaggtacaattcttttctgtatctttgcgcatcaacctgataaaacgaggtgaatgatggcaaaaattgcgaataaattaacagatttagtgggtaatacacctctaatggaactttccggatatagtggaaagtatggtcttaatcagaatattatcgctaaactggaggcttttaatccggcgggaagcgtaaaagacagagtcgctctttctatgattgaagatgcggaggcccgcggggcactgaaacccggtgccaccattatcgaaccgaccagcggaaatacgggagtcggactggcgatggtagcgaccattaaagggtatcacctgatattgactatgcccgaaacgatgagtctggaacggcgaaacctgttgaaagcactgggggcgcagattgtgctgacagatggcttgggcgggatggctgcttctattgccaaggcgcaggagttgcgcgatagtatccccggatcggtgatcctgcaacagtttgaaaatccttcgaacgctgctgtccacgagcggacaacaggagaagaaatctggcgggatacggatggtgaagtggcagtgttcgttgccggagtaggaaccggaggtacgatttgcggcgtggcacgcgccttaaaaaaacataatccggatgttcatatcgttgcggttgaacctgcgtcgtctcccatattggcaggaggtcaggcagcatcacaccgcatacagggaatcggggcgaattttattccgaaactttatgatgcttctgtagtggatgaagtgatcggtgtgcccgatgacgaagccattcgtgcggggcgggaattggctgcaacagaaggtttgctggccggaatctcttcgggagcggccgtatatgcagcccgtcagttggcacagcgtccggagttcaggaacaaaaaaatcgttgcgttgttacctgatacgggagaacgttatctgtcgaccgagttgttcgcttttgatgcctatcctttggattaatatttgaatcatgataagaattattttaattttatttcttagctttccggttgccctgtgtgcgcagacctatcagcaattatcagaaaaggcaattgaatatatcgaaatggacagtctttccaaagccgaagaactactgcttcaggctttgaaactggagccgaagaatgcaaagaatgctatgcttttttccaatctgggattggtacagcgtcggttgggtgaatatgacaaggcactcgaatcttattcttttgcgctgaactttgctccattggcagtacctattctgctggaccgagctgcgattaatctggaaatggggaatacagaccgtgcttataccgattattgtcaggtacttgacgaagataaacagaataaagaagcgctgttgatgcgggcatatatctatgtgctccggagggattaccccgcggcacgaatcgattataatcgcttgttggagattgacccgcaaagttatagcggtcggcttgggctggctaccttggaacagaaagaaggaaaattcaaggaagcgctcgaaattcttaataagatgattacggcaactcccgaagacgcgactctttacattgcccgtgcagatgtggaacgggagatgaagcatgaagatctggctttggtcgatttggaggaagctattcgtctgaatccttcttcggcggatgcctatttgttgcgtggcaatatttatctgacacagaaaaagaaagcattggctaaaatggactttgaaaaagctatttcgttgggcatacctcctgctgatttgcacgagcagctgaaacaatgtaaataaaagacaaaacttaaaacatattactactaactaatacccaaacagaaaatgaaacgtattgtttttttagattacgtgcgcgtgttcgcatgtttcctcgttatggtggtacacgccagtgaaaacttttatggtgctgccggatctacggacatggcgggaccgcaatcttttttagccagtgaagcagaccgattgtgggtggccgtgtacgacggtttctcacgcatggcagtaccattgtttatgattgtctctgcttatctgctggtaccgatgaaggagggacagacttcatggcagttctaccgccgacgcttcactcatatcctgccaccgtttttcatatttatgatactctatagtatcctaccgatgttgtggggacagatagatagcgaaacatcaataaaggatatgtctcgaatattgctgaacttcccgacgcttgccggacacctttggttcatgtatcccctgataagtctttacctgtttatacctattatatctccttggttgagtaaagccactgcaaaagaagaacgtttcttcataggactgttcctgttatcaacgtgtatgccgtacttcaatcgctggtttggtgaagtgtgggggcagtgtttttggaacgaataccatatgttgtggtatttctcaggttatcttggatatcttgtgttggcacactacatacgtgtacacttaaaatgggatcg

SEQ ID NO: 4548 - DNA, 2825 bp, Unknown
  gut microbiota DNA sequence
atttcagtgtatccttcttggcttgttctattaaaagattggcgtaatgatttcccctatacttttcttcaatgaataaggcaaccaaccaaggatataaatccgcgcgagagttaaaatcgttgctggtaagtccagcacatcctattatttcatcaccattcattaaaaggtaccattgcggaatgggattttcggaattcagagaatgtctgaaacaattgtcatacaccatttttgtgttctcgttaccccacttgctttggaaataggcgatagctctttccagatactgaggtgagtctctgagtgaaactagattcatacgtttattgtattgtttatatttaatattgccaaagttataaaagtatttttgaaaaccaataggttgcctgttttatctgactaattctgtatatttgcaagtatgttctgcttattaaataacatcataatatatatggagaataaagaattgcgtgaaagaatgctttcgggaaaaatgtataatgacttgtctgtagaactggttcaaagaagagaacaagctgttttcctgaccaatgattataattccacttatggaaagcctaaagaagttcgggaggcattgttgcgtaaactattgaggcgtattggcagtagtgttcattttgaaccgaatttccggtgtgagtttggattcaatatcagtatcggcaataatttcttcgccaattttgattgcatcatgttggacggaaatctcattacgataggtgacaatgtattattagggccccgtgtcggtttatgtacggccaatcatgcgctcgatccgcaggaacgtcttatgggcggatgctatgcccatccgattgtcattgaagataatgtgtgggtaggtgccggcgttcatataatgggtggggttactgtcgggagaaattcagtaatcggtgcgggcagtgtggtgacaaagagcactccggagaatgtaattgccgcaggtgttccctgtaaagttattcgggaaataaccgatgaagacaagaccggttttcggctttagtattctacggatgatctagctcgctacttactgaaatttaaggatcgctacgcaattctttgtcccgcaatatgcgaaagattattcgtctgactatagttgaactttcgtctgacagctgtttctttttcgtctaacaactgtcagacgaaagttcaactatagtcagacgaatacttttatgtaatcttgatgctagagtttagcaaagtcgtccacaagtttccttgattttatcctaactatatatcctttgtttaatgctgattaccataatttgcaatctatccattctagtttgtcgaatagccataattcaaaaaagaacaagataaatgggaggacaatgatgaaggccatagtcactccactacttttcgagtgtcggtaatgattgataatagctctttttctgtctttacggtaacggaaaaatatgaaaatgtaaggcaataaaagaatcagtacttgataaaatatgaccgcattgtctccaaagtgatgggttacactcgttaatccaaatgccggaaaagctacgatcattatccaatactccagtaaaatgaatgcaccggagcatctgaaggctttcttgctccattgttcacccttaaaatacagataatcgaagaaataatatctgtatttgggaggatgtaacctttgttttacacgttcgaaataattatctgttttattcgtaccttttttcatttaattgattaatagtaattacatattacaacttactcgacgtatttagtaagtctctctgtttaaaaaagaattgagccatttttgagagaattcttcttgctcacgagtattcggaaattcttgaatctctgcataatcaaatatcgttgcgatatctttttttaatgcaggttttccaagagtcaggatatataccttattggaggtactcatcattcccgattgatgtgcatttctcatagcaccataacatttcattccaataccttttgacaatagtatatctcgtaacttttgaaatgtcgggaatatatcctcttcctgtacttcaaacagatgattgtctaatgaaacagacatgataaatgaatcatcttctatgatgtttatagttagatcaaatactgtattatctgataacctgactgctactactttctcttcatattcttccatatcatttattattatgttttcgtcctggccattgattcgcttgttatcggtttattggttacttatatccgtaaattacaaatgtatgttcatcggctttctcaaaaggtatatggaatttatggagaatgtctagtaacatacttgatttatctatgatttcaggttccactaacctccctctgcgaacggcatataaaggctgaatagcaatccattcaatcttaaagaatggtggcaaactatattcatagttttcatatataaattcccaacttcccaaatatgttggtacttgttcaaatattggagagtatgtgatattgtctgtcaacaattgaatattatatgccggttcaaactccggtatagacaaaattgcagtttgcagttccagccatttagtatcattcatgacgggagatagctgcctttgttctattatcttgcttgctaatgctttcaagtctatatagcttgctataaactctttatattgggtgtataccttatttatatcatacttttccatacatttgtttgttttggattactgctaatgggtttgtgaataactgaccgttagggcagttca

SEQ ID NO: 4549 - DNA, 1692 bp, Unknown
  gut microbiota DNA sequence
gtagcggatataggtggatgaagagatatataataagcattgattaatgaacgatattaaaaatcgaaagttatagtaatggaatatagaaataatgattatctttgaatcacaaaaaatgaagaataatgatggatggcataatgcgtaaacttccaattgggatacagacttttgagaaactccgcgaagggggatatctttatgtagataaaacggcttttgtatggaaaatagcttctacagagactccttatttcctaagtcgcccccgtcgttttggaaaaagtcttcttctttccactttcgaagcatactttgaaggcaggaaggaattgtttgaaggacttgctgttgccgaacttgagaaggaatggaagaagtatccggtgtttcatttggatttgaatgcagaaaaatatgattcatcccaagctttggttgagattcttagccggcatttgacgcaatgggagttgaaatatggaaaaggagaggatgaggaaactctttccggacgttttgcaggagtgatccgtcgcgccagtgaacaggcaggctgtggagtagtggtattggtagatgaatacgataaacctctgttgcaggctttgggtaatggttctctattggatgattaccgtaggactctgaaggctttttatggagtattgaagagttctgaccgttatctccgttttgtatttctgacaggtgtgaccaagtttgcacaagtcagtgtgttcagtgatttgaatcagttgaatgatattagcctggattttgcttatgctacattgtgtgggattacaaaggaagaacttggctcaacttttgttcctgaactggagcgacaggcggcagtcaatgatatgacttcagaagcggttatggaaatgatgacacgacgatatgatggttatcattttcatccgaaaggtgcgggtgtgtttaatccgttcagtgtgctcaactcattttcaaaacaggagtttggtagttactggtttcagaccggaacacctactttccttgtcgagttgctcaaagagagtgattatgacctgcgcactttaattgatgggatagaagccagtgcatcttcatttatggaatatcgggtggatgccaacaatccgattccgttgatttatcagagtggttatctgactatcaaggactatgacaaagagtttcaactttatcgtctggctttccccaatgatgaagtgcgttatggctttctcaattttctggttccttattatacaccggtcaatgaagatgaacagaatttctatataggcaaattcgttcaggaattacgtgccggagaggtagatgccttccttacccgtcttcaggctttcttcgcagattttccttatgagttgagcgattcgaccgaacgtcattatcaggtcgtgttttatttagtgttcaagttaatggggcaattcaccgaagttgaggtccgtagtgctcgtggacgtgccgatgcagtggtgaaaacgcctaaatatatttatgtgttcgaatttaaactgaatggaaccgctgaacaagctttgcagcagattgatgagaaaggttatttaattccctatcaggcagacgaccgtgaagtggtgaaagtgggagtggagttcagtgcggagaaaaggaatatagatcgatggctgttgtagtgcg

SEQ ID NO: 4550 - DNA, 31154 bp, Unknown
  gut microbiota DNA sequence
gtggtgccaccaggaatcgaaccggggacacaaggattttcagtcctttgctctaccaactgagctatggcacctttctcgtttgcgggtgcaaagataagtatattttttaatactgcaataacttagagagaatttttcgtctagttagggagaaagaaaaaaacttttctttttaggtagaataaatatgcaaatgtagcatcatttattcggtatattttatacttttacgagtcaaaacgatcagggcactacaaacaatagaatatattattatggcattacagtttgttacagttgttttattagctgcattcatttatctactgattaagtatcagtcggttaagaagaaaatgatatcggaaacatctgtaatgttgcatgaatccaaagagttaacttccatcctacagaatataaacgtttactatctgttgattgacagagactttatcgttcacaataccaattattatacactgaatcatttgactcctgtgcagggagaaataaaaagagtcggagatttattgcattgcagaaatgcgatagcagccggagaatgtggaaaacatgaacagtgtaaattgtgctgcatacgtacattcataagcaaggctttttatgagaagagaagctttaagaaactggatgcctctatgcaacttttaagtgaggatgaaaagacggttattccctgtgatgtttctgtttcgggcgtttatctgaaaataaacggtgaagaacgtatggtgctgacagtttatgatgtgacggaacttcgaaatatgcagcgcctgctggatgtagaaagagaaaatgcgatttctgccgacaaacttaagtctgcctttattgccaatatgagtcacgaagtccgtactccattgaatgccattgtcggattctcggggctgatggctactgctaccagcgaggaggaaaagaagatgtataccgatattatctctgaaaataatgagcggttattgcgactggtaaatgatatcttcgatctttcgcaaatagatgcaggcgtgttgaactttgtatattcggagtttgatgctaatgatctgctgagggagctggaaggacttttcggaatgaggctgaatgagaatcctttggtggcactggtctgtgaagcacatctggaaccgattatgatgcattcggagaaacagcgtataattcaggtattgacgaacttgcttcacaatgcgatgaaatttactaaaacaggtgaaatccgtttcagatgccgtatggaaggtacggatgaagtctatttttatgtatcggataccggtattggtattccgaaggaggagcaggagaagatattctcccgttttacgaagcttgatcgggaaatgcagggaacggggcttggactgacgctttcccaaacgattgttcataatttggggggaagattcggtgtagaatcggaagtcggtaagggtagtactttttggttcatcttgcctttggttacgaagaaagaaataacaaatgataagatatgaataatcccaccttgagcattccctgattcaaggtgggattatttatgtaaacaatatgtttagcttttaagatttaggagcacccgcatctttaattccggaatctggcgatccgttgtttgctgcggtatttccaccggaaggagccggattgcttgtcggagtagaaccggaggttgtagagcctgcgcttgccggaccggaagttggggtacttgctggtctggcagtagcggaactgaccggacttgcagacgatgtcgaagcagaagccggacgagcggcatttgcactgttggcagtaacaccggcagtcacagcctgaggctgaacttcccaatggaatggctcgaaattagagttcggatctacccaagacggtttcttggatgcgtagatgataaacggagcaacgactacgatcaatgcaccgatgatcaatacggagaaccaaacggtattgctaccggtagaaatctggctgggcgggatgaagctcagaatgaatgcgagcaatgaaccacagaagccaagaccaccaatgaaccacatcaaaccgttaccggacttaccgatacggaacgggcggttcaatttcttcatcttataacgcagtgcgatagctccggagaacattaacaaatacataatcagataaagaatcactgtcagctgtgacagaatctgatagaaactctgtacggaaggcataacgacgaacaacaaactcagcacagttacagcgataccctgcacgaacaagatattcttctgtacacccagtttgtttgttttctggaagaacggaggcatataacctgctttacctacggcaaagataccttttgacggacctgcaacccatgtcagtacacctgccaacactccgaatgcaagagcgatagcgatgatcggtgacaaccaggaagcgtgaatgtatctgaagtagttatcgaaaccgacgagcaaactctgagttaagttaatatccttggcagggataataacgcccagtgcgaaggttcccaatacgaagataagaacagtgatcagtgcaccgataaatactgctttcggatagttcttggaagggttttctacgtcttttacgtggataccgcccatttccataccggcataaaacaggaagatactggcagcaaggacgacgttatcgaagttggtaaagtcagggaagaagctgctgtggaaatccatattggattgtcctccggttgccagatagataatacctaatataatcagcaaagcggctggaataatcgtacctaccataccaccgattttggctaccttaccaacccagctcatacctttcagagaaatgaatgtagccagccagtagatgataagaactacgacgagggtgtaatacttgttgtttgccagcgacatatcatgtacgtcgttcattccgatgaaggcgatggatacggcaccgaatgtcaatacggtaggataccagatcgtactttcgatccattgtacccagatggcgaggaatcctagttttttgccgtaggcttcgcctacccatcggaacacaccaccttgcttatcctgaaacatagctgccagttcggctgctacgagcgatgtcgggataaggaagacaatcgccgcgaaaagatagtagaaggccgaactcattccgtatacggcctcggctggtagcccacgcaatgatactactgccgtaacgttcatgatagccagggtaaacacgcctagcttcactgcatttttaatatttgccataagttaaggttttaagtgaaaaatattttaaagtcagtgttataacaacattttgcgtgagatgtttccgcaatctctttcaaagttcgttaattaacatcgccggatggctcaattgtaaacctccggatgcctgttccgaaacaatcgctttcttagattgtttctaagcattataagttacataagaatcattttattataaattaagtagttatgaaatcagcgctttccgattttattctggggaaaaagggaatttatggcattctccacattattatattgttaatgtccctttttctggttattagtatttctattgatacgtttaaagggattcctttttatacacagtcctcgtacatgaaaatccagttgtggatctgcatctggttcctgttcgattttgtactggagttttttctggcaaagcataagtggcgttatatacggacgcactttatctttttgctggtggcgatcccttatcagaacatcattgcgtattacgggtggaccttttctcccgaagtcacttacctactccggtttattcctttgctgagagggggatacgcattggccatcgtagtgggctggctcacctacaaccgggcttccagcctgttcgtctcctatctgacaatgttgttggcaacggtctatttcgccagccttgccttctttgtccttgaacataaagtgaatccgttggtcacagattatggagacgctttgtggtgggcatttatggatgtgactaccgttgggtcgaatataatcgcgatgacgaccaccggaagggtactttccgtgctgttggcagctttgggaatgatgatgttcccgatctttacagtctatattacgaatctgattcagcagtctaatcaaaagaaaaagcagtattatgcggaagaggaagaaaagacggcgcctgcacaggggacataatccttttttataaggtcagactcatatcagtatcgatttgtattggaatgatacacagtgcgatatgagtctctatattctcaacgtgttctcatacctttgagaaaaaattctcaccacaatgagaaaaaatactcatgcctttgagaaaatattctcactgcagtgagaaatttttctcattgcaatgagaatatcagtgttcaagtacattgtttttttgaatagagtacttaaggaaaatagaagtaagatattgataatagaaaaggttactacccccttgaaggatagcaaccttttgtttttctcatagagcgataaactagtcgactacgatcaagtgattgtcactgaatacattcaatcccagtttattcatgacatattggatagccaattgtgcttttaccgaattgcctgcaccatccaaaggaggagcgaatgcggcaataccgaactgtccgggcaatacgcccattacaccaccgcctacaccggttttagccggaataccggaggtatacatccagtctcccgtgtgctcgtagaagcctacagcagcgatcattgcagtgatcttgggagcgaggctggcatcgaatacttctttctttgtcaccggattcacaccgccgttggcgattgttccggctgccacagaaagctgcaaggccgttactcccaatgagcactggcgggtatacaggtccaacgccatatccggatcatcatagatacggttgtagttcttcagcaaccacgcaatggagcggttgttaaagttcgtatccgattcggatttgtacaattcatcaatcagttggggagcgctgccgcataaatcggttacgttctctacgatggcatcccacttcttggcagagtcaccgataggttgtaccatactgcaggcggagatggcgccagcgtttaccaatggagtagacggatggtcattttccagcagaatagcgatgattgaattaaaaggcaggcccgttgcgtcagctccgatcttgtctaatatttctttggcaccatattggcgcagtgcaaggatagccgtatgtactttggatacggattcgatgccgaagcggtagtcagtatctcccacatggatggtctgcccgttgagcaggcagacactgattccaaagagatctttgttgacattggccagataagggatatagtcggcattcttaccgcctgtattcgttttcacctgatcgtatgcctcctgtaccacttctttcaattgagcgagtgttacttttttgtccatagatcaatttattttttaacggttttatgacgacgaccaccgtgattgaacatcttagtttctaccggaagattcttttcctgagccatgcgggtaggagtcgggaaatcgagtttttccagttcggcgattgcgttcttgatatcacccagcaacatatctgccatgtcgcggctgaatccctggcgaacaactacacgcattactacataatcttccaatttggaaggcaatgtataagccggaaccatccagccgtgctgagacagtttatcctgcaaatcgtacaatgtccacttggctgtttttgcatattccggtttcagataccagatgaacaatgggttcactacattttcggagtagttgacgaacggagccatcttggcgatttcaccgtggatgtatttggcaatctgcaaagaattatattgtacttccttgtaaccttggaatcccaaacggatgaattgataatattgtcccagaatctgagcggcaggacgagagaagttcaagccgacctgagtaatgttggcacccagatagttgacgctgaatgacatttcttcgggcagatattctttgcctttccagcaaacccagccaagtcccggatataccagaccgaacttatgaccggatacactgatagaaagtacccatttcagacggaaatcccacttcgtatccggatagaggaacggaagaatgaaaccaccactggcggcatctacgtggataggaatgtcataacctgttttggcgttgtaagcatcgagagctttgtccagtgcttcaacgtcatcgttcagtcctgtccatgtaacaccttggataggtacaacacagatagtgttttcatcacacatcttcagcgcttcttcggggtcgagagtggtcttttcaagagtcaaaggcacttcacgcatttcgatctgccacagttgcgcgaacttttcccatacaacctggaaacctgttgagataacgaagttaggtttgtcaaacggtttaccttgagcttgtcttttcttacgccagcgcaaccatgcagctacaccgcccagcatacaagcttcggaagaaccgattgccaacgcaccggttttccatgtatctttttccggagagttccacaagttggcgacgatgttgatacatttaccattcattacggcgatacgaggatattcggtttcatcaatatagttgatgttgattgcctcattcatcagcttggtagcgtaatcgtccatataggtggttacgaaagtagctaagttcaagcgtggctgagtttgggcaaatgtttcatctttaaccatctggtaagcgacttcaggggtggttggtccatcaggaattctttctactggagagggttgtaacattctgtctgaaccgaatacgtcggtttttgcatcaccttttctgaaatttaaatcttccatactaatttgtttttttaaaggtttagggcgatggggattttccccgtcgaatttccctcaacaacagcagatggttttgaaagttttcggcttttacattatttggcgtttattaaggggcggctttggggcaggtgtaaggcggtggggacggaaacaaaaaaggcaagaaggggttgtttccctcttgcctttggctattcgctgacaactggcagcttatagttatctgatacctattgaattgtgttgttaaggtttagcggaagtccttcagttcttcctgtaatttctgacgggtgaagaatatgcggctctttattgtgcctaacggcaggttcagcttttccgcgatttcgcggtacttgaagccggaaacgtgcatggcaaacgggactctgtattctttgggtaatgagttgactacacggtgcatctctttcaggtcataggctttttcggtactttcaaaccctgtgtcctgcggtaaattcaggtggtaaaggttgtccgtccggtcaacgaatgtctggtcacgaactactttgcggtagttgttgataaagatattgcgcatgatggtatacatccatcctttaaaatttgtgtcaggcatatatttatcttcattgtctaatgcttttaatgatgtttcctgcaacaaatcgtttgcttcttcgcggtcggttgtcagcttataagcgaaacggagtaattcgtcttgtactcctactaaatcttttctgaagcttacacttttcatatacgttgctttttaaattgtgaatattcgttgttaaatttcgatgatgcaagtttacgggatttttttaagtacggcgggggtgaaactgacggaatttagcctaaaaactgtttgcggatagtttttaggccataatctgatagtttttgggtgtttttcacccgttttttgaatattcactgttgcctcatttgaactttataaggtaatcattgttttcatcagacctaaacttttaacgaaccggtatatgaaaatacaaactggaaggggaacaatacctcttatcactttaatagctatttggtctatctcggcattgacctctttgccggggctggctgtttcgcctatattgggcgaccttaccaaaatctttccgaaagcgaccgacttggatattcagatgttgacttcgctgccatcgttgctgattatcccttttatccttttgggcggtaagctcacggaaaaggttgattttgtccgtatcctgaaaatcggactctggctctttgctgcaagcggtatcttatatctgatctccaacaaaatgtggcaattgatcgtcgtgagtgccctgctgggcatcggctctggactgattattcctctgtccacgggattaatctcaaaatattttgtgggtacttaccgggtgaaacaattcggattgagttctgccattaccaattttacactggtgatagctactgccgtgaccggatatctggcggaggtcagctggcatttgccgtttttggtctatctgctcccattgatttctattctgctggtcggtcacttaaaagagagccggtctgacaccgccgtcgaaccttcttctcaaagtaccacgccatccgaacaaacggctgccgcagataccggaggaagtaaatatggaatccatatcaggcatctgcttcagatcatgcttttttacggagtgacgacttttattgtgctggcagtcatattcaacctttctttcctgatggagaaacaccatttctccagtggcaattcgggactgatgatctcgcttttctttttagcgattatggctccgggtttctgtctggacaagatagtggatgaactgaaagaacgtacaaaagcatacagcctcctgtctatggctgtggggctggcactgatctggattgccccaatcgaatggttgattattccgggatgtatcctggtcggtttgggatatggcgttattcagcctatgctgtatgataaaacgacgcatacggcactgcctcaaaaggcgacaatggcattggcttttgtaatgatgatgaattatctcgccatcttgctttatccttttattatagattttctccaaaatctgtttcatacccagtcgcaagagtttccttttgtcttcaacttgttgataactattgtcacattcttttgggcttacctgcgacgcgatacctttttgtttaacgatcaactgaaataaaaaaagatgaagaataagaaactggaagccaatctgagtatggctgtatcaaaaatattcagcggtttgaatatgaatgccctgaagtatctgcttcccctatggatgagcccgttgacaggtgcgacgcttcgttgcacctttgccgccgctgcattctgggtgatcggatggttcatgccgccggaaaagtcctccgccaaagataaatggctgcttttcctgttaggggcattcgggctgtacggctttatgtttctttatctggcgggtctgagtaaaacgactcctgtatccagttccatatttaccagtctgcagcctatctgggtgtttctgattatgattttcttttataaggagaaggcgacatggaagaaaattctcggaatctccatcggactggtcggtgcactggtctgcatcttgacccaacagagcgatgatttggcctccgatgctttcgtggggaatatgctttgcctgatcagttccatcgtttatgctgtctatctgattctgagtcagcgtatcctttcatctatcggggcgatgactatgttgagatatacattttccggtgcggcggtctccgctattattgtgacatttattacaggattcgatgcgccggtgttctctatgccgttccattggacacctttcctgatactgatgtttgtactcatatttccgacgacgatcagctatatgttgcttccggtcggtctgaagtatctgaaaacaacagtcgtcgcaatctacggttatctgattctgattgttgcgaccattgcttctctggctctcggacaggaccgttttagctggacgcagacgtgtgccatcatttttatttgtatcggcgtttatctggttgaggtagccgaaagcaaagacaagtcgccggaccccttgaagaaataatcatatataatgtatgatatgaaaaaagcgggcgcccttctcagggtgcccgctcgcttatgtcgtcatcatgttttatagagaggagctgattgcttgcgcaatggatttaaattcttcatccgataatttcagtttcggattggagaacaacatatccgattccttctgaataggaattaagtggatatgggcatgcggtacttccaggccgataaccgcttcgcctacctttttacaagggaaggctttttcgatggcacgggctatcttctttgcgaatatatgcattgctgcgaggtcttcgtcacttaaatcgaagatgtagtctacttcctgtttggggactaccagcgtatgtccctttaccaatggattgatatcaagaaaagcaaaaaaacgatcgttttccgctatcttgtagcaaggaatttcgcctgcgatgattctactgaatattgttgccataatctttgatagataaaagaaggcaagcctcacacggagacctgcctttctgttaaattgatatgtttactacttctaatgcaattttaccctgtggtacggtaatttctgcaatatcacctactttcttgccaagcagaccttgtgcaatcggggtgtttacggaaatcttgccttctttcaggttagcttcgctttcggaaacgatggtataagtcatcttcatgccattcttgacgttcttcagctccactttgttcagaatctgtacagagtctgtctttagtttggactcgtcgatgatcttggcatctgcaatgaccgttttcaatttgttgatgcgcatttcaagcatcccctgtgcttctttggctgcatcatattctgcattttccgacaagtcgcctttatcccttgcttcggctatagccgcagagattttggggcgttccactgtttccagttcctttaattctgccattaactttttgtaaccttcttctgacatataagccatgatgtttttcctccttttatttaaaatggtcatataaacaaaaaagaattccaacatggcacatgttggaaccctctcttcaattatttctctgcaaagatagacttttaagtgatatctgtcaagtgaaaaatgatgctatgtaacatatttaaatgaaatatgctaaattataacaacttagagtaatgacttgacggatgcttcgaggtctttgatatcttcgccgcggagcttcagttcgttgttccggttgatcaggaagatggatggaacctgacgaacattatatacagctacgttggtcgagtagacaccgttgccgtcacgtacgcaaacccagggcagattgcctgctgcggttttccagtagtgctcgtctgcgtcgagagatacctggtagatttccagcccatcctttgcgtatttattatatagttcgcgaagcatcatattgtggggcgctcctgccggtgactggaatacggagaaatccagcagcactactttccctttcaggtcggtcagtttgcgggtatttcctttcacgtcacgcagggcgatgtcgataataccggtctcgatgatcttgtcctgtggaatttccagagatttgctctgtggctgacgggtattcttcatccctttgattacgatattatatagattttttgaacgtacggcatccggatatgtattgttgaggctggtagcgacggctgcaaaacattttacgtcgtccttgttgttcagcggatcgaagatcagatagtcattcagtttctggaacagggcgaagtaagcggctgccgtgtttggagctgcgaatatataattcactttgacgtcctccttatagttcttcagcagtgttgcgaggttttcttcaaacgtatcgtgtcccagtttgttggcacgcagcgcattcagttgttcgtccacattcttttgaagattgatttgtttcagcgtcagttcctttatcttactgctgttttcagatccttctaccgtgtaggcagtagagaaatcaacgtatggagcgttgatctgtagcgtttcgatagaatccacagaaaagttgatgactttgttgtctacccgcaagcgataaaactcgggtgattcggggcggggttgtttaaacttgaatgtaccttctcctttcaatttaaccgaatcaagcggaacaataccttccagaccggaagcttcgagataaagcattttcccgtcggcccctgatatgtctccgttcacttcaaactcaggaccggaactacaagctgtaatggtaagtgcggcaagcgctacaaaagttatctttttcatatctcgtgtgttttttaagagttgcaaatatacgtcttttcgagattactcaaagctttttgcctgcttcttcacctctattttgcaaaaaaaacatatagcgtctaactttttagctcatttccacctgattacaacgagaaatgtatatctttgcaggaattttgaaagaaaagtatagataaaacaatttttatgattaacccaattgttaagacgatcgagttacctgatggaagaaccatcacactcgagacgggaaagttggcaaaacaggcagacggttctgtaatgctacgcatgggaaacaccatgttattagctactgtttgtgccgctaaagatgcagttcccggaacagatttcatgcctttgcaggtagagtataaagaaaaatttgcggcattcggccgttttcctggtggcttcaccaagagagaaggtagagcttccgattatgagattttgacttgtcgtctcgttgaccgcgctctccgcccactattccctgataattatcacgcagaagtatatgtaaatatcatccttttctctgctgacggtgtagatatgccggatgcattggccggattggcagcttctgcagcactcgctgtttcagatattcctttcaacggaccgatctcggaagtacgtgtagcacgtatcgacggtcagtttgtaatcaatcctacttttgaccaactggaaaaagctgatatggacctgatggttgccgctacttatgataacatcatgatggtagaaggcgaaatgcacgaagtatccgaagctgaactgctggaagcaatgaaggtagctcacgaagctatcaaagtgcattgcaaggctcagatggagctgactgaagaagtaggcaagacagtgaaacgtgaatataaccatgaagtaaacgatgaagaattgcgtaaggcagttcgtgaggcttgttatgacaaggcttatgcagtagctgcttccggaaataacaacaagcacgaacgtttcgatgcttttgatgctatccgcgaagagttcaaggctcagttctctgaagaagaacttgaagaaaaagctccgctgatcgaccgttactatcatgatgtagaaaaagaagcgatgcgtcgttcaattcttgacgagggcaagcgcctggatggtcgtaagactactgaaatccgcccgatctggtgtgaggttggtcctctgcccggtcctcacggatctgctattttcactcgtggtgaaactcagtctctgacttctgtcactttgggtacgaagctcgacgaaaagattatcgacaatgtattggaacacggaaaagaacgtttcctgctgcactataacttccctcctttctctacaggcgaagcaaaagctcaacgtggtgtaggccgtcgtgaaatcggtcacggtcacttggcttggcgtgccttgaaaggacagattcctgctgactatccatacgtagtacgtgttgtttcggaaatcctcgaatctaacggttcttcttctatggctaccgtatgtgccggaacattggcattgatggatgccggtgtgaagatcaagaagccggtatcgggtattgctatgggactgatcaagaatccgggcgaagaaaaatatgctgtattgtctgacatcctcggtgacgaagaccacctcggagatatggacttcaaggtaaccggaacaagagacggtatcactgctactcagatggatatcaaggtagacggtctgtcttacgaaattctggaacgtgctttgaaccaggctaaagaaggacgtatgcacatcctcgacaagatcaccgagacaatcgctgaaccgcgtgctgacctgaaagaccatgctcctcgcattgaaacaatgactattcctaaagaatttatcggagctgtaatcggccctggtggaaaaatcattcaaggtatgcaggaagagaccggtgctgttatcactatcgaagaaacagacggtatgggacgcatcgaagtttccggaaccaacaagaaatgtattgatgatgcaatgcgcatgatcaaagcaatcgttgctgttcctgaagtaggcgaagtatataaaggtaaagttcgctctatcatgccttacggtgcattcattgaattcctgccgggtaaagacggtttgctgcacatttccgagatcgactggaaacgtctggaaacagtggaagaagccggaatcaaggaaggtgatgagatcgaagtgaaactgatcgacatcgatccgaagacaggaaaattcaaactttcaagaaaagtattgatgccaagaccggaaaagaagtaaaaaagcagatagcttttagataatgtgatagcccgattactcagtattcgggctatttttttgtctattattttgcttttctgcgaaaatatgtgttcttttgtacgaactaatgaaaatagcctgtaaatcttatgcgtgatgcaccaaacgaacaacatatcttctattcaacttttttctgaattctttcatgagaatcaagagaagtttttgtcgtttgcctattcttatataagagacaggcaggaggcggaagatatattgatggagtcaatgattactctgtgggaaaacagggataagtgggaagaagattccaatctgcacggtctgctgctgactatcatcaaaaacaaagcgctcaactatctggcacatctgcaggtgcgtcttcgggccgaagaagagataaatagccatagccagcgggaactggacctgagaatctctacactggaagcctgcgaaccggatgtgatctttgattcggaaatacagcatatcgtacagaaagcattgaaacgtatgccgaaccaaagccggcagatttttatattgagccgttatcaaaatactccgaacaaaaagatagcggaacaactcggcatttccgtcaaaagtgtggagttccacatcaccaaagcattgaaaattctgcgtaccgaactgaaagattacctggtttctattcttttttaaaaataatcgcatttttcgttagggttgttcaaggctgacctgttttatatatagaagggagagaaaaagcctttctataaatataaataggaaaagacaatatctatgaaccaggatttactacataaatattttaagggcgagacttctgtcgacgaagaaaaacgcattcttaactgggtggacgaatcggaagaaaaccggaagacattgcagaaagaacgtatgctgtttgacatcgccctttttactgactctaagagaaaaatgagagagaaagcaggcgcgggcgctcgcatcattcccatgttaaggtggagtgcccgtatagctgctgctgtaattgtagctgtcagttgtggatttctgattaatgaatatcggtatgataaattggcacagttgcagacggtcactgttcctgccggtcaacgggcacagattacgctggcggacggaaccaaagtctggctgaattctgaatcgacgctgagctacagatctgacttcgggcgccgcgacagagatgtggaactggacggagaggcttactttgaagtagcgaagaataaggagatacctttctacgtaaatacggagaccaatcaggtcagagtggtaggcactcatttcaacgtctgcgcttataaaggaagcaatgaatttgagactaccttggtagagggcatcgttgatatttacgcttatgacaatgaacgtccgctgacccgcctgactaagaatgaattcttcggttcctatcagggaaaatataaaaaagccgttctgccttcttatgattatctgcgctggcgggaaggactgtattgcttcgacgattctcctttcagttgcatcctcaccaagctggagaaatattataatgtgaagatcaccgtagagaatccgaaagtgctgaattatcgctgtacgggcaagttcaaggaacaggacggcgttgaacacattctcaaggttatccagaaagatcacccgtttacttattcgatcagtgaagaaggagacagcatccggatagaataaagccagaataaaaattaagatgaataactgagctcaatgatatacaccttaaattagtactaaccctttaaaagcataatgattatgaataacagtcaataagtataccccttaccgaaaaagaatcggaaagtacccccatacttcccgattcgaaacagtcaaaaatcgaccttaatcaatttattaacttaacacgttgcaaagatatgagaaaaatttctttgaaagggcttttttgcccaaaaagtttagaatctaagcaaataatactgactatgaagatcacattattccttcttctgttcgtaacattccaggcttattgtgagaatggatactctcagagtgctaaaataagcattccgcgttcgactctgaaagtaagcgaattgcttacccagattgagtctcagaccgactatttgtttgtctacaataaaaaaagtgtcgataccaagcgggtagttaatgtagatgctaccaatcagccggtatccgaaatactcgataaggcttttgaaggaacaggtatccattatgtggtggaaggcaataatatcgtgctgaccaagaacataacggaacatgcatccacacagcaacagaaacaaattacggtgaaaggtgtcgtgaccgacatgagaggcgagcctatcattggcgccagtgtcgtggaaaaaggtacgacgaatggtacaatcaccgatttggacggtaactttactttgaaagtgccaagcgacgctatcattaatatcacctatgtaggttaccaaccgcagagcctctctgtcagcggacaaaccactttcaagatcaagatggaagaagagtcgatggcactggagcaggtagtggtaactgctatgggtatcaagaaaaaagccgcctcgctgacttattctacccaacagctcggaggtgacgaactgacccgtgccaaagaccccaacatgattgccgcccttgccggaaaatcggcaggtgtgcagatcagcaagagtgcttccggtctgggaggttcggccaaagtatctatccgtggtatccgttcggccaacgaagacggaaataaccagccgttgtatgtgattgacggtgtgcctatgctcaatagcaccacagaatccgtatctactgttatgggtggtaagaatgacggtgtcaaccgtgacgcgggtgacggtatctccaatctgaatccggatgatattgaaagcatgagtattctgaaaggtgcctctgctgctgcattgtacggttcgcaggcagccaacggtgtgattcttattacgactaaaaaaggtaaagcgggagttcagagaattacttactcatccggtctgacagttgatcatgcgatcagtttgccggaatttcaaaatagttatggagcgaaagccggttcaagctggggagaaaaggaaaatgtgaaggactatgataatgccggaaactggttcagcaatggagtgaccgctatcaactcggtttctgtgatgaccggtaatgagaaattgcagacttacttctcttatgccaacacgaccgccaaaggtattgtcgactccaacaagttgcgtaagcacaatctgactttgcgtgagagtgcttcccttttcaatgaccgtctgaaactggacgccaatgctaacctgatggtgcagactattaaaaactctcctacttccggaggtatctaccttaatccgttggtggacgtttatggtttcccgcgcggacaggacctgagcgaatatgccactaatttcgaaaagttcgacgagaatcgtaatatgcccgtacagagctggtttaccactccgagcgaatggacacaaaacccatattgggtaaagaaccgtatcttgaacaacaataagcgctaccgtgcattggcctccctgactgccaatctgaaagcaaccgactggctcaacctgcaagctcgtgggaatgtggattacgtcagcgataagtttgaccagaaaatgtatgcgagcacttctcctgccattgtaggaaataacggccgctatgtgtatgccgacacacagaacttcctgatttatggtgacgtgatggctatgttcaacaagcatttcggtgatttctctgtgaatgccgctttgggtggtagtattaatgtgcagaccgagaattcattgacattggattccaagacagcttctttgtacaaacccaacttgttcactgttcccaatattgtaatgaacaccagtgcttctgccgagcaggtgattgaccgcagacgtacgattcaatccgtattcgcaacagcacaggtaggatggaaagacgcattgttcctcgacttgacagcacgtaatgactggtcgtccacgttgtcacataccaatagtgtggacaaaggattcttctatccttctgtaggactctcctgggtgatcaacgaaagctttaaattaccgcaatggatttctttcggaaagattcgcggatcatgggcgcaggtaggtaacgacttaccgattggtattaccgatttgtccgatatcatcggggccggaggaaagttgcaggcagtagacgtatataacagaggtgacctgaaaccggaaatcagtaactctattgaatttggtctggaatggagactgttcaacagccgtgttgattttgattttacttactacaagacagatactaagaatcagttgctgaaagttccgaccagtgcgggtgaagattatgcataccgttatatcaatgcaggtaagattcgcaacaaaggatttgaaatcacattgggagctactccggtgctgaccgaagatttccgttggaaaacgactttcaattattcacaaaaccgtaataaggtagtcgaactggctccgaattatacttccttcgtatatggtgacccgggtttctctatggcatatatgatgcagattaaagaaggcggctctttgggagacatctatggaaatacgttcgcacgtgacgaacaaggtaagattaaggtatccgatgaaggcaaacctatttcagagtcaggtaataaaacatatctgggaaattgtaatccggactttctgttgagttgggctaataccttcacttataagggtttctctctgtatttcctgatcgatatgcgcaaaggcggtgatgtcatgtctctgacacaagctacattggacggcagaggcgtaacgaaggctacggctgaagcacgtgacagaggttatgtggaagttgacggaacaagatttgagaatgtagaaggtttctattcagtagtaggtgaccgtaacggtatctccgagcgttatatgtacagtgcgaccaatattcgtttacgcgaattatctctgagctattcgttcccgtctactttgctggccaagactaaggtattcaccggtatcgatgtatcattggtgggacgtaacctgttcttcttctacaaagatgctcctttcgatccggatgctatcttgtctgtaggtaacactaatcagggagttgatgtattcggtatgccgacaacccgtaacattggtttcaacgttaaatttacattctaactttaaagcaagcgaattatgaaaaaaaatctatatatagcgaatctgttagtagccggactgatgacatttaccggatgtacggatggttttgaatcagataatgccaataaagccggatatacgcctgaacttcaggaatatgatcttcagaaatatgtgctgaacctcggagtcatgcagcagggtatttactttaattacgattggggaagaggtaccgactggactttccagactatacagaatctgggtcatgatatgtttgccggatattttcacgatatgaacaacagtttcaatgacaagaactctgtatatgctttgaatgacggctggacaggctcggcatggacatatacttatggatatataatgaccgccgctcagaaatcggagaagatcaatcaggaacagaaaggtttgctgggagtgaccaaaatcctgaaagtcgagttgatgcaccgtatagctgatacttatggccctattgtctacactaaattcggacaggaagagggtgataatgtcgatagtcaggaagccgcttaccgtcagttcttcaaagatttggacgaaggagtcaaactgatcaacgaatataagaaagccaatgccgctctcgaaccttttgctgctgccgatattctgatgccggcaggcaaacgtacactgtcacagtgggtgaagtttgcaaactctctccgcttgcggcttgcaatccgtgtatcgatgagtgcccctgatctggcgagagcagaagttgccaaagcgatggatgcaactgccggtggcgtgttggagagtgcggatgaaacagttgccgtttctaccgaaagcggttataagaatccgctgggaacagtcaatgaaggctggggagaagtattcatgggtgctacgatggagtctgttttggtaggatataatgatccgcgactgattaagtattactcgaaagcggaaggtggtgatataaaagacgaaaagggtaatttgattattgccgaaagaaataagattgccggtacttataaaggtgttccccaaggaacaggagttactgtaaaagacgagaaccgttaccgtctgcattccaagagtacgataaccaaacagaccgatgctatcttgatgactgctgccgaagtatggttccttcgtgctgaggctgccttgcgtggatttacttccgaaaacgtgaaagactgctacgagaaaggtattacggtttcctgtcagcaatggggagtgaatgtaggcgattatctcacaagtgatgctactccttccgattatgtcgatgccttcgaagcaaaatatgatgtgaaagcgctgattaaagtgactccgaagtgggatggaggtgcttctccggaagagcaactggaaagaatccttacacagaagtggattgcttgttatcctgaaggctatgaggcttggacagaacaacgccgtacaggttatccgcagttgttcaaagtctttgtgaacaatagtggtggagctatcgataccaacatacgtattcgtcgcttgccatatccgtcagacattcaaaaaaacaatcctactcaatattctgctttgaagaaagctttgggaggcgaagataacggtggaactcgcctttggtgggatactggtagaaatttctagaggtttataaatattaggtgtaactttttttaattcaaacttgttttctccgtgtattaggcaaaaagtagaggagaaagattgtgggggagtgaagtcaaggggggcttcgctcccttttttttaataagtttttatgggagttatagaaaaagcattatagtcatggttatattcttcagtttattattttcttccatcatcagattcctgaaaactgcaaaggaatgaactaaacagtagtacacaatagtaactccattctcctccttcgggaaggaggagtggtcgaagaccgaggtggtaggaaaaacaatgtttatacctatttctttgtaaatgacaggattatgtattcacctaccacctccccctacgggtactcctccttcccgaaggaggagaattgaagatagaaccgactattatttagttcaaaacagtgtcgaaatgagctatacagtttggacatgaacataaactctataacattaccgatagaactctatgtggttagatctcaatgatttatagtttcctgtcatttcttgtaatggaaactgtcgtttcccggtgagggaacggtcgttccttttaatggaaacgaccgttccttttaaagggaactggcgtttcctccgaggaaaccaacccttgccccatatgatactgatacttgaattatatggactaacaatttagcgtataactgattcgaatatgaagctttccgctgtttggagttgatgtctttattttaaaagggacgaccccttccttatgaaaaagaaagaggccgtggggataaaaaaagactggtggggtatttatatatagattaggatttattgtttttgcttagatgttgggtgaatatctcttctgactgatattcttctgctatctgttttattctttcatcagtttgatctaatatgtaatttagttctgtttcgtcgaaacaatctcctaagtgtatgggagtatgtagtaaatctgaattctgatttgtttctgttgctaattgttgtctatgaactgtgacttcaatttctcccttttcatctgtagtgaaaagtaagttgtatttttctatcagggcaatgaattcttttaagaacttgtattctgtttcggtcaatacttttatcatatttgttcgtttggtgtttattttatacttggcaaagttctaatttctttttgaactttagaatgaaagtaatatgatttttattccatttgctaagttggaatattccttttattcatattaccacatctattcgtttttttcgtatatttgcttcgaacgaaacttttcatttgtatatttgttggattttaaaaagaaaaaagaatcatggaagcagaagaattaactgttgggagagttcatcatggacataacatacgtcgttttcgtatagaaaagaatatgaatcaggaggttttaagccaattagtacatttatcacaatcagcagtatctaaatatgagcagatgagagtgattgatgatgaaatgttacaccgcttttcacgggcattgggagttcctttcgagtatctgaagagtttggaagaggatgcgcagacggtggtgtttgaaaataatacggtgaatgattcggaacaatatacaggtggagcaaagattagtttgggtacagttaagtcttatacagaagatagtgacaatagtgttgataatagagtcaacaacttcaatcctatcgaaaaaatcactgaactctacgaacgtctgctgaaagagaaggatgaaaagtacgcagcactggaacgtcgtttgcaaaatatagagcagagcttgcagaaataaagaacaaatataatgaaaggaatcgtgatatgatgaaacaaataccctatggattgacggactttgcccgaattcaaaaggacaattattactatgtagataagaccatgttcatcgagagaatcgagatgcaaccggcttatctttttctgattcgtcctcgtcggtttggaaagagcttgactttggctatgttggaggcttattacgatgtagtatatgctaatgactttgatgagctattcgggcatctttatataggtcaacatccaaccccgaagcataattgttatctcattatgcggttcaacttttcggaagtaagttctaatgtcaatgaagtagagcgatcatttaaattgcattgctgtagtaagcttagggattttgtgttcaaatatgaagatcttttgggaaaagaaatttgggatgttctcgatgaagagatacagcaagatccgggtgcttttttatcagctgtcaattcttatgcttcccgtaaaggaaatctccctatttatctccttattgatgaatatgataattttacgaatacgattctttcgacctatggtacagagtattatcaaaaggcgactcatggtgaaggctttgttcgtggattctttaatgtgataaaggctgctaccaccggtacggggtccgctcttcagcgtatgtttatcacaggagtgagtcctgtcacgatggatgacgtcaccagtggttttaatatcggaaccaatattacgactgatccttggtttaatgatttagtaggtttcagtgaagcggaactgcgtgaaatgcttacttattataaagaacagggagtgctcatgcaaacggtagatgagacaattgtcatgatgaaacccaactatgacaattactgctttagtagaagtagattagcagattgtatgtttaactccgatatggtgctttactttatgaaatcttttgtattgcatggagaaaagcctgatgaaattgtagaccccaacattcgtactgactttaataaattagcttacttgattcgacttgaccacggattgggagagaacttctctgttattaaagaaatagccgagcagggagaaataactacggatattgctacacacttttccgcattggaaatgacggatgtacgcaatttcaagtctttgttattctatttcggacttctttctattaaaggagtcgatatggtgggaagacccattctgcatgtcccgaatctggtggtcagagaacagctttttagctttttgatccaaggatatatcaaacatgatatttttaagattgatatgaaccggatgacgatgttatttgagaacatggctttcagaggagactggaaaccgttgtttaattttatagcagaggctatccgtgagcaaagccgtattcgcgaatatatagagggcgaagcacatattaagggctttttgttggcttatttaggtatgtaccgttattatcaactgtatccggaatacgaactgaataaaggttttgccgacttccttttcaaacctagtccgtcggttcctgtaatgccgccattaacttatctgctcgaagtgaagtatgcaaaggctggcgcttcggagaaagaaataagggcacttgccgatgaggcgcgggagcagttacttcgttacagccaggatgaattggtagcggaggctaaagcgaaaggcggactaaaactaattacgatagtatggtgtagttgggaacttgtgctactggaagaaatactttagattcctactgcctttatccccttcaagtagttccagcattagtttcaagcgaatgaaactttcagtgagagcaaacgtttgctctcactctgctaccacagttgctcccattgctgtaaccctcatgaataaagggatatagataaactgttagagcatgagagcaaaactgctatcaaatcactgtggaggctatataatgtatctgcccgaatcatttatactgtacacgaagaaacagtaacaattgagatgattgccatgcggagctaagagccttacaggtaaaaataggaatggctacgtttgttatttatagatttgtacaggaagttcccctcttaatgcccctaaagcattaaatgctaatgactccatttccccttcaccgggatagacatgtataggggctaagaaagagattcttttcttcaatcttgaaatgatatagtccgaataagcaatacctcctgtcagcagaatggcatctactttcccgtagagtacggtggcggctccgccaatggctttcgcaacattatatatcatggcatccagtatcagttcagcttttttgtcaccttcttctatggctttgataatggcgggaacatcggtagtgcccagatgggccgtcagtccggcacgtccggagatacgcttctttaattcatctttcgtgaactgtccgctataacaaatatcgatcaactgaccggcaggaagggtgccagccctttccggcgagaaaggcccttcgccgtctaaagcattattggcgtcaatagctttgccatgctgatgaacggctatagagataccgccacctaagtgacagattatcaagtccagttcttcatatttcgttccctgctcctttgcgaagcggcgggcgattgctttctgattcaaggcgtgccagatggtgatcttaggcatcagcggagaacccgaaatacgcgctacatcttccagttcatccaccactcccgggtctgcgatgaaagccgggcaatcaggaagggaagcggccagttcggctgcaatcagtccgcctaaattgcaggcatgggtacgcatggcgtgcaaagtatcttgcttcatggcttcgttgactgcgtagactcctcccggaatgggtttgacgaggccgccgcgtccgatgacagcatcgaatgcaaagggtattccatttgcctctaattcctgaagaaccagattcttacgaaattcaaactggtctatcacctgtggataaacggataattcttcgaccgtatgcttgatgttacggacgagcaacggagtttcgttctcgtagactgctatcttcgtagaagtggagccggggttgatgaccagaatcttcatatctttggagttataaggtttgaattatgattaacggttcaggttgagcttctctctgcattcgcagccggccacttgcaggcaggccattgcgatgctgtaatatttcgataagccggaatcactgcgggaagggagtactaccggacagataggtccttgcaacaatcctgccatatccgcattggcaaacagggagacggacttgtagaacgcatttcccgattctatattggggaaaatcagcacatccgcctgtccgttgataggcgaaacaattcctttgatgtccccgctcgcctgctcacaggcagtgcgtacatccagcggaccgtcgatgattacatttccgaactctcctgcttcggcaagttccacgatgtttacataatccagcgaatgcgggaatttggcgctcactttctcggtacagtgtatcagtgcaacgcgaggctgctcgataccgaaatggcggcaagtgcagatggcataccagatcatttcaatccgttgttgcagcgtggggcgtggaatcactgcggcatcggagaagaacagcagtttatggtaagtcggaatctccatcactgccaagtgagtgaggattttccctttggggagcagtcctttctctttgtcgaggatggcgtgcagcagattgtccgtgttgatgatacctttcattaaaatatccgctcccccttcacgcacggtgcggacagcttcgcgtgccgcttcgtccgaatcttcgatgtgaatggtcttcacatagtcgggatattgcttcaaggcaggatatttttccagaatagccgaatccccgatcatgagaaactctgcaattccttcttccaaagcacgggtaatggcatattccgtattagggtcgttggcgcagactacggcaattcgtttcctacgattctgttgtttaagatgggctgttagctgggcaaagttctgaataggttccataacgttagatttttagcaaatatcagaaaaatcattgagaaaataatactcataacccgaaaacttgcgcctgttatgtaacattttgttatattttagttgttttagtgtgtagatatacaccgaaccgttttttcctgtatttttgcaaatgaatcccccttaaactttaaaacaaaatgaaacagttcagaaatctattatttattagcacattactcctttgttgggtactcgtttcctgcaaaacgacaaaagtttcttcctccggctggtcgctggtatgggaagagaattttaatcagaaaaaaagctttgacccgcaggtttggagcaagattccgcgagggaaggccgactggaataattatatgacggactttgattcctgctttgccatgcgcaaaggcaagttggtgttaagaggcattgccaatcagacgctgcccaatgatacggcaccttatctgacaggaggcgtttataccaaaggtaaaaaggcattccttgacggacgcatcgagatatgcgccaagctgaatgctgcaaaaggagcatggccggctatctggatgctgcccgaaaatgccaaatggccgtcgggaggcgaaatagatgtgatggagcgtctgaatgatgactctatcgcttatcagacagttcattctcattatacgtacactttgggcatcaaggatcatcccaagtcacactccacaggagtcatccatcccgatcgctataacgttttcgctgtagaaatgtatccggacagtctatcgttctatgtcaacgacatacatacgtttacttatccccgcatacagacgcagaaggaaggacaattcccgttcgaccagccgttttatctgctgatcgatatgcagttgggcggttcgtgggtcggagcagtcgatcccaaagaccttccggtagaaatggaagtggactgggtgcgtttttatcagcgaaagtcactcaaataaaacattaaatatgaatattcaacttccttcttttttacagaaaggtgacaaagtagtgattgtgtcaccttccagcaagatagacaaagagtttctgaaacgtgcgaagaaacggcttgaatcatggggattgaaagtctctgtggggaaatatgccggtggttcttccggacgttatgccggaacgatccggcaacgtctgcaagacttgcagagtgcgatggatgatccgaaagtgaaagctattctttgtagcagaggaggatacggggccgtgcatctggtggacaagattgacttcaccgcctttcgtgaacatccgaagtggttgctgggattcagcgacatcactgccttgcataatttatttcagaagaatggatatgcctccctgcattcgctgatggcgcgtcatctgaccgtggaaccggaggaagacccttgcgtggcctatctgaaagatattctcttcggcaatctgcccgtttatacttgcgaaaagcataagctgaacaggcaaggtatggccgaaggtatcctgcgtggcggaaatatggcggtagcttacgggctgcgcggcactccttatgatattcctgccgaaggaactatcttgtttctcgaagatgtcagtgaacgtcctcatgcgattgagcgcatgatgtacaatctgaaactgggcggtgtgcttgaaaaactctccggactcattatcggtcaatttaccgagtatgaagaagactgttcgttgggtaaggagctatatcccgctctggccgatttggtgaaagaatatgactatccggtttgttttaattttccggtagggcatgtgacgcataatttgccgcttatcaatggcgcgaaagtggaattgactgttggaaagaaaaatgtggagttaaagtttatttgttaataatccattctatctgaacgatactgtggtgaaaatgactaattttgaggcttcatatagataaaaggacgatgaaaaagaaatctatgatagtattgacgagtgcctttgtattattatctgctttttcttgtggaggaggcagcaaggcaactggtacgaatgaacaaagtgaaaaagtggtggtaaatgtacctcagtttgatgcggacagtgcctatttgtatgtaaagaatcaggtagattttggtccccgtgtccccaatacgaaggagcacgtagcttgtggcaattatctggtcggaaagctggaggctttcggtgcgaaggtaacgaatcagtatgccgatctgattgcctatgacggcacactgttgaaggcgcggaacatcatcggctcttacaagccggaaagtaagaagagaatagcgttgtttgcacattgggatacccgtccgtgggcggataatgatgctgacgaaaagaatcaccatacccctattctgggagccaacgacggagcaagcggagtgggagctttgctggaaatcgcccggttggtcaatcagcaacagccggaactgggcattgatatcatctttctggatgcggaagactacggaactcctcaattctacgagggaaagcacaaggaagaggcttggtgtctcggctcgcagtattggtcacgcaatcctcatgtgcaagggtataatgcccgttttggtatcttgctcgatatggtgggtggtgagaacagcgtatttctgaaagaaggatattccgaagagtttgctccggatatcaacaagaaagtatggaaagcggctaaaaaagcaggttatgggaaaaccttcatcgatgagagaggcgataccatcaccgacgaccatctgtttattaaccgtctggctcgtatcaagacaatcgatattattcccaatgatccggaaacaggcttccctccgacttggcataccattcatgataatatggaccatatcgacaagaatacgctgaaagccgtcggacagacagtgctggaagtgatttataatgaaaagtaaatagttaactagtaaaccgtaaataacttcatgtcaattaatgaattacaagacgaagtgattgctgaattcagcgacttcgatgactggatggaccgctaccagctgctcattgacttaggtaatgaacaggaaccgctcgatgaaaagtataagaccgaacagaatctgatcgaaggctgtcagagccgtgtatggcttcaggcggacgatgtggatggaaaaatcgtgtttaatgcggaaagtgacgctttgattgtgaaaggaatcattgctttattgatcaaagtcctttcggggcatacacccgatgaaatactgaatgctgatctttattttatcgataagataggtttgagagatcatttgtctcctacccgtagcaatgg

SEQ ID NO: 4551 - DNA, 160037 bp, Unknown
  gut microbiota DNA sequence
atttcctgctttacgtaatggtgctgatgatatatttctatctcctactacaacatttagtggagagaaggttaccacctatagtatggagtatgacaagagtaaaaagcacgctcgttgggtagcctttaaatattataatgtaacagggcaaacaaattggaaccgtaatgattggaaaaagacagaatggggtggtgatccctggcaatctgatccaaatattccccaggctgatcaacgggtacaaagtgactttggaaagcaaggctatgatcgtgggcatatttgtgcttcttcagaccgtctttattcaaaagatgccaatgagcaaactttctattatagcaatatgagtccgcagaagaattactttaatacaggtgtttggagtgatttggaaggaaaagttcgtacttggggacgaagtagtacttttcgtgatactctgtatgtcgtgaaaggtgggactatagataaagaaaatcaaatatggacatatattggtggagataaatcgaaacctgttcctaaatattatttcatggcattactttgtaaaaagggggaaacttataaagccattggtttttggctggatcaaagtactacagcaaagcctgcattatctgaatgtgctaaaacaattgacgaactggaagaattaacaggtttggatttctttcataatttaccggataacttagagaatgctgtagaatctaagtacgcaatatctgcttggaccggactgtaatagaataaaacttgtttgttagagatataattagaccttcatcttccactttttcctatcgataggagattaaagtgggggatgaaggttttgggttatataggaatatgctctgatagcttagtgttattgaactcatatttaaataagacatagattagttgtataatggttttataacttttgtctattactgatcttcatccacaatttttcccaccatccactttcagctttacttagcatatcagaggttatcgtgattatcttttctcttaacttgttctgttcggttgccatcgcatactgcctttccagcactgaaattctacgctttttgtattgaaggtctttttcttgtagctcaatgacttccatatacagtttacacacttcagactgattgatacagagttgttctagtgtgcggatatatcctgttgtgggaagattcttgcgcaggtacataaatctctgaaggctcttttcgtctatgataagagtagtttcagtgaaatatgcggtgattgcttccatttctgcccacaaacagatgtcttcttctttgactccgtacttgtgcgccgcttcgtctatgctaatccatttcggcatagtgtttctttgtttatgcgtttaacaaaaagagcgaataactcttgccaagcatggtgcaacaagcatccctgcattttgctttctagtcggagggttatggggtatggggattatgtaggggaaccgaccggatacaaaagaggcatggatgctgttgaaccattatctgatttcgaggcctagcaaaacccttgcaaaagataatgataacaacagacatccacgccaatcgtttatatataacacatctttaactgatatgttgatatacagccatccacgtggagtatctgttgtatcatctctctttgcatagaaaattgctagttttcgaaatcgagagacaatacattattaatactcctatttaaggaataaaaaacactacccgcttattatatctcgctgatgcgcagaaagtgtacagcaaagatatatgttttttcggaataaagtgggagaatgggaataaataaaagaagtctggtatttagaatgattttttgtgtttaagtgatgttatttcaaggtgttgttgccattaatatcacttagcacatttatctccttcgtaaagcaatgctttgtatcttcaaaagctatgctttatggttgctaaagcattgctttaaataaccatacagcagatgttacgagtgtcgccttcaccttcactttttcctctcaaccttttattaatcagtgatctcgggtgaagggacggctattcacctagtgagtggagaaaacattgtaagtgtttgaaataaactatcaatggtttgaaacaaacattgggaagaaaaaaataatctattagcatctttttattaggttatagctaatacgaatatcattatagcaaaaacaaattagcttatagcaaagtgaacgatgtctttatgattacatatgaaaattgggtgaaggatcggtgaagggcgatatgcttcacccgttatcacttatgaataaaaggtttcgaagaaaaggtgaaggctacccttctatttgaaaatttatagtatggcgtataaaagcatctggctttgatgggaagggggcgtttcagcgcaagaatttctgacattatacaactcatacaagttgcttggtatatggttgatgcaagctcaagagaagggaaatcaaggtgatgcctgcatggaagtggatgtgcaataaaatgaaaaacgattctctgatatatcaggaattacttgatattaatggcaaataaaatatgggttctaaatataataccttttagtgtacaacttaatctcttttagtgaatgaattaattcgtctgcctataggcaaagttgcgtttgcctataggcaacctttcgtccggctataggcggacgaaaagatgcctatagccggacgaattaatttatgaatgcggtgacgttattttctacagagaaaacctttattcaattatgccgttgttcttaagattttgaagatgtatttataatgtgcagccaagaaagacctctgccattctatgacctagaaatcggtttctcttttcgtataatcttttttatctcttcttttacgattcttaactccgaagatttcgtaaccataaagaaaccatctacttttaccccgtatttgtaagaaattgaaagaaacttcgtctaataaactaaaaactaaaacgattccaaacatgaaacacagattgttgctactattactattcgtgttcaccgcagtgatgacaggttgggcacaaaactccgctatgccgtcctatactgtcaaaggggtacttttggattcactgactcaggatggagaaccatacgctactattaagattactaaaaaaggagcaccggacagggctgtcaagatggcggtgacgggtgccaatggtaggtttcaggagaaactgaatgtaggtgcgggagattacgtcattactatttcttcgataggcaaggcgcccgtcacgaaagagttcactttgaaaccatcggttagagtcattgatttggggacaatgctctccgctgaggctaataatgaattgaaaggagtggaagtcgtggcgcaaaagcctttggtcaaggtggatgtagacaagatagagtataatattgaggatgaccccgactcgaaatcgaacagtatattggagatgcttcgaaaagtgcctttagtgacagtggacggagaagacaacatacaggtgaatggtagcagtagctttaaaatacacgtcaacgggaagcccaacaatatgatgagcaacaacccgaaagaggtgttgaagagtatgcccgccaattccattaaatatatcgaggtgataacatcgcccggagctaaatatgacgctgaaggagtgggaggtattttgaatatcgtaacagtaggcggtggattcgaaggatatacggcaacattccgggcaaatgccagcaactacggtgccggtgccggcggctacgcaatggtgaagcaggggaaaatgactgtctctgccaattacaactttaattacaatgaccggccccgtggatattcggacagctaccgtgagaactatgagtcggatacggaaaagtatcttgaatcaaacagcagttccaagtcgaaaggcaacttccagtatggaaatttggaaggcagttatgagattgacaccttaaggctgctgacggtggcttttggaatgtatggcagcaatagtaaaaattatggcgatggatttaccaccatgtatggcgctaaccatgaggacattgcctacagctaccggaccggcaatcatggagatggctcctggtattccatcaatggaaacatcgactatcagcgcacgtccagaaagaacaagcagcggatgatcactttctcctataagatcaatacgcagcctcagacgagtaattctaatactggctatgaagatattcacgccaaagaggaggtggatgaccttgtgaaacggttgctgttaaaaaacagccagtcggacggcaaaaccaatacgatggaacagaccttccaggtagactatacgactccgataggcgagttgcataccgtggaggcaggtgcgaaatatatcttccgccgcaataccagtgacaacaaactatatgaagcagccggaggaagtgacgattatttatataacgaagaccgcagtagcgactatcgtcatttgaatcatattttagccgcttatctcggatatacattgaaatataaggatttcaccttcaagccgggagtgcgctatgaacagactgtgcagcgggtgaaatatatcgttggaccgggtgagaattttcacacgaacttcagcgacctggtgccatccgtctctcttggcatgaagctcggcaagactcagaatatgcgtgcaggttataatatgcgtatctggcgtccgggcatctggaatctgaatccttattttaataatctgaatccgatgtttatcacccaaggtaactcgaacctgaaaagtgaaaaaagccatgcgttcgacttgtcttatagcaattttagtgcgaagttcaatatcaatgtgtcgctgcgccattctttcaacaataacagtattgagaatataagccggttgattacggcgcccgaaggggagatgtttgacaatgatcctacgcacatagcaccggaaggagccttgtacagcacttatgccaatataggaaagagccggaacacaggaatgagcttgtatctgaactggaacgcgtctcctaaaacgcgcctgtacgttaatggccgtggaaactacagcgacttgaaaagtgaagcgcagggattgcacaattatggatggaacggttctttctatggtggcgtccagcatactcttccgttgaaaatacggttaagtctgaatggtggcggtagtactccttatattaatctacagggaaaaggttccggctattattattatagtttgggtgcgagccgttctttcctgaaagatgagcgtttgagcctgaatgtgtattgcagtaatatatttgagaaatacagaagctataacaatcatacggaaggcgtaaacttcctgtcgaagagcagcagcaagtggccgagtcgtagctttggagtcagcatcagctaccggattggtgaactgaaagctagtgtgaagaaagctgcccgaagcatcaataatgacgatgtgaaaggtggtggcggcgaaggtgggaatacaggtggaggaggtggtcagtagaccacttccacgcacgctgtgatttctttatttctgccttacatcctgcttattggtattgaaacctaacttggtaagtcctgcctgtacatcgggatgactcatgaagagtttccataacagccctgtccggtaattctcgatcatgactgcaattggtccctggtcgatggcaaggtaacgttgcggataccagttgtctgtttcgctgaaagcatcgtagaatccgaaaggaccgaagactttgtcccccatattatacaggtggcgcatcacttgcatcgaatattccggtgtatagacgatggatgaaagggcggcggtgggagagataacccctttgtcatcttgttcattcggtgaatgagcagcgtatccatcgacggaatagctggcagtcagtccccagcagtccggtccgaaacctttgtagtgtttggggttgcggatgcagtaagcacggttcactaatgtcagattgcgcatttcgtggaagtagctgggacagtattcgtctttcagaccgacggggtcgagtccgaggaaggagtattgtgcccagaaaagcggtccggcttccgtgccctgatagcggagatgcagttcgatgccttccactttatgcggggagacgatagctccgttctgcgcccagccatcgtgatagacggctgccggtactccgtgggtaggagaggctgcggcgaggatatacataatcatacattcgttgtacccatgtatggggaagtccatttcccagccataggtggggctccagtgccagtatagcacattttggtcaccgttgcgataccagttccagtcaacgtctttccatatttggtcaatgcgtgctgccagtgctttttctttctcattaccgttgatgtaatactggtgtacggcgagcagtccttgcatcaggaaggcagtttctaccaagtcacctccgttatccttctgtccgaaaggtttcacctttcctgtatcgccataccaccagtgcggatatgctccgtgaaaacggtccgctttttcgaggaaggagacgatgcgctccattcgtgccagaccttcttcgcgggtgacgtaaccccggtctattccggcaaggatagccatgatgccgaagccgctgccgccggaagtgactacgttggcatcattctgcggatataccccgtctacatgataccgttcgggggcaagtccgctgttgggctcggcaccttcccaacagtagagaaaggtgcggcgctgaacggtgtccatcaaggcgtcgtccgtgagctcagaactggcggtggctggtccgccggtcttgtttttgcaggctcccgctgtcagtatcaggcagaggagcgaaatatagagagatagttttttcattgattgtggatttaaatgagagaataaaatttaggcacggattacacggatttcacggttttaagagatttcgcagttaaagaccgtgtgaatccgtgtaatccgtgcctattgtacgatttttattttagcgtgaatcgtgcggatttcacgtcccggctgtttgttccgatcattacttcaaattcacccggttctgccaccagttgcaggtcgtagttgtaatatctcagcatttccggtgcaatcttgaaccgtacaatttccgactgtcccggttcaaggaatatcttctggaagcctttcagctctttcaccggacgggtagtgctgccgacgaggtcacggatatagagttgtactacttccgatcccggccatgtgccggtattggtgaccattactgctgccgtcagttctcccgtcatgtcgatggtagaacggctcaggtcgatatcaccgtaagagaaggtagtataagacagtccgtatccgaacgggtaaagcggctcattgtccacatccagataattgctgcggaacttttcgaaccacttgccttgtgccagcgggcgtcccgtattcttatgtgcataatacagcggaatctgaccgacattcttcgggaaactcattgtcagttttccacccggattgacatatccgaagagtgcgtcgccgatggcataagcagcttcgctgcctccgaaccatacgttcagaatagcaggtacgtgttcctgttcccaagtcagcgtcagcgggcgacctgtgaataataccagtacgacaggttttccggttttcagcaactccttcagcaggttttgctgtacatccggaatgttcaggtctgtacggctgctgctttctccgctcatctcggaagattctccgagagccgcaatgataatatccgactgattggctaccgtcaatgcttcgttcagcaattgctcgtctgtccggttgtcacggtttagtgaacgtccgaacatcgtggcgcgttcttcgtaagaggcgtcgctgatcagattgctccctttggcatataggatgtttgcttttccggcagtcatctctttcaagccttctaccagtgacggacagcggtcgagtacggcagctacgctccatgtacccggcatgtttgtccggctgtcggctaacggacctatcacggcgatgttacctttcgggttaaaaggaagaagaggttcggcaggagttcccggacgcagggtcacgttgtcattctttaaaagaacaaagctttctgcggcaattctgcgggcagcgtctcggtgcgctttcgtaaagatatcacgtgccggacgttttaagtcgcagtacttgtagggattgtcaaacaatcccagtttatattttgcttccaggatacggcggcaggcagtattcagtgtttccatagaaactttgccttcctgaatggatttcttgagtgtgctgacaaagccttcgctcaccatatccatgtctactccggcattgatggcacgtgcggaaaccgtttgcaggtcgccgataccgtggtcgatcatttcggagattccggtatagtcggttaccacaaatccgttgaacccccactgaccacgcagtacatccgtcatcagccacttgttggcggtagcgggcacaccgtctacttcgttgaacgaagccattacactacctacaccggcttctacagccgcttcgtaaggcagcatatattcattgaacatccgctggcggctcatgtctaccgtattgtagtcacgtccgccttctcctgcgccatacagtgcaaagtgttttacgcatgccataatttcgtcattccgttgcatgttctttccctgataaccgagtaccatcgcttcggcaatcatggctccaaggaagggatcttcaccgctgccttcggaaacacgtccccaacgagggtcgcgtgagatgtccaccatcgggctgaatgtccatgagataccgtcggcactggcttctatggctgcgatacgtgccgattcttctatggcggtcatatcccaggtgcaggataatcccagcgggatagggaacatggtttcgtatccgtgaatgacatccataccgaatagcaaggggatgcccagacgggattgttctaccgcctgtttctgcacatcgcgtattttttctactcctttcagattgaacaagcctcctacttcgccccgtttgattttggcggcgatgtcgctgcttttggcttgtcccgtagtgatttctccggtgacaggtaggttcaactgacctatcttttcttccaccgtcatctttttcatcaatgcgtcgatgaagcggtccatgtcttgtggcgacttctgcgctgccgcactcaggaagccggcagcgagcagcagaagtgaaaaaaatatcttcttatttatcatatcgttctatcagtttgatttgaatattaattaataatccggattctgtaccagtactcctttggacttgtcaatttctgactgaggcaaaggcaataatgcgttcttatcctggtagtttactttcccggcagcgtgcaatacttccgaggcgattccccaacggacaagatcgtagaaacggtcgggctccagcccgagttccacgcggcgttcgtggcggatggcttcccgcaattctccctgatcgttggtcgttattttgggtagtatattcgtattggtgcctctggcacgtgcgcgtaccatttccagataatccactgcttctccggggatattcttttcgttggcagcttcggcagccatcaacactacatccgaataccggatcaggcggatgttgacccaatatcctttgttggtgtattccttacgcagtgcggggtcggtataagcttttttgttgaagtaagctcccatagccggagagacgggggattcaccataaggttcgttggtgttttccggggtgatcggttcatcgtccgttttgcggaagtagagcagggtggcgtttttacgagggtcacctgtctcgtaggcgtcggccatcaactgggttgccatgtgccatccccagcctaagtcccactgaccggctccgcgaacgccttgcacttcgcagaattggctgccgataacgtcactctgtggaagggcggcagtggcggtacattgcagttcgaatatagaaccgccgctgttctctccgtcgtcggtgaatatttcgttatacggagttttcagattatataaacctttgttgataacgtctgtagaggctttgtacatgttgtcccagtcactgcgcatcatataggtgcgggcatgaagtgaacgggcagctccccaagtcaggcgtccggtatattcggtgctccatgtttcgggcaatgactcttccgcagttttcaggtcggtatcgatctgctcgtagattttatcggcggtagtcttcgggatgttggcttccgaggcatcgttgatcttgtaagtcaccaaaggtacttcgccaaaagctctcactagattgaagtaacaataagcacggaagaaagaagcttcccctttgttgatgatatcttcggtttctgtttgtccggcagtctctttctcggcaatggcgtcgaggatatcattacactggtagatgatggcgtaattctttccccagtatgaacctagcaaaccgttggtcggggtgtataagaagtcatcgtacatttcggctacatccgatccgtcactcgggatacttcctttctcggagtcttcggagcgtagataatggatagcaatggcgggagtaccggcggtgatgtcgaaactacgcatcatggtatagacattgtagattttaccgttgaccagcgcattgggattatcgtcttcggtgaattgtccctgcggactccggtccagaaagtcgctgcaactgcttatcagcagagtggaggcggcaataaaggtggaaaaaagatatttatttagtttcatacaattatagatttgattcattaaagttatattccgcatggaaacctggctgtggcaccttgtcacccgcatggaaacttgggtgtggtaccttgccacgccactagaaggtcaggttgatgccgaaggtgtagacagcaggtacggggtagctgccgtcgtctactccgaaggtggtggcgctacctcccagttccggtgtgtagccggtgttgtgcttccatgtcttcaggttctgtatgttgacatagactttcagtgcctgcaagcgtattttagcaaggagggccttgtcgaacgagtaagcaagttgcacgttacggatacggaagaagctgccgtcttcgatataatactccgaattcaggttgttgatagaatgtttggagttcagcaacggctggctgttggaggtaccttctccgtgccagcggtccatgcgctgtgacagatagttgaactgtgcaaagttataattgtcccaggtacggaaaatttcgttaccgtgctgtcccatcatatcgatgcccaatgaccagttcttgtagtttactccgagagaaagaccataggtgaaatccggtgtcgggttacctatcattgtacggtcttccggggtaatcttaccgtctctgttcacgtcggcgaatttcaggtcaccgggagtgactgtggcaagggtattttcgggtgatgcatcgatgtcggcttgcgactggtatacgcctgccaccttgtaaccgtagaagaaaccgataggatagcccgccatcgtgtaactctgctgtttgtctccggcgataatggagtatccgtcctgaacgaggctcttcaccttattcttgatggtggtcaggttggcgctgacagagtatccccagtcaccgatctggtcacgccagctggctgccatttcaacacccatgttttcgatttctcccaagttgccgatgccgggtactgttccggagataccgggcacttcggcaagcaagtctttggtccttttcttataatatactccttcgaagtgcagacggttgcgcagcacgttcgtttcgaaacctgcttcccaagcttctactttttcccaacgcagattgggattgggcagataggagagctggtaaccgggatagataatggacggcttgccgaaaacagccgagtaagcatttgacaacagcggttcggcgggataggccctgtccagattctgattgcctaatgtaccgtaagatgctttgattttcaacatatcgagccatttgatatccttcatgaactcttcttcggtcatcaaccaaccgccgcctagtgagaagaagttctgccactcattgccggtgtatgagaaggcggaagaaccatcgcgacggaacgaaccgttgaacaggtattttcctttgtagttgtagatcacacgtgccagcatggataccgtagtccgttcccattgggtacttccgttggtagctgttgcggcatcaccgatgctgacaaaccatttgtccggatcgtcaggaatcaccagaccgacaccttgcttgcgtgctccgtccagtcggctcagtgaattgtaatacgtcgtaaagccggctgtagcggtcaggttatgattgccgtgatcaaaactattggtgtaagtcaatagatagtcactctgcactttcgtttcattttccttgaactggctgacttctgtcttgccggttcccaatgtaactacatctcctgcggcagtatcgtcatacaccttcatgataggcagataagtacgtccgttgttggaagcatagtccatagagaacatcgctttgaagttgaaatgtttcaggaagtccacttcgccatagatattacccgatgcccgatagttttcggctttggtcgtattggctttcagatcgacgtctaccatcggattgttgatctgtgctttttgaaattcgggcagaacactgtataagccatattccttattatataccggtgcgataggggcagcacgaagagcgccgagcacctgtttggagtctgccggaagcgtgcgtgctccgttgaactggaaaccgactttcagaaagtccgtgatcttatagtcattacttgcattgatggtcactttactgaacttctcatgcttgatgtttccctgttcgtgagagtaacctacgcccagatagaaactgtgtttcggcgaagctccggtaatactgatattattgttggtgatgaatgcagtctggaaaatctcatcctgccagttggtgttcgcgttccagccgctgaagtcgaacggagtgtccttctgattggcaagctgttcgctgtatagctcctgaaattgcggaccgttgaccaaatcaaccttatctactactttcttgaaaccgaaagaggtattaatgttaaccagtgtctgtccttctttggctttcttggtggtgatgatgatgacaccattcgcaccgcgaacaccgaagatagccagtgatgacgggtctttcaggatctccatagattcgatgtcctccggattaaggaagttgatattgtcattgaatagtccgtctaccacgtacaacggtttgtagccattgatggagtttgtaccacggatacggatttcggggtcggcaccggcacgtccggagtttacgatttgtacacctgccacttttccttgtaaggaagataatgggttcgttgcaggtttgttggcaatttcttctcctttgacgttggtaatagaacctgtcaagtctcttttcttcgcgctaccgtatccgataacgactgtctcggctagtacctgcgaatcttctttcagggtgacgttgatcacattctgtgctcctaccttgacactctgtgtagtcattcctacataggagaataccagtacgtcttctggggtgacagagattgaatacttaccgtccatatcggtgatggttccggtggaagttccttgtacgagcaccgatgcaccgatcagcggttcattggcggcatctgttaccgtaccggtcactgtctttgtttgtgcaaaggcggatacggaggtcagcaacaagcaagtgagcgccactatgctcttaaacctgatggttttcttctgaagatcttgtaaaagtctagtcctcattgcattaaatttttccattcgttactatttaggttgaagtttattctgccgtcttccggcgaaagtaacaaagtgaacaaatgaaaggcaaaaaagattagggaaagagagagaaagggcaattttaacattgtaattatgatgtgtgaaaaaattatttgtctttttgttgcttgtttgttttattctatttacatttgtaaaacgaaacgaactatgaagctacttctttcttatattatagggttgttcctgattttgtctctctctgcttgtcatgatggaggtaatgcaactactcttttacatcaggcagactcactgatgcaagagttccccgatagtgccctgtctctcctcgaatccatttctcatcctgaaaagttatccggctctgaaagagctgattatgctatatttttgacacgggcaaggactaagttgtatgttcatgagtcaagtgattcattgattcggtttgcagtagattattataaaagaagttggaataatgagcgtaagatgcaagcctattattatcggggttgtgtgtatcgagacatgcggtgtatggatttggcggtaaaagatttcttgcaagcattaaaggtaattcctaaagagagcgagtatctttatttgggggccatttatgagaatctggcgggatgttatgcggaacaaaatctttataaggatgctatgcacgcccatcataaagcgcatgaaatttatattaagcaaaagaaagatgatggtctattttatgctgttagagggatagggtatgtttttatgcttcaacatcaattggatagtgctttggtctattatcaaaaagcattggatgttgcagagaatataggggaagattattataaatctataatattgagtgaattgggaattttgcataatgaaaaaggggaatttcaaaaggctaaccaatatctttctgcatctatatcttctgcaccaactggtactaatttattttctgaatatcttcgaaaaggttgtatcttacgtaatatccatcaaatggactctgcacggtattatttgaatttgagtaaatcttctccttatatatttaaccgtggaggaagttatggagaattatataaattggagaaagaagagaaaaattatccagcagctatagcggcagctgattcttttatttattatctagattcaatttatgatacaacaaaggcagctgagataactcgtttggctgatcaatatgaaatcgaattttatcagcaaaaaattgcgggaagatataaaattgaggtcttatcacttttgctgttatttattattggaggagcgatttctctttggattgataaacgtcgaaaaaagaagtatcttgagttacaaaatcaattaatgaagagtcgtacagatattctatctggggactttgaggatcagggtaatgctgaatctgattttatgaggatgttggagccgagtttagaactttgtcttcagttgtttcgaaggacagaaacccatgagaaacttctttctttggagaaaaagatgggcgttgctacctctttgagtattcatgaaggacagatgatttgtgaaagcatttatgaaacttttggcgacattatgcttaaattgaaaattcaatatgctgatttaactaaagaagacttgctccattgcgtatttctcttattgggttgctccaaagaaacaatcttattatgtacacgtgcttctgaaggagcatttaaaagtcggaaaagtcgcatgaagattaagttaggagaagaattctttgaatggatgactatacgccaatatcttgtctcataggtgtttatgttggattgtgacattcctgtaacttttctgtaacttgcagtcgagatccatagttatcttgtaactttattgtgaccaggcatctgaatttatttaaatcttatcccttacatttgtatcataaccaataaaaataagtattatgaaagcaaaactattattattactttgttgcttatttgcgattgaaggatgggcaaattcaaatgatattcatttactaaaagatagccgctctaatcctatgggaatacctattcaacctacttatgagaaatgtgctattctctctaatattcttaatgtaagcttcggtagagcaaaagattatgctatcattactgtaacgaataaagctacaggtgaaattgtacattccaaaacttatcacaacactagcattgtcatgattgatatgtcttcttgtgaaaaaggagaatatactattcatataattttgaatgattgtttgttggaaggtacatttactgtacagtgaaactgaactgaataaggtaatggataaatgtacttttagtcttagtgacaagaagtaactttttgtgttccttttctgtatagtcgatatttctaattgtaaaatattaagttagaggaaggaggtaatttcctttgggatctgttatttattattgttgtaacgtatttatcaacctttaaattcaatcggttatgaaagcaattttttttatgtttttattatgttgtatttgctgcttatcatgttcggatgagcaaaatactctttcagaagaacagaatgttattgagaataagacttttgaaaaagtgagtagtttagaattgaaacaacaactactggattacttgaataattcggtaaaaacaagaactacttttaataatgctgaaatgaattacgatttaggtatgcaagaaattttgcgtccacaaatccaaacctttggggaggaaatgatagttgtacgaagtaaaatggatgctaataatataatggcattttataaagagaatggtgttattgaaaactgtcttataattgaatgtgcacaaaatgctgaagatgcacttgaagaaactatgttcacatgttatgatagtaacaatattcctatttttaaagcaatggttaataaaagaaataatacatgtaatgttcttgaaatatatgatggacttgacgatctgacagcccgtggtggaaattgggggtgcaatgtatctcttggcttggctggtgctttatggtcaaccgcttttggaatggttacggctggtgcgggatttgttgtggcggttggttggtgtgtgttacaaacttggctatgtagctcccgtgtagtctctcgccctccaacggaaatacaaatagatacaatagaatttaagccgatggaaagagatgatgatagtatagcgagagacacaataggtaaactattgcccctgcgttgataattatttaatatgtacagtaaatgagaaataatatcaaattagcattgttttatattttaatattaggtctgttctccattcttttatgtacagaaaatagtatttggttttctgcttctattgcaatgatttgtacatcaacgggagtttgcataggacaacttattaagaaaagaaaacgatttcatgctagtactgacaaattatgggttctatcaggactgtttttattatctatcataatttcattatgcatttatttcttttttgataataaccccaataaagtgacatatattttactgatgaatctagttctagctttaggttctatattgtatatctatatcactagagaaaaaatataaaataattagtcgtatgaattgataattagaatatttcaattcatacgacttttcaaatatagtattatgagaaaacttattttatttttcctatttgtgttttctgttacagtaggatttgcacagagtttttccggagataaactgtttatttcggtagatggtggaaaaggtgtattgttcggtaagtcaaacttgtcaccttttggtgttaattatcgtggggaatataatggaggcttgacgtgtaatgtgaagacactctatcgaattgataaattttgggttgccggattaaagtttaatctctccggtacttctgccaattatacacttgatgatgaaacgaatgtagctgacaatgtagaactttggtatttaggaccgcaacttggattcaaaattccaataaccgaaagaactttaattagttgcgtattgggagccggatatctacattatcgggatgaaggtcgaagtaatagtgaatttaaatgtacttccggtgcattggccgggaatatggactttctggtagaatataaattgacagaccaccttgcggtaaacggaggcttttctgttttaagtggagactttaagaagattgaaatgacagccgatgagaaaaaggaaacactacgtccaaacaaattggatagactctatatgagacgtcttgattttcagttaggactagttttctgctattgaacatcttaggtcaaaagattagctggatagagtgaaccttgaaagatatttattacttttgaggtaaagcttggtttagctgaaaggtatacgaacagtctgaataataaataaaaatagaacaatgaaattcatgaaaaaaaataggccagatgtgatgattattatactgcttattctttggggaatatatgagatattcgtagtaccctttgaatatgatactttggtatctatttttgttggctttaatttggtgtatctttttccttggtgctgtaaagaaacaagtgctgaatatttaaagataagaaatgctgccttacaatatgctttcacattaatcattgcagtactttgtgctttaaagattgtcggagttctgtgtgaacgtatgtttgatgttgatggtctgaaaatgatatttattggcgtcttctttcaaagtgtctatttcctgattgttaaatttaaacgttcgaagatacatgaaaggtaatattaaattggcattattctttgttctattattgggactctttaccattcttttatgtacggaaagtagtcgttggttctcggcttccattgcaatgattttcacaatgagtggtgtttttctagggcaacttattaagaacaggagaaaaaagtagttaataaacagagcgctgtttcatcctttttcaagataaaacagcgctctgcttattgatattaacgcctgtatggctctcttttagtacatctgctccgcagtctccatacatcgaataacatcttccttatttccacagaaaggaccggatttctcgatcttcagcgtagacatggcggcagcaaaccgacctgcttcttcgatgctcgcacccgatacccgttgatacaaatatccgatagtataagtatctccacagccggttgcatctactacttgtccgggtttataagccggaatgcgataaaaatccgtaccgtcgtaaatgagagaccccatacttcctaaagtgactaatacttctttcactccccattcgtgcagtttacgtgcggcctcatgcggatcggaaagtcctgtgagcacttccatttcgtgctcatttactttaaggaaatgaatatattgcagagcttcccgcttgtcagtccagtctaccgggtatacgtgcgtatcacgtacttcacgcaggtatccttgcgaatcgacagctatcaatcctttccgggataactccttaatcacttctaaagaaaaatcatctgctaacagcgaaccaagatgataaatttccgcctctatctcctgaagctgggaagcggtgaaaggatcggctttagccaacacacgttgtgtacggtcatccggattttctccatagatgttctcgaagtatacagagtgctggctgggtaatgcggttacgctgatgcctatcccgcgcagctggtctactactttcatttccgtagcgccgactgctgtcactaatgcataatctatgtcattgaaatggcggatagcgtgtgaacaatagaaagctgtgcctccaggcatatagactgtgctttgaggagtgactaccttatccaaagtgatatggccgatgcagcaaagttgatgtttcttcatatatgtaatcaattaaaaagcccccaagatatttcttgaaggctttctagtttatataaatgtgtgcggatgataggactcgaacctacacgcctcacggcaccagatcctaagtctggcgcggctaccaattacgccacatccgcatgcgtcgctttttgtttagcggtgcaaagataggaagattttctgatttgacaaataattaggcaacaaagttactcacttaagatttcaaaagccttttcaatcagtgtgtccctatgtttagattggtcatcctcagtcatatcgatagctatatcaggcaaaataccttcttccagcggctgcatatttttgtcgaaatgaggactggcggagaagcggatgctccatccgttcggcagttccgatgtgaaaggaagtcccgaaccgccacctgtctggtcaccgacctggatgatcttgccattgtctatgctgcgcatcagattgacgaaatcattggttgcactgtagcaacggcggttggtcagtataacgactttcttctgccagcggatgctgttggaaggttccaggtagatcggttccggttgggaaaagtcactatgtcctgttcccgttttatgctgtatgaatccggtcaggattttactattggtaaatcgggcggcaatgcgggaagaattagtcagattacctcctccgttgtcgcgtacatcgataatcagtccgttgcaggttgccagatagacaaggatttcatccagattgccatcgccgaccccggaactgaaactttcgtagcggatatatccgatattattgtcgaatattttgtacttcatccccgccgatgtatagtagtccttgctggcactgcccaggtaatactggtaaagaatatcctcccgataattccacggatacccctgataccatgcgtcgtaataagagacacgcttggcagatgaaagattgacatgaccgtctttcaggatatagagcatctcgctgagtttatcgaaaaggtcgtcattggacatacccggtacaatcagtttgctgtatttctcatgaaccgcatcccagtcaatacctttcgagtccagaaagcaataccgttcgtcaatgatcttccatagttgctcgaagtttcctacgggatcatcagcgtaatcatcttctccgatgcaccccgtctgtatcgggaggcagcagagcagtaaaagtagttgtataattctatttctcattcttaatctttcagttcttgtccataaattctccactctccacttctcctagtacgccctcaccgacggaggcagattcgctccttttttgttggaaacccgatacaggtctttcacaaatcctaccataaatacatgagagtaggtatgtgtcttgattccgttaacattggattgttgcaagtctgccagataactgaaacgcatcttggtatatcctatcggcagatcgacagaaagcatctgacggagagacggttgattgtggagagaggtaaattggataactccgctggagttgcccagtgagaagatttcgtaataagactgtccgtagtgcggtgagaacataagtccgatcatcggcatgttgacctgatagcggagtaccatcggatagcgcttgattttcaaatgccagatagccattcccgaagcgtccagattgacgtatgcccgggctgaggccggattgtttgaattgcggagattgtagacaaatcctccgttgacgtcaaacagtcctcctgccagtaacttgaagttctcggtgaggcggaactggtaatggaggccatagttccagttgacgagtccggagaaggtattgttgttgtctgcgcggttgtgtgtatagccgacgtctgcctgaaagaagttctgcacagaaacattcccgtcgaacaactttgtcatccggatcgtctcgcgggaaatacggaaatctattcctttatattcctgaggcgaaagataggtgtcgaacacattggtaaatccgactccgtacatggtggcacgtgttacgtagcgatgtgcttgcagactgtcggtctgcgcctgtaatcttgtgcagagggcgaacaggaggtatcctgtcagccctaagtataataagtttttcttcattggcacattgggtatttttttaccgcatgtatacattagctaaaacagcttcatctgtcccgtaatctcatcgatgatgtccccttcgctcttatcgctgtccgggtccagattttccggctcttcttccggttgttccgattgttcgttagtcggttccgggaaacgggtcggttcaagctcgttgatggtatccaccgtataggtagtgatacgctttccttttgccttgaagcctttgactgcaataaattcttccgcgtcaattaccatcgcttcacggaaactgtcgtgtccgccgaatatgacttccagacgaggatagtactcatcagtcagcaggatcagacgggtattcttgttgtctcccagatagttctgcttgcggttggaaccttcaaaacagaaacgtttcagatacggatagttctgttggtcggcgtcataaagcgcggcagtccatatcttgttcgggtcgaacttctcgacgatgctgacattatcttcgtagtggttgctcaaatcgaaattagtggtgtagaactcgccattgttgagcactaccagaatggtgtcgtcgctttggaattctcccagatattcaccccgtccgtcgtagttgaggcgcaggatatcgcggtcgaaccatacttttcgtcctccgagggtagagcctcctttctgtttcagggtaatcttatgcaccggcagtcgggtgaggatcactccctgtgcctgacgtcccttgatgctgatttcactgaaatcacgttcgaagatgatgcgtcttacacgcgggttcggctttaatgtcactttgatgatttcggcttctccgttcgggttggcgctgaaataagtgatgcgtgagtccggcgttccttgcgtgacatcgtattcacggtcgcggaccacacctgtcacggcaaaacgtttgatatacgtcgttccttctttgccgtcccggtaagtgatattgtagatggtgcgtttgtcattcttcttgaatacattgacgtaaagtatgtttttgcccacaaacttcttgtcggctaccggagtgacgatatatttaccatcccggaagaagacgatcacgtcatcgatatccgaacagttggctacgaattcgtccttcttcagtgctgttccgataaatccttcatcgcggttgatgtagagtttctcgttggcttctaccactttggcggcttcgatggtgtcgaagttgcgcagttcggtgcggcgcgggaagttttttccgtatttgtttttcagcatctgataccagtttacggtatagtccacgatgtgagcgaggtgatcgtcgatttcggcgatctcttctttcatacgggcgatcagttcatcggctttgtcggtgttgaacttcaggatgcgccccatcttgatttccatcagtttgagaatatcctctttggtcacttcacggataaagctcgggtagaaaggagtcaggcggtcgtcgatatgtgcgcaggcggcgtccatgtctttggattgctcgaactctttgtccttatagatgcgttcttcgataaatattttttcgagggaagcgaaatggagtgattccagtatttcccctttcttgatttccagttcctgtttcagcagtcccagtgtgttgtctgccgactttttcaacaccttgctgacggtgaggaagtgaggcttgctgtcatcgatcacacagcagttgggtgagatgcttacctcgcagtcggtaaaggcgtacagtgcgtcgattgttttgtccgatgaagttccgggtgccaggtgtaccagtatctctacgttggcggctgtgttgtcgtctactttgcgtatcttgatttttcctttgtcaacagctttcaggatggagtcgatgacggtagaggtggtcttgccatacggaatctccgtgatggcgagtgtcttgttgtccagcttgttgatcttggcgcgtacttttaccgctccgccgcgttctccgtcattgtatttggctacgtcgatggagccgcctgtctggaagtcgggatatagctggaacgattctccacgcagataactgatggaggcgtcgcaaagttcgttgaagttgtgaggtaatatcttggatgatagtccgacggcgataccttccactccctgtgccagcaatagcgggaacttcacggggagggtgaccggttccttgtttctgccgtcgtaagacagcttccattcggtcgtcttgggattgaatacgatgtccagcgcaaacttggaaaggcgtgcctcgatgtaacggggagctgccgcaccgtcaccggtgagtatattaccccagttaccttgacagtctatcagcaggtctttctgccccaactgtaccagtgcatcgccgatagaagcatcaccgtgcggatggaactgcatggtgtgtcccacaatatttgccactttgttataccgcccgtcgtccagacgtttcatggaatgtagaatacgtcgttgtacaggcttcaaaccgtcattgatatggggaacggcacgttccagaatcacataagaagcatagtccagaaaccaattctgatacatgcctgttaactgatgctttacgttttcgtcccgcgcgtccgccggtttgtagtctgaatgtccttccgttatctcgttgatttcgtcactcatatatcaatcttcgctttgctttaacaacaaattttcttctatccatcaaaaaaaggaggatgtgcacgcaaaaatacgaaataaattcaatatgaggacgaaaagaactcacgttttttatgatactgagagcttcgttcatcctttgttttcttgtgtaaacttcccgaagacttgacaaagccctttttatgttgtatatttgtagtcggctatccagctttaattaaaacttgaaccaatgaaaaaagaattgttttttgctgcatctgataggaagtatatgcctttaatttggtatgatatactgacaatataaagaacggaagtctgagaaaacagactctgtgagactcatttatcattgatgggctgcgaactcttagcgggtttgcagccttttttgttgtataaaattaaagattaatctttgaaaaggggaatttgagtttataataaactggggggacatttataataaacgatgcaggaatttattagaaacgtttgtctggtttataaataaaaggttgaagtttttcatgggagcttggtcggggtgttgcagtatctctaccacggatgcgcttatatggtgaaatatgataacataaactctgttcgctttatgatacaaagaaggagcgtgtgtcagagtcaatagtaacaaaattctcctccttcaggaaggaggagtccccgtagggggaggtggtaggtgaatacataaactattgatattcaattgtacagtacacctaccaccccggctttcagccacccctccttcccgaaggaggggagtttagttacttttgacataccctccaacaaaactataacctaatgaaaaaacgaggaagagggggcggggttatacccgtatttcccaacctttttcgtattctctgccccagagcttgttagcttccagatcgttcagaatacgtccgcttcccggatcaatatctaaagaatgacctacgcgctgtgcgatattgcctaactgtactaattgagtactgatgcaggcatctacaatgccggaattcagcttaccgcctttgcggatggcgtcaaaccagttttcgaagtgataagcatccagcttttccgatggatttagcaaattaccagtttcaaacttcaagttactttttacatctttgattactttcccttgtaagtctgttattttgtactcattgcctccactgatgaaaagggtgcctgtttctccgtagaaagcggtacctactccgtatccgtctaccggtgtgctgttgcaactacgtccttcccaagagcaggatgcttcgtcgccgaactgaaaagtaatgagttgtgtatccggagtttgccagtcgtcctgaaagcgataacgtcctccgacagaatctacctttgtcggataatcaacgcccagcccccaacggaggatatcaacgaaatgagttccgttattcaatgcttcaccggtaccccagttccagaaccagtgccagttataatgaatataattgtctttaaaattgggcacccgtggtgcaggaccttgccataaatcccagtccagatagtcgggtacaggaaccacttttcctgtgccgatggaaggacggttgttgacataccaggacttggcatatcttactttcccgattgccccagacttaatctcttctattgctttgataacattcggccacgaacgacgctggttgccgacttggacaatccggttatatttaagcgtcgccctgactaacatttcattctctgccggattgtggctggtcggtttttccagataaacatgctttcctgcttgcatagccataatggctgctttggcatgccagtggtcaggcgtggcaatgactactgcctcaaaatcatccgattccagcattttgcggatatctttttctcctttaggagtgcgtccgcttattttatgaatatctgcctgacatctttcaagtgctcttgaatcaacatcacaaaggtaagtaacttcacaacctttcatcttggcaaatccttgtgccaaggcattacctctggagtttacaccaatgactccgattcgtattttttcgttcgcacccaggatttcctgataactatttgaaccgaagccgggaataatgcttcccaaggaaagggcggccgtgcctgcaactgtttttttgataaaatctcttcttgttgtcatagtgtttatttttcctcaaagttaagccgttattaactgatatcagacttcttttccgtcaatcaatcttcaaaaaacgtaaagctgttacttcttttttcgaaggagatgacgtaacccgataatgagtatacgcggaatccatagtatgaaatagatgaaaaaactgataacgagcacataccccagttgagtgaatatttcaatccacggacgtgtatagacaaggattgcaataatattgattgcaaaagagagaagaaagcatatcagataaatgtttctttcccttttaattttttgggaggtgatgatgatatctttcataatttaaaatttcatatatggtattttatattcgtcggggaaaaggatatgtcgctcttcctccattgcttgattgccaagcaggcaaagtacggtggagcaataggcttcttctaccacattttgtgctttttctccagtgatacatgattggcagaaagaagagagaatgatatcggaaccatctttgtcggctccgatcatgctcagcccgttgttgacgttaatgtctccttcaataacaaaatgtggcgtgtattccatttttgtttccggtctccaactgggtccggctgtcgggatagcagcgaatactttatccttaacctgtccgataagttgccggatgcccgatgttgaatggtcctcttccagataatagataccttttgccatttccatagtacctttgtgcccgaggatctggtcttccataccgttgaatttattggaaatcaacgattcgtaggcaatcttggttccgtcggagtatcggtaagtcacatttacgctatcgtatacttcgcgaccgtctttccagtagacgatgtcacccataccgatgatgcttaccggcattcttttagctgcccagttgcatacttccagttggtgacaggccagttcggtcattaatccgcctgagctttctttgtacaatcgccagttgattttatgttccagttccggtgaggggacgggacggcgccagtctgcatttctgaaccaatggcagcgcattcctaccacatctccgatgagtccggaatgaatcatttgcattcctttgatatacttctcgtcatacatgcgctgcatacagaagtagagaacctggttggtcgtttgataggcatcatatatagctttgcattcgtctaaagtccgtgccatggctttttcacagaatacgtgtttgccggctgccagggcatccagtacaatgggagcatgccagttcaacggagtagagataattacgccgtcaatatctgccgattccaaaagcttccggtagtcagtgtatgctttggcacccggacataactctactgcttgttggaggttaggagcataattgtcacaaacggcaacaatccgggcatggggaatctcttttagattgtggatatgatactgtcccctggaaccagtaccgattaaagcgatccgggctttctcgttgcggatttctttaagcttttcgggtgtgcaggaagacagccagggtgtgcttgccagcagtgcagttcctcctgcgatatatcccagacttttgatgaattgtctgagattcaaatcgactcctttttctattttgtttctcatattttatagagtatatatagttccttttatatgtttgaagttctcgttgatctgttcccgttgttggtcgtcggcaatcatccagactgtactgagtatttctgcatccagcggattgtctgataagatactcgtaacttttctttgttcgttgcaggttcctgtaagcggatttataatatgcccggtgtactgttccgtattcccggaagtggacaacgtattgtcagtaaggcagaattcgtcaagagtctgttgagtgtaaggattctgcaaactgactttccaacagtctccataaggatggtgtcctattcccataatcgaactgttgccaaaatcgacgaaagcattctctatatttccctgcaagaggatttcttgaatcttttttaaggcgtatcccttcgcgaaacctccaaaatcaagtattacggaagagttgctaaaagagatatggtgattgccgtgaatttgtatttgtgagaaatcgtttaatgtgatgtcgaaaagatgaagagtcttttcataataatattggcatgaccgtaggatatcttccaattccgcactaacagaaactgaattttgttgtgtatggctgtttagctttgatacttcacttgtggcatcaaatcggttcaacatcttatccaacctttctaactcgtcggtaatatgtgcccaaagcatgtttagttggggaaggttagagtgaatcatcaggatatcaagacgtgtccccataacatgaggaatgaatccatgaaacatggattcatctgcataatattttatttcacttcttaacacgtgcctgcggtctttcttatttttctttctttgccagctctacagctgtagtggtgatataatatttagatattgtattctcattttcccattccggcatatttttatcatgcaaatagccaaggaatgattctgctactttactgaagtgagcttcatgtcccagcctgtccgcctgtggaatatcaatcagataaagtccttcattcatttttttgacggataggaacggataggtcgcttgcagttgtttgatggccttttgcaactggctctcaaattcggaatgatcagagtctgcggttttttggatgtagagctgtttcacaaaaccactttctttgtcctgaattgttttcaatgtagccttacttcctttcttaagggaggtaaaagtgtcgccgccatcacttggaggagtgtaattccagataactttcatgcctatatgaattccctttacggtgtaacttaggctaccattcgctaaaacctccagcacattattattgatatatttgttcaagaaggcggggaaggtgtcagcctgcgtcgattgcgaaaattcaggtaatgtaatgcgggtaggccaatgtctggctttcaatacttctacatccgactgataacggatggtttcgttggggaaacattgccagttgaccagatcgataagatgagtggttacatctgcaataccttctccttgttgctctgtgtcataataccataccggacgaatcagtggcttgcctgatacattcttaaagaaatgatgaacactttccatagaaactgacggatcattcaaagaccctttttgcaattcaccaaaaagatccggattgttcagtaatgctttttcaatgatgttcaggatgtcatatcgttcagtcatcaagtcgtaaaggagtaatttcctttcctttgccaattgatatgcttgaatcaataagtcgaaatccttcttgttaatggccagaggcttgtcggaaagcacattgtatcctgctttgatagcttccagaatatagtttgtttttttctggttgtttccggcaagcacgactacatctccttgacggtcggaaagcatcctggaaaaataatcgcccccaatatatatttcttctttccaggatgtgggattctccgcccgttgattatagctatttatgtcgttcagatattgtttgacttccgctccttcgggagcatatacccgaatggtgtcgttcactgaggccagcggattcttttgcaacagactggcatgaaaatgtcctgggtcgaggaccactaattttacgttcggattcatatctttgtcatgattgttgtttgcctgctttttggaaaaggagcaggaagcaactattaatgagatggtcaggatcccgatgtgtctgtatgtgtacctcatgtgctatttttatttgtaggttttaattagcttctgtgcatctttcagcccttttcggtatgcctcctccatggtaacgattttgccattctgttctttgctcatattggaagctttcataaaagtgaatatctcaattgtttcttctttcgaaatcggagctactccggtcttgaaaaaagtgagtatttgatcgagcaaaactttgtaaccttcatatcctcctgctgctattgcacctttgggggtataagctgtaccgccataaatggccgggccttctttgattcccctgaaagtacctatccgcccgtctttccaacggcctaccactacatcagcatcttgggaagacatacggttgactgactcgcaaccggttcccataagagtataaagcgtttctactccgtgaatgccataaaaaccgaaatcggggtgagtcggttctaccttgtgaggagaataacagtcagctcccagaattttgccgaactctccgtttctcagcttttggttctgtggagaatatctgagtgcagaagaagaaaagataggcacattgtatttctccgccatttcgtaaatggcaatagcttgtcccaatgtcgctccaataggcttgtcgatatagcatatttttccggatttgaatacttccattgcttgttcgaggtggattctaccgtcgtttgtttcaagcatgacgcaatctaccttgtcaagcaattccgctatggaagatgtaatctccacaccgtgtttcttgacctcttctatatatccgggaattcgttcgtaactggactggatagtctttgaaccataagggtaagctgctacgacttcgaactctttgacaaacttatcgtcagagtctccgttcagtagctcggtgaaagctgtagaatgggaagtatcgagcccgataattcccattttaattacatcctgcgcatatagtctgaagctgacagacaagaaagcaaggaggataaataagatatttttcatatgtatttataagtttattcgttctgcactttcaggatccaaatataaacaagaattttcttttttgcgtaatatactggccggacatttttcggaaatttctccataaagagtgttgtatactgcattggctttatttttaaaaggcacaatgcagaacatccagtcggcttttaataaggctggaatggtaagagtcagtgctttagcaggaacaaggtcgaatgcttcaaagcatttttcattcacttgttgctgccgacatatcgggtcgagttctactactttaactaattgggagtcgttgaaattggctacatccggatcattgaatgcaatatgaccattttctccaattcccagacagacaatatcgacaggatgacgaagcagcaattcggaataacgtttgcattcttcttcaaggttttctgcttgtccgttcagatagtttacagtcttgaacgggactttgtcgaagatacgctgacggagaaaatttccgaaactttgtggggcttccggatgaatgccgatgtattcatccatatggaaagcgttgattctgctccagtcaatctgtttactgtgaataagatgacttaagaattcattttgtgaaggagctgcggcaaaaatcatattgatttcagctttctctttgagaagttcgcatattttgttagtaacttctgtcgcagcacatttccccatctgttggatagaagggaacattttgactgttaatagatcttgttgaaacaggtatgtttcattgattgtagataacatggccttttgatatagttgttgttacgttaatttgattgtcgaaaatgacgatgtcggcatctttaccttcctccagagaacccttttgggaatccacatgcagaatgcgggcgggggtaagggttatcattcggatagcatcgattaggggtatgccggctatatttatcatggttcttaccaaacgatcggcggtagctacgcttccggcaaatgccgaacggtcgggaagcttggctactccgtcttcaataataactttctgaccgttggtcaggctgcccaatatggattcaccgtccggcattcccgcacctcgcatggcatctgtgcaaagtgctgttttatcggcccccttgaacttatatacgaattgtagtaaaggtttgggcagatgaatgccgtccgcaatgatttctactgtcataccatcaatcagataagctgcctctaccacacctgcatagcgataggcatttctacgggtgatggttgacatcgctgaatataaatgggtgacatgagtatatcctgcttcgtatgcttttaccacttcttcataaatggcatcggtatgtgcgatggatgggaggatgtgacaacttttgagcttttcccccagttcaactgctcccgccagttccggagcaatactccatcgtacaatatcttgtgaggcttccagtattgcgttatattcatccggatgaggcgttttcaaatgattggggtcttgggctccacactgcttaggcgagaagtaaggtccttccagatgcaacccgataaattgggcaccttttttattaagacttttggctttttgataaacggcaaaggtcgtcattagctcttcgtttgtgctggtcagtgtcgtaggtaccatggctgttgttccatatctggcatgagtttcggctactcccagaaaagcttctacggttccatccataaagtcatgacctccgccgccgtgaacatgtatatcgataaatcctggggagacatattgttggttggcatctatgatccggtcgtcagcttgaggaatatatgcttcggatgatacaatctgttctatcttaccattccggcaaaccattattttattggtttcgatgctggtagggagtactagtttcccattgataataatcagtctttccatttttttttatttttaatgtcttacgttcagtcttatctccaggagttgattttatgccctttgatggcaaagaataccagatagataaaacaaggaataagtacccagtaaccgatgcgcaaactgtactgatcggcaaagtgaccatatactaaaggtaaaatggcattgccgcataatcccataatcagcagagaggaaccggttttggtgaatttgcctaacccatgaatggaaagaggccatattcctgcatagatcagagcgttgggaaaacctaaagcattcagaaagaagatggaagcattggcttgatgaccgaataatgtcatatcgaagtctgcccataccactccgaatgagagagccaaacctagtaatgtacaccctatcagtgcatttttctgggaaatgtatttagggataaggatgataccaagtatatatcctatcattgtgcatcccagtgtgtaagaagggaatacttttgcttccagtaaatccatccccatagagttggcgtaattgattatagtgtcaatggctataacctgtgtacctacatgaaagaaaatggccaatgcacctaatatgaggtatggaaagtcgagaatgctttttttgtcagtatgtttattgtcctgttcatcagtggcattctgctcgtcagtatttatttccggtaatacggagtagcggataccgatacctgtcagcagtaagatgatgcccagaataatgtatgggataatgacacgttgtatcaattcattgagcatggcgttctttgttgcttcgtccagtgcaccggattcaattaatgcaaagagttcactgtcgtttgctttcagaataagggcagcgaatatgagcggggagataattcctgccactttattgcagattcccatgatgctgatacgtcgtgctgcactatctatcgggccgataatggtgacataaggattggcggctgtctgcaaaatagccaggccggtgccaatagaaaacaagccgatgaggaatatttcaaattgccgtgccagagctgccgggacaaagataaaggctcccaaagcagtcagcataaagccatacatgattccttttttaaatcctactttcttcaatagaatgcccgaaggaatggccatgacaaagtatgctatatagaaagcaaaggctacaaaataggattcaaaatgggtaagctcgcaagaaatacggaagtatggaatcagtatggaattgacccatgatacgaatccgaatatgaagaacataccggctagaatagccagagatatataataagttttttttcttgccgaaggttgattgtttcccataaattggtcttttatagtatgtatttatataattgataaaacaaaggtagtacattcgatttctttcttctctgtgaaaaacgaaaagctacattcaaaaaacgtatcttttgaagcgcctgtttgtcgaatgtccgccttcattattgtgctttggtaaagtacgtatcgtattttaagataagactgtctgctatttgaatcgggtcttcctctgaaacaatagggaaagagtctttctgtaatgtccagttgtattcaaattgcgtaatgtcctggtggaatttgtcttcgtcaaaaggtttatcttccgaaacagcagcgatgactccgtctgtgaaacgtttccaacgttcccggtagaagcttcgggtaagtccgccccagcctcgattggcatagtcattcagttgggtgtcctgttgcccccatacggtcaggatacagcgtgcattttcttcatagtaatccttttccgacacggttgcaccacagtttctggcgtcttgtaaccatttcccgatggatagagtcgcgtcacaggaaaggaggcggtctacgtcaagcaagaggttgtccatacgggtactccattctctcatgcctgttgtatctttccggttatagcaagcggtaaactgatctctatattcggagaacaagtttcctagtacttgtcttccgatattgattacgtcaaagcgaaaatcactattgttgatgttccgggcttttagtagctctttccatatttgccataagtcgttatttgcgtaatgtatgccggggtttgtattccaacttttagttcccgttagtctggggcgtgcgttcattaataccgattggccgcatgtggcatgttcggtataaattttctgatgcaaggctctccacgctttgatgatattggcatcctgatttcctcctctgcacatggaccagttggttatccattggtcggtagtgacaggataatcccatgcctggtcaaaaacaaattcgtacataagagggtttacatcaaagccttcaagagttgctcccaagccatagacattgtctcctccctccttgaagagtcgtttaatcttgaaatcaatatcattcagattgcctgctatcatcgtattgccgccaaaattacccagataacaccaaatatagggattcccgtaatatttttcagtatttcgccagatttctgtatgatcgcaatagtaatcgagtaatatcagtttgttatccggtactgcttttagaaaggaacggatacggggttgagtccatttctttttgtcatagaagaacatccaggtcatttgtaaccattgggctgctgagtctacctgatgaatcgactcgtaaatcttgcttgaaacattggctaaaaaatcctcgctccagtcaggagagtcgacttcattgaaaggatcgattccataaatatggtcagtaccatatactttggtttgttcctccagaaaacggcgctgaatgattgagtataatgagtccatcggatcaataaaatgactgcggtatttttcatcgaagccaccccactgactcatctgatagatttttgcattcggataaattgtttttaattcggctggtacatgaccggcaaatgctggtaatacaggagtcatatcaaactcacgttctctttcgagaatacgtttttgtaattcctcctgatcctttagccaggattgaggtagtggactttgccagaaatcgacattggacatccgatgccagggaagatgggctggccctgtaaagtatgagcgaacctgttcgtcgctcaaacccatgtctgtccatactttgtaccaaatggattcttgtccggtaatagcaagaggcatggtgactccgtttaatgccatccagtctatcagtcgttcccagtcctgccatttccaatagggcatagtataaccgaatgtacaatagttgagaaaaaaacgattgtcacatttggaacggatatatactggctgaggtatctccggtagtacatcaggcatttccactgtctctgaggcataccaggaaacatgggtatgacagtagtttttcagataatgattcaaaccggcagccaatgagttacgattgtttccttttatccgtattttcccttgactcgattccagtataaaacggtctgtatcaatagaatctgtcagtaactcgaatagaaacgactgggcatgccggggaaataatctttggcacatttcttttaatacaggagggcctgtttctacattgcgttggcaactgactatcaaaaatagcaggagtaagtataggtatttatgattcatagaatggcgatgattaaactgtttatactaatgtgaactccggatggggcggctgatgacaaaattgcagaactcatgatagagttgggtatcggctgcgttccctgatttttttagtgtaagtagggatgcacttccctgataataggcaaggcgttttttctcccatatgccatgtttcttgaatgcactcatatagtttttcaaacgataagcctttcctctgctattcagagcattgtcatcaaattccagttccatgtgcatatcatacgtgagtgctttctggcaggcatcttccagacgagaatcggggacggattcgttgaagaaataattaggctggaaataagcataattaaatcctagtgatttccactgattatatccatctgctccataataggggatccagttgaaactatattttagtttattcaggtagatggcaaccgcatttaaaatgtcacgggtgtcggtcgctttctcggcaagccaataaaatcccgctaattctacatgttgatagttcttttcattgaacttggcacgtacctgatcgatataccatttgcaggctttaattcggtcggcagagttggaaaagtcaagcgtctggttatcaattttcccccaatacttggttgatgaggatgcttgttccgggtgttggtagacaatgggctctggtatactgatcacaatctgacgtttctgccgtggggttcccaaaatggcagaggcctctttgactgatgcatctaatgctccgattcctgtttcagattggaagtaatagtctataagtttcgtccagtctgcttgattggctgattccagattgtaccctttggcgaacattttattagcgcctcctgtacctgtgtccataatttccaaaaagaggaagctgtcgaatagccagtgggattgattgtcggtatctacatatctgatataagaacttacacgttctttatcccatgtatagggagtgcgatgatgtcctccgccataaagtaacaccatatctgtagatgtcagtaactcggtgcggttcttttcccaatcatagaattctacgactggatcgtttatttccggatcattcccggatgggagggtagggaccgtgtggtcttcgtcttggcaagcagcaagaccactacctatacaacagagaaagagaataaatagaatacgtttcatatttgcttttattttataggtgttattttaattagggagacaccgtggtaggggatggaagtttcataactaccactgaatattcctaagtttttttgtctccataagtctctgattttgactttaccttggatgcccaactgattaagggcaaagttaaagttatatttttgttgctggatatttactgctttatcctgatcccataaaatgaagtagggatccatctggaagaagccgagtgcataggaaccatcgtataactttttataccatatttgtccgttgggaactgtgagcttagtagcaggggctaccagtgggtcctgattgactgcaatcacttccggattggtcagaagacctaacgtgaaatcgtctatggcagtcatgtcacaaccaagcaataatggggcggaaaggatggaccatagggagatatgtgcatattgttcgtcagcggttaagtccgaatcgtgggattttgcaccccatcccggtcctaatttgcctactaccaacatatccggatcgttatattttccaggtgctgatacgtatgcgcaaacatcctggaaacatccgattgccattacaatattccattggtcgttgatatcacgggttgttcgccacaaattacctccggcttccgctccccagttccatacattgggagctccgtatccgacacaatatacgatatcccgttttatctgatctaaagcgttgcgcatgacgataaatggttcttgaatcgttttctcttccgagttcttctcaatggcagcataaccgcaataatcgtatttcaaatagtctactccccacttttcccaagtttttgcatctgtcaattcgtgctgacagctgcctatatgcctgccgcaggtcgtccaacctggtgaagagtagattccgaatttcagccctaacgagtgaatgtagtcagtaagtgtcttaaagtccggaaatttttcgttagccgggagttcaccttcgggtgtacgttcatcggcttcccatccgtcatctatgttcacataagtccatccgtaggcctgaagcttttcgtgcatgattcgggcagcatcacgtaccttttggtcatcagctgcaaatcgccagcagttccagctattccagcccataggaggagtaagcataatctcgctacctattttcagtgtgatctccttttcatctgttcctttctcatttgtcgcttgtaggcggaccttaaagttaccatttgtattcgtgcttccggtgatgagtcctgttttccggtttaactttaatcctttcggaagtcctttggctttataggtcataggtcgtttgccgctaaccataattggcatgagaaaaggattgccgggacgagcgccataagtcagtgggttattgatttgtggagcgtccggactttgtggagtcaatatgtatttttctttggcaatgggcttgggccatacaggaatgggctgtacgtcaccgagagttgtgaatttgacattcagccaatcagcgcggtcgtacatcattccatctccgcattcctctaccaataataaaactttgtctattcctgataaatcgatattgaaaggtttggcaggatctccttttctcataattccgcttctccatagttctttccgatctcctaatatcttgaactgaagattacaagcaaatggggtattgtcatctgcacctgctaatccggaaagcgtcttggctttttttccgatatcaaagagcatacggctgattgcatgagttcctatgccgcgttcatagacgatgcctttcacagtcaatggcgtcatagtgactgctttgttgattcgggggagtccccaatcctgtatgtaataagaactttcgcctaactcgtccagccaaatttcttttacttcttctgcctggcatttccaactaatcgttagtataaccaataacattatctgcttaatgtactgcatagtaaattatttttttaatactttctttataaccggacaaacaaggtctgcatatctcatcattcctaagtctgtgaaatgaataccgtctactgttgcttctccatcttctccaagcatcttttcggaagaaattatgtatatattcttttcaccttttgtttttagagatttgaagacactgttgacggctttattctttttgtttatttcgatagctattttcttgtcgaacagagcatgagtgaatacggggtcctcaataaatataatcggagtgcgtggatgcttatcccgaagtatgcgatagaaggtttccatcttctcatatatctgatcggaggaagcattagggacgaagtctagtacatacactcctgcatctactgaggacattacttcggctatttcgtagtctaaaagtgcatttccactgaatcccaaattgacgatttctcgattgagacggcgggaaataatattggtatgtgccatcccaggacgattggcacagccaccttgaagaatgcttgttccataaaaaacgattggtttagtccgtactggaattgccgttcgaggtactgatatagatgcttctgcgtctattccgatggacaatgaaattactccatcataaagaggtaaatatagcatatattctcgctcgaccggttccatatttgctataattgtagcttgattcacttttccggtggggcgcccactattcacaaatctccatgctccgtctacccatgtgtatagatcgagtcctttagtaccggtaggtgtcatatgattcatcaggttattattcaaattctcccatttggtggctattgttgttgaattggagcaaaatctgattgctaatcctgcggagtttctgcttaaattccataccggtttacgagagacatgctttaatgaatccggcaatcgttcgtagcgattttctgtattctttgtggctttaccatacaatggaaacttggcagcatcataatattttaattgagcttccagatattccggcaagcacaagaatgtaatgagcaaaatgatgatatgtcttttcataataaatggttgtttataaaagcaatgcaatatacataaaaagaaacttactatgtatattgctatagcttttatgaatatccggattgggctaatttttcttgaagaatccaattgtagaaacgactgcccggtttcctccggtcatgtcattcaagtgttcgcctcctacaaccattccggtagaacctccgccatcaagattaatagctcctacacagcctaatcctttcattatttgtgccagttctgttaaagtagctccaccactggcggtaatacgtccgtcacatatgaatatgaccacttttccatcttcacgataaccgattgctgtacggtccggggttacattcgctccgaaaatgtcatacggaatgatttcatagttactgagatagtaatctgtgccctttgatgtctctgtaaaatcgaatgggatttttttgtctttcagtaatacaggacctgcacttaaagcatatttaggactccagctaattgcggtagtcggattttcattagtgacaattccatatttattttctcctttgacagatggcaaaggacggtcgaaatagaaaacattgctggaggcatccgttcctgtccaaacaacattcggcttgcctgaagcatctacgccgaatgttcctcttgtcacattatacatactgttgtattctgtatcgccagtttttagtgacccccgaacggctgaaacagagcccgatttaatggaattgataacagctattcctgtatggtttccattatagaagtatcctccattgaccaataaataacagtctccattgaatgacgcagattgcgtgtcgatggttgcgggagaagatggtatgtggacacgtacttctaccttaccggtagagagatcaccaatggcgtaccatgcatggaaattactaccatttaagttactggtggtttcgtacagttcgatttctgctggcaatgtagacttagtcagtttattccatgtcaattggatcgcttgtggctctgtttccaaggaaacagtcgactctgcactgtaataagtaccggtagaggttgtcaggaaggcacgtactttataggatttgccatagtcgagtaaggtattcggaatcacttgaaatacttttccgtcttcagcaacttccggtccgttttgcttttgatcattgatagtgggtgtgttttcggtactccagcataaaccatattttacgttggtttgtccagctatgtttgtcacttgataagaggaactgatacaagttgagtttgctttgatacttcctatgattgcgatgcttggctcgtcaccgagggctaccaaccgatagagctcgtaaatggcacgtgaagtattcgtagccgagaatgctcttactccgaaatagtatatgtttccttcttccagaccattttcgattgtatattctgtgacatttgcggataccttggctatttctatattttcactggtatctgcttttcttaataagatgctgaatccggtttcattattactattgtctttccaacgtagtaatactttggtttttcccattctttctatggttatgtctgaaggtgcttgtacgcttgcagactgttcgtcgccgtcattgtcacttgagcaggctccgaaggcacatgttaataatattgctataaatataatctgtttcattttactgtactatttattgtttgattacaaagactgtttatttgctgattctgatcgcatcaagtgctttaacggttatttgttttttattaggcagtgtaaccttgtgttcttgttcactcatgtttactataaggtatacgtgttcgcctgatacactagcccattctgccgctaatactaccggagttatttcatagttgggtatctcttgcgttgggttatcaccagttggaattatttcctgtataaaacggcctcccaagaataaatcatgttgttgacggcggaaatctgtcagatttttcagaaatttagcttcccttttcgcatctgggcgcatcaacagactgggctctacccatcctaactgagaaccccataacagactacgcatactcatgaaattcaaagaaccgtctgtgatacgccaagggatgtaggtgtatccgctatagatgcaacggtcagaataaatgagcggaaacaacggaaccatttttgtatagctgttgtgcggagaattgacaactaacatcatgtcaaacaggtcaatatagcactctgcattttcttctgttgtcatggcttggttctctttgtatagatttgtgcgcatttcggtgagtaaactgcggtaggcaaaaggccaccaatcaccaccgccaggtgcatgtccgtggttggttgcatagcagggttcgctgttggcgcaacctatctgatccatatatacaccgttcgtttttagttcagttaatatctgtttgttgactcctttcagcacatctctccaaatataagaagctgggcaggttacagtatttaatacctttgagctatatacttctgtatataatgtaccatcagctttgcgacaagaggcatctttaccattaagcgttttatagctgtctgttgctggatcccatagacgaccgttaatatatggagtaataaatcctccaagttcctgtgtttctttaatcatttctttgaatcctgctttttcgggaaagtattccggatatttagtatcgaaacgatgattgtgccaataataccaatgcaatccgactccttttccatagtatttcatcgctttacgtactgcttccattgtttcagcatttacttctcccggccgtagccacatatcagcgtttttgatccattctgctataggacgttctgaaatagtttttgcaccccacagtgtttcgaaagtaaatggacgataccattgtactgcagcgtcctgccatcccttttgggtaaatcccatcactgtttcccaaggaatgcagaacttcttgttttgagtccaggcataggatgttgtcacattctgaataaatacaagactttttccttcacttttcattctgaatactttgccagatccccctttgtcttgtgcggcaaagtagactgtgcctcctttatgatgcatcagtactaactgcattgtgcctgtacacgaaggataacgtgattgcagttgtccttcattaccgattgtgtattcggtcccgaatccgacaggaagaattccttttgctccttccggtctgtttacagcaatacggggaaattcagattctgtaatcacccatccttccggcatttctgcttcaatgcgccattccggtagttcggcatctttacctaatgtgactaatatgcgtaccggacacgtcggtcctgcatctataaccatttgccaggtgaatattaatgttgaggcatcttgagttttttgtatctcgcctcctttatattcgccccatcggggcattaaggtcgggttctctccgttgggcccccgatagattagttgccacggatgtgttgtacttccatttacaggcaatatattcatgccatccatgcggaattccttgaataagaattcttttccgttggcaaacactaattcaacattcttgttttttaatacaaagtttccattttcatttttagcagtcactgaggctgataaagttccaaaacattgtaaatagcataatatgctaataatactggttatcatatttctcatatacaaaagattaggatgaataatttctatttaataatttcgatgctttttctgaataattttattacttcctcttgtggaagagcggtttccaatatgagacgccctgctgcggggaggatacttttgcttcctgctgaccggataggtattcttttaccactctcattcatcaaagacagcttgtttttttctatatcaagagtgagttgccctgtaccgttcatatgccaataaatgatacaagtccttcctgctttctggaaaatgaatgcccggattggcttttcgtcatccttggttatttgacgataggggtataactgataatttccttttttatctttcatcagaagatattcttgttcgggatttttgagtaattctttctgtttgtctgtcaggacaccttgaagttttgcttcttcccacattttgataactctcaggttatcttccgtacgaggatgattctgtaactcttttaaattgccaactaatgatatgggagaattccatgcgacagctttgctgcaaatatattcatacatgtctggttgcatgcctattgtcttgtcgttgggagccaagtaattcacccatccgaaattgacagaagtaaaatctttggctatctgctctgcacatcgaagtgtatacttcttcattgccggacggatacgttccggagggaatatatcgaaagcattcccacgacttaaaatatgccatccataatgtgatttcaatgctccttctgcaaataatggagttggtttcatttcgttgtatactatcatctgagagcgggagacattataccaataaggcatcggtacatcttccgcaccatcaaaatagacaaaacgaaagcctgcttcgtggtagatttttcctaaacgttcggcaatctctttttggattcctgtattttggttgacacggataaacaggggccagtcatctacatccaatagtctgaaatgttgtcctttgccatgtgaggctgcttttgagttaaatactccccgtacacatcccgtaaattgatatggtggttcggtggtatagttctcataagtgacaagctcgttgtcaatttgcaggagacgtcgtcctttctccatacgtacgccttccggattaccttctatagtgatgatagtacttgaatcatctaatggttccgagagaataaattcgcgtacatggttggtgcgggagtccggtatgccgttgttgatatatgggtcattcactgctactttggaataatgaatatgaatgccgggtatcatgcctgctgctttgattttattagtgatttcctgtaaatctttcattccattcggatattcttttctccattcataatgtccgcaagctttggcgaaatcaacataatagacgacaatggatttgaaaccacctttttgagcatatgcaatatgttcatctatatttttagtcgtgacatcacgtagctcataataggagtactgatattctttacgttggcgactttctactcctaaaggcatatgatagtcacgttctactttatcaatacaggttagcagtttttcttttgaagtagtaatcagtgctgcaccggaattgaatagtttcacttgaaaatcaagtcctgcatacatcgtagtatattccttgtttgcaaaagcatcgatataggtggtcggatgggtgcctagcaggcatatggctgtctgttcatcccatgatacattcagccactcaccaaagttctcacgtttacgtactggtaattgtaataatgagatttcatctatttcagttttgcgttttaccccaaaatcttcgatacgataatcaatttgcttcagagtgaaacctatataataatctgtgatatttaactctatgatggcaatgtcataggtatcctgaaattctatacgtaattcatttccgttacgttcaattttattggctgggaaggtgcgtggctttgcaggaaacattaggaagttttcattatcgtaaggacggtattgggtaatagcgcataaaggtacatctgcatttgttatcagacattcctctcccgtagctttgtgtatcaggctgcgtgcttttccgtcattgctaataattagacgcatttccgcgttctctatgaccacatcattgttttctttctgttcattaggcatagctatacaaaattgtggcaacaatgtcgacacaagccagactaataaaaccggatatgtataatatattcttttcatcatttattttatgtttttattaccacttatctgtgcgaaatggtctgaccggcagattgcgtgtattaatcagatttcctttcaggaaattccgaaaacagtaacgaacggcaacgggagatttgactgttggggatttgacaattactgtatgatccttctgatttaaagaggcctctgccggataaaagactttatctgaacctgcaatctcaaatccggagatattcatccaggggcttaatcctttttctgcatgggaaaaggagatttcaattgtctctccgttgattttcatgcttttataagatggatattcggattctattccctgatatccgtatgtcttattcaaggacatatatgcgaggcgttctccaatcccttttttattgtgaggatgcacttgaggagcttcgtatgtctctactaagtcgtttgttccgatcataccactattgggaatgagtgaaagcgccttttgttgagcttcccgcaataatgctcctatgtagccatcttctttatattcacaggcaaatgggactgtctcaacatagtagaaaggcaggtctccttgtttccatattgatcgccaatgttttaccatcgtagctaggcgttcggcgtatgttctgctacttcttacattactttctccttgataccagataaaaccttttattgtatatttgtgacaggggtataaaattccattatacattaacatcgattgtaaatagactggtgtcttgtcacttcctattaaagtcaggtcttcatccttgtaggtttgtagtatttccttaggtagccaaccttctactcttgagcctccccatgcacaggtgataactcctataggaatctgcaaggtccgttgtaaagttaatgcataatgataggcggctgcactaaacttcggagcattttccgtagttggttgctgccagcttccttctgcatactcctgcggagatagttttactgtcggctttatggttaccattcgtattcccggatgattgggagcatctgctatgacattattggagtcgcttatgggacaataatcaaatccgttcaaaggcattaccatatttgattgtccggcacataaccagacttctccgatcaggaggtgctgcaaagtgacagattgctctccatccgtcagtgttaatgtatattcttcgaaactggcagcaggcgttgtgatctgtaattcccaacaccccttttcgtcagcatgggttttgacttccttatttgcccatgaaggagttactacaacagtagaatttggagtcgcttttccccagattcgtacattgcttttttgctgtaagaccatattgtcactaagtagtggaggcaatttgacttttgcctccatattgatgctccacagtacaattattaaaaagtagataagaatcttcatgtagcatttctttttttagtcacggaaatccatttgtattttttctttctttttgatgacaggaccagccggttccggatggtgctgaggattacgataatcaaagtaataaatattcagcttatcaaataaggtgaatgcatcttccatacgtgacaggaacttgtcgtagtctttgactgtcggtgcggaccaagctgattctgccagtgcgcagaggcggggaaagatcatgaaatctacccgatctttagtatgcattagttccgtccatgtattggcctgtatgcctttgacatgtgagaggtcagaggctgacactccccattcggcaaaccatttgtcggggaaagcatatacatcttctattgggcagaatccgtcccagattcgtccccatttgtggtctttatattgtacgaagtcaaaataaagcggtttgcgcggacacatgatagtcgaatatcctttggtcagtgatttgcgcaggtaatcgggtttatcatgcctccaccacataatgatagtattatcttgctttacattcaagtcgagaagttcatcccaaccgactaaagttttacctagtgagtttactacatctgtcattctatgcataaagtagcgttctgcttcctttacagtttgtaacccttcgcgtttcaatagtgcttgtacatgtgggtctgtttcccatgccttgattccgtaagctacttcgtcgcctccgatatgtaaatatggagaagggaataaggcagctatttcttttagtatattagtcagataagtataagtttcttctttgccaacgttaaaagtgaattccggatgttcttccgttcctccgcctgagtattccgggtaagctttattggctgctgtggcatgtccgggcatgtctatttcgggtataatttcaatatgacgttctttggcatatgctatgatatcacggatctgctcttgtgtataatattgtgccggtgtatccggatcactatggcaaccttctcctcctatagttgccagtttagggtattgtttaatttcgattctccatccttgtgcgtctgtcagatgccaatggaagcgattcatcttataatatgccatcaggtcaaggatttgttttacccttttttcgccggaaaagtgacgtgcttcatcaagcatatatcctctccattcataacgcggggcgtcttctatcgttccacatcttagatctccgttggttaactgctgtaatagcgtttgaataccatagaaaactccagctggacttcctcctttgattaggacctgtttgggggcgataatcagctgatagccctctttgttttgcagtctattgtctaatgataagttgattcctttcgcagcttttttgccggggattactttcattttatagtttaaatcagcgagtttcttttcaaggaatgctgcttctttatataaactggcatccagatagtggattttctgacccgatttgagtttacacgtttctgcttgcatggtgacttcagcaggataggggataacccgtacctgttcttgtgcttgcaggctcatgaacaaacttagatagactattgccaaggttgtaagtaatagtttcatgtttcttggttttattagttatttaataataattataggattttctccatgtaaatcctctatggatactgtcgcagtgatggtacgggtctcattagggaacaatgaaatgaagttatcactccaaaataccggatttacgacttcttttgttttttctctttgtatcattaagtggttgaaaaaggataatttatcagagtcattcgttaaagtaagcgtgatctgatactctttttcttgtttttgaagttttaaatcttgctttaatgtaactttaggcatatttaccagccaatagaaattttgatgttgcgagtaacgccaatataagttttcagaaataagatttctgtttaagtcttctaattccagctttatataatatatggcagaaaggtcacctcgttgaggtacggtttctaattctttatattggtcggcgcccacggatatggtatctgtgtatgcccagcattctttcatcgaatagtctatgattctggctttggctataacagatttaagttcttgatgagtagcgtttatcacagaaatccggttcgtatttgcattcatttgaatatgaatgggttccattgctttctttgagaaatagtaagaagcattgggtgacagataccaatcataaatttgccagcagacatcgggccaacaagagtttagtttccagatcattatccctgttgtgatatcccacatccggtggttggctgcctcaaacatggcacgatacccttctgaacttactagctggcctttatatgcataatcctcgctactgactgggtcgctatagaaggttcggattgcattgtcgtatgcacgatagcagaagttattggtgtcccatgctccgtgttccgcccatatactgtctaatggataaatcggatttctccggtcaagtggcttatcaatggtaggtataaactttttcaaactttcgtatacaggtacggaaggcatgcctaattcgtttctgaacatttgcagataaacctcttctactttgtcgaagtagtaatcggagggtgcccagttatagtcgggagcgccatcatcggtagtaccggttggtaagtccggttttaaataaggagttagtttgtctacgtcccaactgatactggtagtcggtatgtaggggcgtgtcgtgtcgaggcttaatacggcttctttggtcggatgatacaattcttcatctaccaacacttcattaactccgaaccatgcaatgatacagggatgattacggtatcttttgaccatgtctttcacgcaagcgatagctaagtcattgttgagaggattatgctggttgtcacgtcccgggaacattcggtagcattgataaaatacatgccagttcatcagtccgtatttatcccagctatctagccaatcttcggaaggggaaggcatatcttcactgccgatcaaagtaatgttggcatttgccattaatcgtgcctggtcataaattcgtttgggtgagtcgtcgagaagtacatccggttgtatccatccccctttacagaagatgcgtttgccattgataaagaatacacgaccatattcttccccgtttttcattaattccgaagttacttcgcgaattccgaagtttaccttctcccgatcggacgatttcccattattcatgtcgaatgataaatcgagactgtgcatatattgctctccatatccgtttgggtaccataagtatgggttctgtatagataagacggaaaacttctggggagataatattatttctttactttcattggggagcattgtgacaggcagagttacgcttatcggtttcatgcttccagccagtttacgtgtgtaactcggataaactaattcgttgataaggcgaattgttgctttaactttaccgcttatcatcttatccgaatgattgtgtacagtcgctttgattgtaatgtcagcaactgttgtatctttttggggtagagtagtgataatatatgggtcttcaatagtgacctggctggttgcttccagggtgacggactgataaatacccatattccggtcacgcactacaggggcgcaatcccaaccacctgtgaattttaatgtttcatctttgaacaaatcggaagccgtaccacggttaggcccaaaggctataaattgtgttccggggttaggagttccgggatggtccacttgatatatttttatagcaatacagttctgtgtgggctggatataatcggttatatcgaatttgaagcggcggaacatgcctactacatcttcttttttccctatttgatgtccattaatccatacgtctgcacgatagttaattccattgaggttcagccatatttttttgtttttatattgcttaggcaaagtgaaggtcgtgcgataccaataaggttcctgccaaggattttttccattgcccaggtaactgtatttagctaagtccatttttttattaaactcatcagagacatcaggaattagaaagttgttcatgccgattctgggatcaggataaacgttctgtttcactaatgcattcaaaacagtagtcggtactgtggcttcataccagtcggtagcttggaatgaaggcatagatactttttccgcattttcgcttatttcggttgtactttttatttcccaattggttaatttcaactggttatctgctttgcttatcaagcaaaacaatagaaacggatagagtataagtaattttttcataacaatttattctacaaacattaaagctgctgcacccataaatccggcattatcttttaaacctgctggctttaactggatgcttgcagcagtttgcggacaaatgtactttttaaataaagataccattgaatcccaaaatatatctgatgaatgcataactgagcctccgataattacgacttccggatcaacgatattaacagtccaggaaagggcataagctaatgcctgggtaaactctttccatgcttttaatgcgttgatgtctccttcccgggctaatttactgatttcttctcctgaaatctttctttttgtaattctctgatataaatttgatattccagttcccgatacataatcttctatcattccttctttgtatggagacagccagatttctccggcacaaccggtagctccacgaataatttttctgtttaccactatagctgctcctaagcctgtgccaagagtgattcctagtattgaatttaggtttcttccggctccccatagggcttctcctaacatcattgcatttgcatcattatccagtttgaccggaagtccgaaagttgattctatttttttgtgtaaagggtaattgtgtaacgttggaaggttattgcattcgagaatgatgcctttgttgatatctaatggaccggtagaaccgatgccgatgccgattaattctgctccatcggcttgttgtatcattcttcggattaatagagtcaattgctcaataatcatttcaccgggttcgtgcgctaaagtccggatagattcggggataccgattatctgtccgttaatatcgacaagtccggcttttattttagtcccgccaatatcgactccaattgcaattttctttggatacacaattctcatagtttattcgattgatgttattttggcaccatgtgtaaattctcctggtattattccgcatttggttgcccatgtatttataagaagttgtacaggaactatacaggggattgtaaataactcagcattagtgcttgggatagtaatggcacataaattatcattttcaaacactaagtttgaatcggtgataaagataacttttccttcatatttaaggatatcttttactaaagatagtgattgttcgtaggtttctgattgcgagtgtgcaaatagaatggctatgaatcctttctttaccatttctaacgggccatgcctgaattcaccacctaataaagctgatgcaggcgtatgcgctgcttccatgaacatcaatgcactctggctggcagctgcaaaaactggtccccgtcctattaattgcacaaaagtggagccgtctatcagttcaatagctttcgacatccatggagtatttccattgaccatgttctcaataattttactgagtttatgccattgggtgctgtcgatttcttgattgcataacttcattgccagtaaatatgctacttgataacaggttatgaatgtttttgttgacgttttttcttcctttccagctttgcacaataggctatagcgagagaatttgactaaactgctatctttttcattacaaatagaaagaactgtgatgtttgaagataacttttctattagtttgattacttcatagctttctcctgattgcgaaatacatataatcaacgattctggactaattaatgaaatttgataatgcaataattctcctgcgttcagagcatatgccgggattttatatgaattaagtagagaagcagttgcgttagcgatgaagtaagaactgcccataccggttaacagaatatttctatatttgccggaacaccataattctgaaatttgtgacaaaacggattttccttctacgcttttgtagaagtttgccgtctgcagaagtgcttgcggttgctcttgtatttcttggaaaaattgtaccatcggatttttttaattataatctagtgactttaataactacttagcaacagttgtgcaattattcatatgtaattgccaactgttactgagtagtttatagatgatcttaaatgatatttaaattttcatttataaattgaatctggtaatttcataagcaaatagtccctgatccgtagtcaacatatagacctgaacggcattgccatcagcacttcgaccgaatacaacatctcctgtttcatcaacgttggtaccaagtacctgtttgccagaaacgaacgaggctgaagatgtcataccagttaccgcataccccgttccggggatactgcctgttcctgttgtacttccttcacgtgaatcgaagataaagccattagccattgctgaagttccgggattattcgtgatgttggatacatataggcggtgggaccaaaccccattgcttgacagaccattttgaacgcctaacaaacatgtaccgttaaattcaacatatcctattccccggacattcttatcatatgtagcgctaccggaccaccaatgtgatgttggaagtgagaaatctatggcgcgtgcgcctgtgcctataggagtgtaattaattgcttgccggaagttggcactggcccaaatatatcctagtggagaagtatttgtcaatggaatgactttagttgcgttccacatggagactgatgctcctccgccccattctacataagcgttgccttgcattgcaccatctttgaacataaggaaaaccgcacgtggtacatttttggttgatgtggcaataattgcatcccctgaagtcagatcacctttgacgcagattgtgcgtccaagctctagttttttgactccattaatgcctacaggagcattggcgaatgtactcccattaatatttgcataaacgatgctcttaggtgcattctcgatgccgttaggccaaacccaggcacgtacgtttgggtcggtaacattggcgtctaaagtactagtgtatgccatagctactaaatgtccagcatcatcactggtaatagcatggatggagcggcctgcatcaatacctgtagtgttgacttttacatcaagtactttgccgttataacgatccattacaatcattttattgtaatcagtgctattactgataattagatagtcgtcaataacagccattgtacggttcgctccaacctcaaatccatgtgtgtcatctgtatagatttggaaaccaaataatgaagctgtatagcccactccctgaggtaatagatccgggagttccagactagtctgatagactgttttgtctgttccattttgtgcaataacggttatagtcggttggttacttaaatctataatgccggttgccggatccaatgatgatgattcgatagtagcccatggagagactgttaatgccgcagacttcaaggctgcatcaatagctgaagaggttttatagatgatgatttttcctgtaccacccgtactctcaggttcgacgatacgtattgttgcacgtgaatagtctgtcagttctactttactaatactggctaattttgatttcacataagcagccttaaatgtataagtaattttgcttccatcttctttgactaatgttgattggaaaccactgaccagatcacgaatgccggaaatgctgggggagaattttgctcctacaggcaggctggctgaaactttcatttgtgtcaggtcaccttgtattttttccgtatctgaaatataataaggaacttgtatggtaattgtattacttgcctcgtctacgatagcactatatgtggtactttcatcagaagctaagcatccggttatggttagtcctgtaacattttcgctgcctgtccttgccagatcgtccgggtcctcgcagctcatgaaggctagcattgatattagtaccccggtgaatagatattttattttcataatttttctcttattaaataattattatttccacagttcattttgttcacagagtgtgttgtcttgaagttctgtgtatggaatagggaaaattgtatatttttcagggaataaacggtcttgtgtatcgcattctactcgtgcgtaactgaaactgccaccggcctgtgttatcttaacgccgtgcagacgtttatgatcaagtgttcttacggcgattccccaacggatcaggtcgaaatatcggtgtccttccattccaagttcacaaatacgttctttagacagatcttccagataatcactccaattattttgttgggcgagttccggcagtccgacgcggtcacggatcgttttcagatcagcataggcttttccaaactcgttttgtcgtgcatatgcttccgaacgaatcaagtaaatttcagctaaacgcatttctatccagtattgtccactcaaaatgctgctaaagttgatattggtatcatcagaagcgaacttacgaatcagataacctgttgttgatttgtgcacattatcttgtccggttgtagcaaaatccatatatccgtcatttccatctacatacaactggagagtacgtcctttccatgttgctccattataaagaatggaggcgtaaaaacgtggttcgcgattggtaaatggagcattgttgtaggaactgagattactccagtcaaaagattggtagctaccgtttactttgatatcgaaagaggaagcgtattcatcagatggagtgactgccgcacctacacttccttctgtaacaccggctgctttccagtcgtatggtggacacacgtagatgtcaaaagaatgttgcttggcgttctttccctgttggaagtaaaccggaaggattagctcactattattgactgaggtgaatattttgtagtaatcattggcagtcgttccttgcaataaactgtaattcaattttaatacttcattacaggcatctatcgcatccccccagcgtttagcataaagggccgcacgtgctttcattccgtaagcggctcctttggtaatacgccccacattggtacctgtccagttttccggaaggtcttgtactgcctgggtgtattcgttgataatgaaatcccagcaatctgattcagatgaacgtgctttagctctttcgtcaggtccgtctacataatcttcatcagtacgcaggataactccgccatgacggagcaccagttcctggtaagcaaatgcacgtaagaaacgaacctctgctgtacgctttttcatttcatcctgatctaagttatctccataacctttgcttcggtcatagaaatattcgttgagttgacggatacgggtatacataccactccagttggagcggaagttgctcgtttcggtgacataattcgtctgataaaagaatttattcatggcacctccgttcactccataccaagagtattttaacagatctgtagctccatcgtccattaagcagtaagaatctatattgatagtagcattatcatatagcacgctatatagccctttgacgtaaaggtctacattttccagtgaggaatatgctacattctcgctgtaccagccagtaggatctacgtccagtacatcacattgtgtcaagcaaatgctagctgctatgcctataatgtatttttttatatttttcatattaactatttgttttaaaatctaacatctataccaaaactgaatgtacgttgttgtggataatatcctgttgctacatttgtactttctgggtcgatatacttgaaatcggtaaatgtcagtaggttagtcccgttagcataaactctgatgtttgacaatcccatcttgttggtccaggctttaggaagcgtataccctaaagtcacgttcttcaaacgtaaatacgcaccatttcttttccagaaatccgattgttgggcattgtttgaatgagatacactgctgacagtcaggcgaggatattccgcatttgtatgatcgggtcgccaactgttttctaccagataaagaggagcgttgtcccaatttgcataccagggtcttgtcataggggtcatatctgttgcgccatttaagtcttgccatgagtattgaagcattttatcacaaagtgccgctccttgaaactgaacagataaatcgaagcctttgtaattagcgtcagccattagtgcaaacatcatttccgggcggatgccacgtgatattttgattcggtcgttggaatcgatctttccatcgccgttaatatcggcatatttaatgtctcctactcgtggtgtattccatgatacttgaggtgaattggcaatctcttcttcactctgatacaaccctaatgcttttaatccccataattcaccgactgatgatccgagaacactttgccagggtaatgtgttatccgcctgtgttctgcttaagatacggttatgagcgtaagataagttgccattcaaactataactgaattctcctatacgattgcgatgtttcagtgcaatttcaaatccgcggttatcaaatgttcctgtattttcagaacttgggtagtgtccacctaaagaaggaggatagatattactaacactttgaagaatgtcgtatgtatatttgtagaatacatcaaactcaactcccaacaaaccgttccaggcactaagatcgaaacctaagttatatgattttgttttttcccaagtcagtcgttcatttggataagctactgtgttgctaagtgttccttgagtgttaggtgtactgccaaatactactccattattagtataagagtaggattttctgtacaagaaagcactaacgttgtcgctacctagaataccaaacgaacctctgagtttaaaatagtctattttaggaagtgcgtctttgaaaaagtcttcttccgacatcacccatcctaaagaaactgaagggaagaatccccaacggtgtcctttggcaaacttataagaaccgtcgtaacggaaagatgcttcggccaggtatttattggcgtaggcataatttagacgacctacataagcggcgtaagcacttttcccagaagaaccgctattagttgcagtttgggcatctcccaaagatatttcgggtaaatcgaataagtcgtaatccgtacgactagcattcagtgcagagctttttacctgagtttgttcgtagaggaaaagggctcctacatcatgaagtccgaatttgttgttatatgaaatagtcggacgtaatattacttgttgtgatttttggtcaccctgatataggttaccatctgccagcagatttgcactttgtacatagctgtagcttttggtggaagaatcataggcattgacagaatatgcataagcaaatgttttacttgccaggtcttgccagtcccaactgatgaacatatttgctttcaaacctttcaggaatggggctgtatattcgacatttgcggaactttctattctgactgtgcgagattcctggaatcctgaatttgcagatccatagatcggattggctgcgctggttgcgcctcggtatgccgaagtaggataaccttcatactctttcggaacaaaaggtatagagtaaagcaactgatggaaaatactataggcttgctgattgccataagagtatcctcccggctgataataatctttgattaatgctgcggtatttagtgacactttaatgtctttggtcgcttgtacatcaatatttgaacggaaattgctgcgttcgtttttgttgcctttaataataccatcttgatgtaaatagccgccgctgatgaaatatctgaccttattgctacctccgtttatagacagattgtgttggtgcataagggtagtcttatataagtcggaggtccagtctgtattttcaaatccatcggtagggtctccgttataagttgccgcaatttcttcgtcggtaaaatatggattatctacgccattattgtctagtttgcgagccagattataccattgcatatattgggttccgttcatcattttaggcagagtggtagcgtgcgatagagtcatactgcctctgtaggtgatatctgttttaccttcttgcccatgtttggttgttaccagcacaactccgttggctgccttcataccataaacggcacaagatgcagcgtcttttaggatggtaacagactccacgtcattcgggtctacttgtcccatagctcgttctactccatcaactaaaacaagtaccgtacctgaaccgctgaatgaagaataaccacggattaatatggaaacatcatccgatcctggttgtccgagtgattgttgggtaataaggccgggcaacttaccgactaatgtttgtgacatattactggcagttgttttcaacatatctttttgagataccgtggctacagatccggttaagtgagctttcttttgtgttccataacctactactacaacttcgttcaaattagcgacatcttcttttaagatgatgttgatcgtactgcgtccgttcacttttatctcttgtttgttcataccgatgtatgagaattcaagagtggcagtgttggatgcattgatagagtatctaccgtcaatatcggtagtggtacctgtggtcgtacctttgacaacgacgctgactcctggcaacggatcaccggtcacgtctgtgacgactcccctaaccatgttctgggcatagccatttgtggcatacgcaaaaagcatcgacaatgagaatagtatgattctgattgttcggaaactacttttttgcttaaagcattgttccatcataagataaaatttaattggttaataaaaaagtttttgggtattagatttattgtaattcttctagtactttccagcattgatataagcccctggggacatggaaacagcctttccatttgcctcctttaagtggcagaagtacttctccctggcggtttaagtaaccgaaccattcaggatattgagcatctttgaagtgcgtccatacatactcatgtattttctcgaaccactccatacattgtttgtcacctgtcaattggtaaccttttagtagggaaataagtgtttcaatgtgtacccaccaaagtttttggtcccattccagttgttggggagggcaacctttgcggtccataaaatagtagatgccaccatattctttgtcccatccgtagttaatcatcgtcaaggttacattttttgccttttcgattagatcagggcgattcaggcgttttcctaaatccataataaaccacatggcttcgatgtcgtgtccgggagtcacttgccgtccttcaaaacagtctacgagattgccgtccactcctatattttcaacaataattcctcctagctccgggcgatagaacacttccatcacttcatggatacaagtctctattgttttttccagatactctttgtccaacaggtgttctatttcaagtgccagattacaaaggatcatcgggagggcgaaatttttcagattacgtgtgcccggatggattttgttccatttacctttcggattatctgcctttgagagaataatatcgaacgttttctttgcaatgtcagcatattcctgattgcctgtagccagactgagttgcccgaaagccattgtagcaaatgtataggaaaagatgttgtatggttctaccagaggattacctgcccgatccaaagaaaaataccaatgatagtttccatcatgtccgtatttttttagaaattcaccgccttgaatagcgcaatccagccattcctgttttttctcaactttattgtaaagcattgagaataaccaaacttcgcgtccttgcagccaaataaatttatctgtatcgaatacgttgccttcacgatccagacaagtgaaatagccaccgaattcgtgatcctgagaatgctctaaccagaatggaagaacattattcagtagttcgtctttgtattggtttgctaatttttttaaatccataattgttagttttttatttaataaggtctattttaccgttccgaacgggtccagtatctttcaatctcctccagagactttccggtagtttccggtacgagtttccagacaatgagcatatacggtacacacatgatggcgaacaggaagaatgttccggctggagtaagattctggagcatccagggggttagctgtccgatcagataggtaccgatccaaagagcgaatccggcaatggacattgctaatccgcgtattttggtagggtacatctcagagagaagtacgaatatcacagcgcaaatggaaatggcgcaacaaaaaacataacacagaaagaaggctaacagaaacaggctggaaatattccaggcatttccgaagaggaaataactgccaatgagtatcaatgaaacgaccattccggataccccataatatatcagtttcttgcgtcctactttgtcaatgatgagaagtgccaggatagtggtcagtgtattcacaagtcctacaagaacctgatagaacagagaatcccctcctgaaagaccggcattctcaaaaatggaaggcccgtagtaaagaactgcattaacccccatgaactgtcccagaatagcaatacatacaccgataatgactgctttcagaatacctggtttcagaaggatagaccattctgaacgggtctcggaaacaaggacggattttgtctcgtttagctggaaatcagcctctttaaatgaattgtagatcttttccagaatataagtggctttcctttcttgtccttttactatcagccatctggggctttcgggtatgaaaaagataataataaagaatattacggctggtaatgtctccatgcctaacatacctctccacacttctgtaactactattttttctaaccaggcgataggtaagtggtttccactctctgaatatgccaataactggtagttgacaagataagctcctagaaaaccgacagttacggccagttgatacagggagaccatcctgcctctgaattgtgcgacggaaacttcggaaatgtaaagaggagatacaatagaaacaacaccaattccgatgccacctatgattctataaacaactaactggttaaagtcaatgcaaaaagcacagccgattgctgatgtagaaaacagaatggcagaaagtatcattgttcttttacgtccgatgctgtcgctcaatattccggaaaagagaacaccgacaatcgatccgatcaatgcgcatcctacataccatccttgttgcaaggtgtccaactgaaacagatgtgtcacctgagctattgtgccggatatgacagctgtgtcataaccgaacagaaagcctcctaaagcagcaacgactgaaaggaatatgatataacccagattaattgttgttttcatatagtttatttgatttcaaagtattctctgtatctgtcatataaatgtcctgcctgcagataagctgattgcggacttaaaaagtgagaaaactcaaaagtgattgctttatcatatccggcacgttttgccgcttccagtttcatgcggagtttgtcgaatttgatcggcaggaaccggatgggcatatcgcggtcgaatgtttccgcgtttgtccaacattgcattccgtatttgtctgccagtttcttgtttacagtgaaaaaagcatccagttcgtcgtagtcgatgtgtccgtcttgaaacgcacaagcgtctactacatcgtgtatgccatcaaaaatttcattccattctctctcatgttgttctacggatacagcatcctctcttgtcatttttccggttcccatgactgcctttttaccatcaatccaaggggatataaaagtagggagcccattagatacatctttacattgtttccccattgtatgaaatgcgccgatagctcctttggtattgcggctgatttccgtgctaatataccagcctccgaagcttttatacttctcgccgtaagtattccatacttcgtcaatcacatatttattatattccacttcccacgacatatcacgtgtatcccaataatgaccggtgtcatacagtccaaaataaaacttcatgttatatttttcagccagtcgtaagtacatatctactaaatccacggaaggcatatagcatccttttcctaatagatatttggacggataagtgatgaacttgcgatatccggaacggatcataataacggtatcgataccaatccttttcatgtgctgaaagtcgagatcccattctttttctccccagttctggtgtggaatatcgtgagatatttcatccagaaaagtgcctgtgattttcagaccattatttttcggtacaattaatttgctgtccgtccttttgctcggagagagaacgaattcacttccatctttgccttcagcggccagtagtgtgggagccattagggcggaggctcccgctaatgcggctttctttaagaaatctctgcgattattcgcttccatagtttactttttttagtttctactctttttagtatatatttgacctattgaatttttaatagtttaatatttattactaactcggaatcatctgctagctttattaattcctttgagctagcacttttaatttattaattatgaatttattattgtgttatttattaattgggcgataatttatgattagttttattaatatggcattaatattgccccattcgcagatggggcattttatgttttctagtgtatatttttcataggctaatcattttagtcaagtaatttaggttacttggatgaattgatagaacaaagttaggcatccagagttgattttttgcgcaaaaaaacgaaaaagtgtattcaaaaaacgcatctttctactctttggtagatttatttgctgaatgcaagtaccatttaaaaaaatcatatataatttcgtttgattcaggggttgggtcatgattgactctgttgctcatcgcgacattattacggtatcctaagagccggttgaccgctattgtatggtttagcgctatccaccggtctgttccgtcagagtatcctccggaaacaagaaatgggcgaggtgccatcagcgtatgcaattcatgcaaatcatatccttctttgcggagcttcggataaatgcctttagcataatcatgcccatttttactccatgtattttcccatggtggcggataatatcccaaataccagggttcccagtaattgatatatccctcttttgtttcgtcgaatacaattccggggtctccccatgccgcacaagcgaacttttcgtataggcatgaggcaaacattgcccacttcccaccataagaatgccctgtgatgcctattcttgtagaatcgacgtcctgtactttggctaatacttcccatgcatttgcggctgcataagctaatgctgaaagtggttggagagttgcattttcaatggtggggtaataaatggaatatgtctgattctctgtggtcttcgttgttcctattgataatgtgacaaatcctcttttcgtcaattgatatgcaaagtctctataaggttttccacccaatccgatagccgtttcgggttcataaaatgtagtgataacggcaggctttttgccttctttgtccggaaccagcaaataaccttcagtctgttcgttgggagtccagtagaagcggacacggtattgcatgaagttttcacggtggagagtatccagaatttcaaatgtttgtccggtaatgacaggcggccattgtcctaacaggctcatccatctgtccttgatttcagttcgtcgtctttgccagtcttcaacggttctgactgtatccccattataatataataaaggagagcgaaaattcccatatacattttcgtattctgcgggcgggcggaagtagctcgataacttattccatagatcagaggagtcattgtttccgctatttttgtttccgctgcatcctgctagaaatgctgccagatgaacgatcaggatgaatagcacgattttcttttgctccataagttgttgattgactttaagagttaacatttaccgaacaaagatatgccactttagtaatgcctccggtactaaaaacgaaaagctatattcgaaaaacgaataatttattttttatctgttcgtgatttttttctcccgatattccaaaggggaacatcctttgaactttttgaaaatccgggagatattattatagtctttgaatccggcttccgttgcaatgtctgccaatgaacgatctgtagtaagaagtaaatcggccagatggttgacccggcagtttaagatatactgatagatggaagtatgcatcgcatttttgaatttcacttcaaaatttctgcgtgagagcggaatctgtgccagcaaagactctatggtcaggtcggaattgtaatgactctctatgtattttacaacttcgagaatgtaagggtcctttatattatgcttttctgtggattgccgcaattctatgcggatagggttgatgacgatattgaaggtcccttcatgttcctttttgatttgttgatgaatgagcctgcctatagaatatcctcctctttctacttccagttctatggaggagatgggaggatcggaaatattgcagatcaagtcatcattgtcgactcctaacagggagatttcttccggtatgtgtatgttacttatcttgcaggtttccgaaatgaatagtgcgtgtgagtcgtcgcagcagaacaacgctatgggtttaggaagctcttgcagccattggcttacttctattctgatttcgtcttcatgcttatcggattcgaaacaataaaagttgccgcctatccgtttaacttcctgacggaagccttcgcaacgttcgtcagaccagacaaccccgtttatgccgaaataagcaaagttgtggaacatccgcttggcgaagaattgggcggccattctgcccgttcctttgtagtcgcccgtcagattggagtaagtagtgcttctatggtggtaattctgcaatacgatcggaatattcagttctttcagtagattgacggtgtcattgttccattgtccgatgatggcgtcagctttccattctttagcccatttgagaatacctttttctccatacatgccgctgtaataggatggaagccgatagaaaagccaaggtccgttttctttggaatattgtacaagtccgcggagcaattttctgtcgaattcactggaataatcgatcagcagtagtatttttatcatagtgtgtgcgggtatattaaagtttatggaaacaaatatataaatattagtttgttttctttctataatagtctaactttgttgcgaagaagatatgtatgacacccgggtctcgtgctgtacgacacccgggtgttgtgatgtctgacatccgggtgtcatacgtgctgacacccgggtgtggtacagaatgaaaatataaacgaaacaagaaaggagtaataagacatggcaatcccttatgtagtaagaaagaaagcggacttgacgtccggagaaagaaaagagttatggtatggtgtaccaagtaaaatacaggatagaggtggagtacagaacaaagaactagcccaagtggtggagatgcggggaggcttccatcgtggtcaggttgaaggcatattggtggaagtggcggatgccatccgctatttgctttctatggggcagtctgtgacgattgatgggctgggtacattccaaacggctctgaccagtcctggctttgaacgtcccgaacaagtgacaccgggacaagtatcggtatcccgcgtttattttgtggcaaacagcgtactccgtgaccgcatgaagaaaacaaagtgtatgcgcatcccttttaaatattatatgcccgaaagtatgttgactaaagagatgaagaaagcagatcaggagcaggaacaaacagaagaataagataaattaataccctccctgtcttatttatgagataaatgcctatctttgtggcactttttacgaaaaaaggtaattcaaattaatagatatagaaaagaaaatggcacaagaagacgtttttaagaaacttgtatcgcactgtaaagagtacggcttcgtatttccttcaagcgatatctacgacggactaggcgcagtatatgactacggtcagatgggcgttgaattgaaaaacaacattaaaaaatattggtgggacagcatggtgctgttgcacgaaaacattgttggtatcgactctgccatctttatgcaccctaccatctggaaggcttccggacacgtggacgcattcaatgaccctttgattgacaataaagattctaaaaaacgttatcgtgctgacgtattgatcgaagatcagttggcaaagtatgacgataaaatcaataaagaagtagcaaaagctgccaagaagtttggtgactcattcgatgaggctcaattccgttctaccaacggacgtgtgttggaacatcaggctaagcgtgatgcacttcacactcgtttctcaaaagcactgaatgataataatctggatgaacttcgtcagatcattgttgatgaagagatcgtatgtcctatttccggtactaagaactggacggaagttcgtcagttcaacctgatgttctctacagaaatgggatcgacttcagacggtgccatgaagatttatcttcgtccggaaacggcacagggtatctttgtaaactatctgaatgtgcagaaaaccggtcgtatgaaagtacctttcggtattgcccagattggtaaggctttccgtaatgagattgttgcccgtcagttcatcttccgtatgcgtgagttcgaacagatggagatgcagttctttgtaaaaccgggaacggaactggattggttcaagaaatggaaggagattcgtctgaaatggcataaagcgctgggcttcggtgatgccagctaccgctatcacgaccacgataaattggctcattatgccaatgctgcaacagatatcgagttcctgatgccattcggtttcaaagaagtggaaggtatccactcccgtacgaacttcgacttgtctcagcatgagaaattctccggcaagagcatcaaatacttcgatccggaattgaatgaatcatacactccgtatgtgattgaaacttctatcggtgtagaccgtatgttcctgagcatcatgagcgctgcttattgcgaagagcaactggaaaacggagaaagccgtgttgtgctgaaattgcctgctgcccttgctccggtgaaactggctgttatgccgttgatcaagaaagacggtctgcctgaaaaggcccgtgagatcatcgatgctctgaagttccacttccactgccaatatgacgaaaaagacagtatcggcaagcgttatcgtcgtcaggatgccatcggtactccgttctgcgtaacagtggatcatcagacattagaagataactgcgtgacattgcgtaatcgcgacaccatgcagcaagagcgtgtagctatctctgaactgaacaatatcattgcagacagagtgagcatcacctcattattgaaaactttacaataaaccattaacgaatgagtaaaaaaatctatttattctccttagtattactggctttggcttttgtttcttgtagcgaaaccgaagaagagggaaagtttgccaattggcgggcgcgtaacgaggcctttttagattctttgcagcaggtgtatgatgcaaaaactgatcctgaattggaattctttgtaccttttacggatccgggaatgaagattttctataagagaacggtgaaaaatgacgaggggagacgtcctgtaataccgaatgttgtatcagcgtattatcgtggatcttattatacaggtgaggtgtttgatcagaactttaccggaaaagatcctggggactttgattctccaacagaattctgggtgaatcctatttcaatgtctaatcctcctcatattataccagtggatggatggatcgaaacattgcagaggatgaggacaggagagagatggactgtttatttaccttgggatatgggatatggaactagtgaccgggatggtatgcccggatattctgttttggtctttgatataaaactggaatcggtagtttcagattattagattgttgaaaataagtatgtttatgagctgattacaagtaaagtttggtaggatagaaatttagtagtccttgtaatcggcgtacttaaaatattaaaattccctttattttagttgattctattgagaattatactaaaataaagggaatttttattggagagtgatctaataattttcaatattgaggaacttgtctggaaacagcatattataagttcattatatcgatataataagttgtgttattgcctgtcgtaatgcccctaaatgtttcaccgtttaaattacgactagatatttgtggaacaagaggtcctgttggaccattcttgatagctctatatgtccacaagatagcttcatttccgttctttccattttcgtcgtctatgtatatgctgtttattgcattaggaataggtgttgaactagcttttcttaaaactccatgttgaaagcctaatttttgtgcaggcttgtcactaaatctccagtaaagagttgtattatgcccgaaattagataaaccagtggatactaaacctccgttatcctctaagctgtttttatttttatgatcctcattgtcatgatatctctttacaagatctacatcaccttcattgatattccatacataatcatataaaatcagagtacctccaccataattacctggatctactaagcaaaatctaaatcttacatttccatcaacggttgtagaaccaacattgccggttgcatgtgtatctcctccatcttcacagtccattcggtatacaaattctcgattaccactgcaagtaccatacttaaatactccaactttgggggcatttccgccataagctcttgtgtcagttcgtgttttactgtcataagctaagattagtttgtttaatgaatcttggatagccttgattaattcgggttccgcgcatgtttcttcttgtgtagtaggagttaattcatctttctctttgtttaactcatcaaaagaatatccttttaatgttaattcgtaatcagcaactacactttctagttcgtcagataattgtgtgttttcacttgcactcatcgctctttcttcttcatttagagaacaagaagctaataaaatgctgaaacaaaaaaaagtaacttttttcataatacagtttttaataaatgtggataaataaaaattattttgatagttcttcgtcaataagatgacaaatctctcgttttgagttggaattaacaatcaaacgtccatttacgataattgttggggttgcataaacaccgagtagtactaattgatttatcgatttttcaattaattttttccctgcatcatcttcaatatctttcttgaatttgttaatatccatggatgtactatgtgctatattatatacagttattgaatctatgtatcctttatgcgtgtataatgagtcatggaattcccaaaacttattttgtctattggctgcttcacttgctatttgggcaaaagttggtgttgccgaatagtggatatagccaaatttgactttttctttgtatttttgatatattgtttcatatagattgtgagcattaatacaagattcgcaatcaaaatcagatataatgataatagatacttttgattgaagatttcctctataataagtgtgcagattgcttaaatcaatggatggacttttaggaggataaatatattgcactattcttttattttgttttaaagaatctagcaaattatctataataaatcctttcaagcgatataatcctgatatctttccagtgggagagtttgtggctacattatacatattagcatcacgaaattctataattgatttcagattataacgttttgaaagagaatctattcccaatcgctggatttgattatctgtataattatcaatatattgctgataagatagttgttttttatcagcctctttctgtagtaacttaacgtttattaattgctcaactgccttcttctttatttcataaattttgtttagttcgtcaaagagttcttgtttaatgatcgtatttaattcatcagtataaagtacttcttctcctaattctgcaattatctctctgtcattatgtgatgatttttttctagagttgcatgaaggacaaagtaatgcaaacagtatgataaatatagaatatttggtacgtttcataactttattattctatggaaattactcctacagctacccataaaggagaggatactttaagagtatattctgtagttttgtagtgtttatctaagttgatgaatttgattttctcgaaagatgttgttttttcatagtaaactgtttcaccggtagttgaattaattatgagtattgttacatcattgctaggatgttcgaattctatttctaataatgagttatttacataggcttgtacaggagatggtaaatttgcagagcggtgctctatctttactctgaccttcatcttgatttgttttcttgtatctaatggcattgcaaagataagatttgaacaaataaccataagagagaataaaagtagatttcgtttcatattgattttatgttattggtttgttgcaaaattacgatgtttgcgtatgcggaacaataacatgaaataacaatatgaaagataatcgatcttgataatcagggtgttgcgtttttgatataacaaaaatgagataatgataacactttcttttgcaggactatcttttatcgtttttaagatcaaatattacagagaaagtttgattggatagttgctttcttatgcgatactttctttggttgagcgcatattgactttcaaccctcatacattttttgatagtatcattagaaagttgaagataattaagtatacagtaatagagatcttcctgcgttagatttggatattggttaagaagctcctgcattgcttccgtgaaaacttcatttatttcttgataaattaatgaaatatcttcttgggatactcctttttctctttttattttagatgtttcaattaattgtattttcttataggatgtggtggttttgaatagacgtacacatgtttgaaggctttgatgccataattcaaatcttttatttactatatctatgtacttttgttcgttaattttgttagtgtgtgatattgttttaatttcttcttttaatacagctttttctgtttggtttttcataagaagttgctgtagatatatgtattttattttattgcggttgctgatgtacattagtataaatatggcaaaggatattgtcaataatatgcaaatgattaatactgctttatctttttggtactgactttctacgcgctgttcatacatttctgtagagtgtttttttatgagactattaatctctgtatgatgaaccatcttttgtatagaatcataataaactaatgctgtatcattgtataaaatagcttgctcatatttttttctttttttatctatttcgtataatgtttggtagatagatgcttttgcatagatatctgcattgattttagctttggataaataacaaatagcagagtctgtttcttccaaattgcgtaaaataatccctttccaaaagtaaatggaagaaaaacttgtattataaggtgcatattttaatgcatgttctatattcttttttgcttctatatgcattcctaaattatcataaattttgctatatcacataatatggcagtctgccatatggaatcattgatagattgtgctatggctaaggatgtttgataataagttagtgcgctgtcttcatcgtcttgtattgcataaatgttacctaagcctcgcgtcgcatgaagaataccatatttatcttttaatagttcagcagtagaataagattctttatatgtttttattgcctgaatataaaattcttgattttcgtagcacatcgctaaattattgtaaacctgtaatataaaggttttatcagtcggggtagatttcagaactgttaaatacgcctctgttgcttttacatattcttcattatcttggtatacccttccaagataaaaatatgatttagcttttaaattgttgttatctttatttttatagtagtcgattgctatcgatattatagagtcattttgatgttgaatgtaatttttatctaaagcttgtgttaagagcaatgcatacattgctttagctgatttactgggtatttcttgaatagaaaaacttcttaataagtttaaagcactatcaggtttactaagcattaatgaatctgctaattggagttgagggataatatcagatttatgacatgcatttaatgtaatgcatagtactattaaaaagattgtgtagtttgatttcataaagtgtttgcttctacaaaaataactatttctaaatgaaatatagttaattaggaggataaaaaatcaacggtaaaaagtaaatgatataaaatacaggacttatttttcttttatgctgctctcccttatctgcaaatgtgtcggaatcaccacttgcttgaccgtcctgtctcccttaatctgatcaatcagcagttgacaggctgtttcccccatcttataagtctgatgcgatacggcagatagcttgggttccacataattggcgtgctgctcatccgtgtatccgatgatggcgatatcgtcgggaatacgaagtccgtgccttttgattacttccatagcggcaaaagccaatgtgtcattcatggcaaggatggcatcgggaggctgggggagagataataatgtttccgtagcaatctgtccttcctcataatcaattttccggcagacaactaattccttttcaatcggaatccggttatcgcgcaaggcttccagataaccatgcttccttctttttacaatatccagatgattggcaccgccgataaaagccacccgtttacttccattgtccagcagatgctgggtagccatttgtgcggattgtgctccgtctgctattactgacgagaattgatcggtcaggcaaacacggtcgaacagaatcagcggcatattgatctctttcaatgcagcaaaatgagaaaagtcagttgtttcctgagacaggcaggcgataatcccctctacccgcatattgaccagattctctatattccttttttcatgctcgaaagactcgtgcgatgtcgtgataatgacgaaatatccgttatcgatcgccatgttctctatcccgttcagaatggaggcaaagaaatgagtgacaatatccggaacgatcactccgatgatgcgcggcgcattctttcgcagactcatagcgaaaggattgggacgataattcatctctttggccagcttcttggctttggcgcaaagttcacggctgatttccgggctgtctttcagcgctcgggatacagtagggatggatacgcctaatgcttgggcgaggtctttgagtgaagtatgtttccggttttccatctgaaggtctccaacttagatttatctgcaaagaaagcatattccctgataaatctccgcatttaaagaaagattttttacgtaaaccgttacgtagctttttcgcccctctcttgtccgttgagaagggttcaccccttacttttgtcgcatacaaaataatttaaaaccctatacgtatgcaataccatgaaatcggaaagacagggatgaaagtatcgtctctcagcttcggagcttcctctctgggaggagttttccatgatttaaaagaaaaagaaggcattcaggctgtgtttacagccatcgaagccggaatgaactttatcgatgtttccccttattacggacattataaggcagagactgttctaggcaaagcgctgaaggatattcctcgcgaccgttattatctttctacgaaagtcggacgctatggcaaagacggagtcaatacatgggactactcggcaaagcgtgcgacggagagtgtatatgaaagtatggaacgtctgaatattgacttcatcgatttgatcaatgtgcatgatattgagtttgccgacctgaatcaggtggttaatgagacattgcctgctttggtcgaactgcgtgagaaaggagtggtaggacatgtcggaatcactgacttgcagctcgaaaacttgaaatgggtgatagaccgttcgccaagcggaactattgaatctgttcttagcttctgtcactattgtctgtgcgatgataaattggctgacttccttgactatttcgaatcgaaagaaatcggtgtcatcaatgcttctcctctctcgatgggcttgctgagcgaacgtggtgttccggcttggcatccggctcccaagccattggtagatgcctgtcgcaaagcgatggagcattgtaaagcaaagaattatccgatagaaaagctcgctatgcaattctcggtgagtaatccaaagattgcgactaccctgttcagcaccactaatccggagaatgtgaagaaaaatatcggctttattgaagaaccggtcgattgggaactcgtgcgtgaagtgcgggaaattatcggagaacagcagcgtgtaagttgggcaaactcttaaaaaaacggtcgattctatggattatacgattattgatgcgcatgcccatctgtggcttcgccaagatacggtggtcgatggttttcctatccgtactttagagaacggacgctccctgtttatgggggagattcggcagatggttcctccttttatgattgacggggtgaatagtgcggaagtttttctgtccaatatggattatgcccaagtctcggctgcggttattacacaagaatttatagacggcattcagaacgattatctgatggaggttgtttcacgctatccggaccgtttctttgtttgcggaatgtgtgagtttcgcaagccgggctatctgggacaggcgaaagaactgatcgggaagggatttaaagcgattaagattcctgcccagcgcttacttctgaaagagggacgggtaatgttgaactgtcctgaaatgatgcagatgttccggtggatggaagagcggggagtgatcttgtcagtcgacttggcagagggggcgatacaggttccggagatggaagagattattcaggaatgtcctcgattgaagattgccgtcggccatttcgggatggttactcttccggattggaaggagcagattaagttggcacgtcatccgaatgtgatgattgagtccggtggtatcacatggctgttcaatgacgagttttatccgtttaaaggtgccataaaggctattcgtgaagccgcagaactggttggcatggagaaactgatgtggggctcggattatccgcgcacgataacagccattacttataagatgtcttatgactttgtggtgaaatccccggaattgtcggaagcggagaaaacgttattcctgggcgggaatgcgcggaaattctacgggtttgcagaacttccggaactcccatacattaaaaatatgtcggaatagaaaggaaacagccactataccgctaaacaatcactgtacacatgaaaaagaatacatataccattcctctcgcactggttttcagccttttcttcttgtgggcgatcagcagcaatctgcttcccacaatgatccggcagttgatgaaaacctgtgaactgaacaccttcgaggcctcttttacggagaccgcttattggctggcttactttattttccctatcccgatagctatgttcatgaagcgttatagctataaggcgggaatcatcttcgggctgttgctggcagctgtcggcggattgctgttctttcctgctgccatgctgaaagaatattgggcttatctctgcatcttcttcattatcgctaccggaatgtgttttctggagacagccgccaatccttatgtcaccgtgctgggagctcccgaaacggctccgcgccgattgaatctggcgcaatccttcaatggactaggcgcttttatcgcagcgatgtttctgagcaagctgattctaagcggtacccattatacacgcgagacgcttcctgttgattatccgggaggctggcaggcttatatacaactggaaacggatgcgatgaaacttccttatctgatattggctctgttgcttcttgcgatagcggtcgtatttgttttctcaaaattgccgaagattggagatgaaggagcggaacctgcatccggaaagaaagaaaaactgattgatttcgatgtgctgaaacgctcgcatttacgttggggagtcatcgcgcagttcttttataatggtgggcaaacagctatcaacagtctgtttctcgtttactgctgcacctatgccggtttgccggaagatacggctaccactttctttggactgtacatgctggccttcttgctagggcgctggattggtacgggattgatggtcaagttccgtccgcaggatatgttgctggtgtatgctttgatgaatatccttttgtgtggtgtcgtgatgctatggggaggaatgatcggactgtatgcgatgctcgccatctctttctttatgtctatcatgtatcctacacagttctctttggcactgaaaggactcggaaatcagacaaagagcggttcggcctttttggtaatggcaattgtcggtaatgcctgtcttcctcagttgacagcgtacttcatgcacgttaatgaacatatttattatgtcgcttatggcataccgatgatttgttttgcgttttgtgcctattacggttggaagggctataaagtaattgattaataaatttatctcaaacaaataaaatgaaagcagttcaaattgtcaacccctccgaaatgaaggtggttgaactggaaaagccggccgtcggtgtcggtgaagtattggtaagaatcaagtatgtcggcttctgtggctccgatttaaacacttttctggggcgtaacccgatggtgaaactccctgtaataccggggcatgaagtaggagcagtgattgaagagatcggtccggatgttccggctggctttgagaaagggatgaatgtaacattgaacccatataccaattgtggtaaatgtgcttcgtgccgtaacgggcgtgtcaatgcctgcgagcataatgagacattaggcgtacaacggaatggagtgatgtgcgaatacgccgtgcttccttggacgaagattatcccggcaggtaatatctcatcccgtgactgtgctctgattgagccgatgagtgtagggtttcatgctgtttcccgtgctcaggtcatcgataatgagtatgtgatggtgattggctgtggtatgattgggattggcgctattgtacgtgctgccttgagaggagcgacggtgattgcggtcgatctggatgatgaaaaactggtactggccaaaagagtgggagcgtcttacgcagtaaactctaaaacagagaatgtacatgagcggatacaggaaatcaccgcagggtttggagctgatgtcgtgattgaagctgtcggcagtcctgtgacttatgtaatggctgtggatgaagttggctttaccggtcgtgtggtttgtattggctacgccaaaaaagaagtcgcttttcagaccaagtatttcgtccagaaagaactggatattcgtggttccagaaatgcattgcctgctgatttccgtgcggtaatcaactatatgaaagaaggtaagtgtccggtagaagaactgatctcaaagattgcaaaaccggaagatgctttggaggcaatgaaagaatgggcagctgatccgggaaaggtattccgtatcttggtagaaatgtagataatttattttacagaatcaaccgcttagcccattgtattgagaatatgaagaaagaatgatcccgttggttttaaaccaacgggtcgttcctttaaaaccaagacaccgttcctttaaaaccaacagatcttttcttttaaagaaattctagatgttttttatctgttgagaatcagtgttttacggactgggcctgaacacgggtcaataaatggttatcattctttacataactgcgtggcattaaaagattgaagtataatttgtgcttttagtctttagaatgttcttctattattaaggatggaatgataattggctatgatattgaatcaatccttccatcggactttggagaatcttacctatctgaatacctgtttgtcgggcagcatcctgtagaatctctttgtaacagtaggctatcgatccgatgaagtgtaccggatattgcttgtaatcatactgcatcacattcctgcgaaagaaagctataaagctgttcataactaattggcggatagccggttcttccaaatgctgtgcgataaaaggagagagactggccaaaaaacgattgggaaagggctggcgataaacccggtcgatgatttcgggaggcgtcagatcgaactgcttcagaaactcttctttcaaggtggcaggaagttgatttttcagaatatctcctaccagcagttttccaagtacggcaccgctaccttcatctcccaaaataaatccgagaggagagatgttactgacgatctcttttccattgtaaaaacaagaattggaccccgtccccaaaatacaggcgataccagcctcctggccacatagcccgtgggcggcagccagcatatccgaatttgctttaatattcccgataacgggcagactgtctgcaatagcccgtcggaggacgggagctttctcgggtgtacaacctgctccgtagaagtaaactgcattgaatttcccttccggcagttgaggcagaagggaagctgtcagcttctgttggatttcttcttccgactggaagaaagggttgatccctttcgttccaagtcgcttgataactgcgccgttcagtacgacacaccagtctgttttggtagaaccactgtctgcaatgagtatcatatcttaatgtatattttctttttatatagaatgtagcctattgcccagttgagaaggacaaaaagcagggcaaatacaagcgagcctcctttatctccgaagacaggttgtaggagtgtgctgtaaatatagccatgtaaagaagtcgcttcaccttggtaggtcataggaatgactgccagcgtaatcgccagaatatctgccaatacataaataaatagcggatttactccaaacgattcgaagaaacggctccagtttttataacctttaatgtcaatgatccatacgagtaatgccagaaaactggaacccagaccgcaggttacgagtacgaaggaaggagaccatactttcttgcagataggggaaccataactcagtaagaaacctgcgaaagtaaggatagtacctatcaggaacaaacgttccagcttctcatgaatatcttttacttccatcaatagctttccggcacagaagccgattaagacgtgggcgatggctgaaatagtactaagcagtccttccggatcaagtatctgaccgccatagatatgagcttgtcctaatactgcacggtcgacgatggaaagaatatttgtttcgtcgtagacatatccattgccgagggcaaggattgcaaaataactaatgagaagtacagcaattaaataaggtatatatttatgcttcatgagtaaagcgactatggcagtaactccatatcccaaagcaagccgttgcatgactccgagaatgcgaatctggtcgatagggaagggatcgtgctggaagcagagaatggaaagccagctgatgccaattccaatcaggaaaatgatcacggtccgtttgagaatttttaaacccgcgggaacactgaaggtgaaattgtactttctcaaagagatgtacgtggagattcccataatgaacataaagaatgggaataccagatcggtaggagttaatccaatccactcggcatgtttgaggggagcatacgcatgttgccaggaaccgggcgtatttactaagatcatacccgcgatggtgatgccccgcatcacatcgagtgccaataggcgtttgttacttgttgttacattcatgactgttactttttaatgtgttaagttataagtaattcaattttatctcttttttccgaaggaactgtccagtcgattgcggatcatccatgaagcaaggatgccgggaatggtgcatacgcatacccagataaagaagttggtgtatccaagatgttcctgtatccatcctgccggcattcccggaagcatcatgccaagtgccataaaacctgttccaatggcataatgagctgttttgtgttcaccatctgcaatataaatcagataaagcatataggcagtaaagccgaagccatatcccagctgttcgatggctacacaaatggagattagcaggaggttgtccggagtagctgctgccatccagacatataaaaggtcggggaggttgatagccagcgccatgggaatgatccatttcttaaaaccgtcacgggaaacgaggaaaccgctgatgatgccgcctatcagtagggcggctacgccgatggtgccataaatgactccgacggatgcggttgataatcccaatccgccttgttcggcaccatccaataagaatggagaggctattttagcaagttgggattctcccaaccgataggtgagcaggaagaaaaacataagtcccaggtttttcttctcaaagaaagtgacgaatgtcttaaagaaatcttccagtaacttacccggtgttaaccccggtcttttgacatctgaagcagggtgggggagaataaagcgatggtatagtgtcagtccgaggaataatcctgccatcagatagaaagtgatactccaggccattggaacattgccatgcgatgtttccaaccagcctgccaacataaccaggattccctgcccgaagatattggcgaaacgatagcaagtgtttctgatgcctacgaagaaggattgttctttgttgttgaggccaagcatataaaagccgtcagccgcaatgtcatgcgtggcagaactgaatgccatcagccaaaagaatgccagagtgagttgcacatagtgtggagtcgggataaaaaaggcaataccggcgaaaccggcagcaatcaaaccctgcatggcaataatccaggaacgctttgtcttgaccagatctacgaaaggactccataatggtttgatcgtccaaggcagatataaccaggaagtataaagcgctatttctgtattcgacaatcccaggcgcttgtacatgataacggcaattgtcatcacagccacataaggcagtccttccgcaaaataaagagtcggaatccagctccacggatttcgattgtttcttggtattatgttcttggcatttcttgttgatatcatggcattagtctcagatgttattcatattgtttttcaagtctgcttccgggataatagtgagctaaaatatctttgtaataataacctcgctctcccattactgccgcaccgatctgacaaagtcctactccgtgtccccaaccggctcccgtcagtgtaaagcgggttggaacatttccctcttctcctttttccttatccacaaggaatgctgaactataaagatgggaaggcgacaatgtacgtcggatctctaattcttttccgatggtcagtgtccgtaaagtacctactatctttaatcgtatcaggcgtccggaagttcctcgctctacagggattaagtctatgatttccccgaaatcaattcccgaacgttgatggattaactcagctagttcctgttggctataactgattttccaacggtagaaatcagtcgtttcctgatcgtagttattaagaacctgactcagaatctttttatcctgcgtattacagaaagcatccggagaagttcgtatccatcggtccgcttcttcttcctgcgtcagatcgggaagctgtattgccggacctgttatttgtttctccgaatcagaagcatgggattccggtatgtaatctcgtttaccggtcagataaggatgcctcacattctcccaacaattctgaaactcttccattgcaccgccacaacatttggagaatcgcgcatcgcaaatctttccttcatacatcagcacctctccacgggtagctgaaacagcttcgatagcttgtggagtagaagcacgggtaattccctgatagcgctggcaatgatcatccgcacaaacatcaaagtgcgtatgcgcttcatgatcataccatttgataagttgagagttgagagtggaaagtggagagttggctgcgctgtccggctgtatagtagctttccatttttcattctccactctcaatttattgatcagccagcttctggaaatgacagcatgtgctttcagtagttccaaagaggcggtggcactcatttctgatgagatgacacttgtcaggtaatcttctatagagattacattgatggcggtcagtgtctctccttcgacaatgattttcaaagctccctggaagcgttgtacttctttgcgttcccaatgaaaattgatgccgatggtgacatcctttagctcaaagaagatcccggcatttggctgagggtagaatatcaattcatcgtattctttccctgaccagtatatcttttctttttgataaacagccttttgtgcccctgaaacctttgtgccgtcaggagtagtgaagctttcgggaaaagaaaattcaatttcttttcccgaaaggataccgactgtaatctgaggttcttccatttcttctttactaggatgtttgatcggtgagtgcttttaactgttcctgtgacaaactgacctccttgtaaatctgagtgatttttttagctgttatcttatccaaatcttcttctcttacaatggggaatacgccacacatctccgcaatagccgggcttatcaataagccttttttcccttgggcataataacattccggccgatgtttagaacgtaggaaaataatacagttccactgttttatttcatcgcctccagtgcggtttactgtttcgagtccataccaggcaatcacattgattaaaggttctttgtcatgataaatagaaactatcttatcgtaaagatactcaaacatttcaatgatccctcttctgtttggagatgaaatgccaatgctcgtggtgaacccgttttctagatgactatgtacgctatcttcagaactaagcatgtccgatatgaaagtcatcccaaaaggattggcaatcttttcctcttttcctgctgcctgaaagtgcatatggtcaggggcggaagctccgcattccggtccgttatataagatgaggaactcgttcatgttttcggcaaggaaaagcatatcctcaaaacggtttttgatggtttgcggggtatgttcctcttcaattatggtcagatgccggcggaaaatcggataaggattgaggcatacctcataatgtccgagtgacaaagacgtttgttctgccgggcgattgtcattgcacagaaaacaaggtctttcttgtatggactgagagtcggtctgggccattgtagagattgcccgttgtggatttgggaagaatctgactctcttggtgtcccctcctagtttgagttccagcgtcttttcttttttaagattctgttctaattccttataattcttttttgccagcttccagtcttttttctgtttttctatcatctcgttgacgagacgctgaaaactttcatcgatgctgtgcatccggattcttgcctgtaactcccaggttcggatactgtctttgtagaaattgttccggttaattttttcgatatctaatgctgcgtcagagttgccttcccaacggcggcaaagatagattacatcataaatacgaccgatcgtatattcacgagaaatactcagacctatggcataatcttctccataactggtattggggaatttgatcttgcgaaggatgggagtgtagaaggcccgtggggcacccaacccattgatacgtaaagcattgttgggaccgtcctctactgtccactctttatggtcaatgacaccgggagctatctcgttcatctgaaaatccgtcattaggtaagtccctatcaccattgcacagttctgctgatagaaggtatcgacgattttctgtaaggtatgctcatccttatacaggtcatcgctatccagttgcacggcaaatttaccgcatttctcatggtgtactcctacattccagcaacctcctataccgagatcattctcctggggaatgatatgtattagtctattgtccgcactaaattcctggagggcttcggtggtaccgtccgttgagtgattgtcgatcacaatcacattaaagggaaaagtcgtttgctggctcaaagcagaatttacggcgtcacgaatggtccggatacgattacggacaggtatgatgacagatgcttcaaactcaaaagcttctctgtccaggtttactgttcgggaagaaggtcttacataggcattgatttctttcagatgcttgatacaaactttctccatttcgatctgtacttcccgatttttaggatttacgtaatcgaattgtttttctccgcttttccgggtatctgtttctatttctgtgtaaaggaactcattgatatggatgatttgaaatagattacctagcatcagacgcatttcataaaatgcagcatattggaaaactgtttcctccagaatacttgaagcaagggtgaaaatttcggaattgaataaaagcaccgaaccgaaatcaaaatcatcccggaggcttccttgttgataatcaataacgggagcttgtttgagaactccgtcaaccagttggtaatgatctgcgtataccattgcattttctgaggagttctgtataatctgtgtcatgcgttccagtgcgtacaatcctagttttagcggggtctgtttcgtgtaaagcaaaagatagctggcatcatctgcgttgtcagcaattgttttaatcgtacttgtagagtagagaccgttaatgaggagacattcacaccccggtaagcactctttgttggtatcagcgcttagcaggtagattttgttcactaattctgaagcttgcaattcttttacagtttgtatcgtatctttcggattgccaaaaggtatgaagcaattgattttctttttcattttaatgtttttttattaaagagttgttgataggggctgctgacgatttccttttgatgagcaggcaaagccccagaaaagtaaacgcagcattcaatatcagtaactcgtagctaatttgatatccatcgaaccaggcttccgaatttctttgcaatacgtagcaaagtgcaggagaaagaatggctactaacggaatatatggatcataaacttgttttttagtaaaaatgccgaaagcgaatagtccgagaattggaccatacgtatagctggccagcgtataaatcgcatcaatcacactcgtattattcagcaaattgaatacgaagatgacgattcccatcacgaacgccatcccgatgtgcacgtgtttccgtattttgctgagtgccgcttcgtctttcttgtgcgcattcagaatatctacggtgaaagaagtcgtcagggctgtcaaggccgatccggcagcggagtacgccgaagctatcaatccgataatgaacaggataccgactattcccggaaagtaattgcctgtggcgatcattgggaacaattcatcgctcttaccaggattctcgattccctgtcgggcggtgaaagtatagagcaagacacccagcatcaggaagagcaggatcacaaagaactgtgaaatcccgcttgtaatcatattcttctgtgagtcacggaagttcttgcaactgagattccgttgcatcatatcctgatccagcccgttcatggcgataacggtaaagactcctgccaggaattgcttgaagaaatatcgcttgtcgttgacatcgtcaaaaaagaacattttggagagatcgctgtctgaaatcgttgagaccaatccgctgaaattcagatgcaggctggaagctatatagtagatacaaagtacgacggagactaccagacagaatgttttcagcacatccgtccatatcaatgatttcactcctccccggaaagtatagagccagacaatgagtactgtcagtatgacattgattataaagggaatatggaaaggctcgaagatgagtaattgcaaggtcagacatactaaaaagagccgcacggcagctccgagcattttggaaataaagaaaaaccaggctcctgtcttataggaagaagctccgaagcgattttcaagatattcatagatagaaaccagattcatccggtagaaaagcggaacgagtacgaatgcgataatgaactgtccgacgataaatcccagtaccatctgcaggtaggagaagccgctggcttgtaccatacccggtacggatacaaacgtaactccggagatagtggaaccaatcatggcaaaggcgacaatataccatgccgatttgcggttgccgacgaagaagccttcgttatccgctttatgtcctgctatataggagatagcgaaaaggatcataaagtatgctatgatagtaatagataagataattggactcatatctgttgcttaaaattcgttcgcgggtgaatatattcaaatatgcttttcctacaaattgtacaaatgtagggaatttatcaaataaatgcatccttcttatgagttttttattccgggtgtgccacctgtatcatttctcgatgagtgccagtttttgttgagagaaggaagttcaggagatatcttctctaatgaaatgcctgtagtgactgaagtgtcgtgcatccagtctatgaaacggcaggtatcaatcgtgcggggatgttcttcatcagttgccaaggcaaggtaacctccgtcgttgctcagttgcggaaatttggatatttcggttatacttttgccgtcaaccttatgctttctgatcagtgtagttgcggagtgagtaaaacaaatatatcctttgccgggaataacaaggtttgtattttcatcttcctgtttgagtattgtggtactgaatatttctcccgttgctctcattttaaacagacgcagagactttacagtgatatcctgatcagcaggattatagaattcgatgtattcggcaccgtctttggcattgtcatacatcacttcgttgaatagtaacatatttctcacattgtcaggatattccggcgattccggtgtgtcaggcttgtccggttcatccggaacgtccggtatgtcgtccggttcagtacttgttatcacatcatcagacaactgtatatgatggaaagtgaaaccgtcacagcggctttttgtataaacgcagtatatgccgcagcagattgactttgtgatacttgcgtcttttatttgtttctccttcgtatattcggtttccgattccatgcgtgtccagaaagtccagtagccgttggcgtcgcattctactttgataaataatttcggagaattatttcctttcatgagttctcttcccgaagccagtaatttggattgattcccattttgccggtaaagtgctacattgtcttttgttcctcctatctgaatgtaatagccgttcagatctccggaaagtatttccgatgaagaggctaaatagaaacgggcgtaattattggcggaaggattaaaggtgagccgtacccctaattcccatcgggtgcttcttacagaagaagaggggatcgtgatatatgctgttcctgcatcttcctgcggatcattcaagtgtacgccttctttggtattaatcgtgaatttctcggtttctcctgtccagggaagttctgatgttgaactgtccggttcaaggctctctttttcatcctcaggcggaagcgcacaactgtataataatataatgaggaaactcagaaatgtacatgccttgcaaattttcatacggctttaaattagtgttgttatctaccgtatttgtttgtgttcaacgcagaggcaattgcggatcggataatgttcatgcttgcaaaggtacagtttcttgttgaataaatgcgaaaggttctttattgttttctgtgaatgttagaaataaaagatacggattatacgaattaacacgatagctttatgctttcacaacgctaaaaccgtgttaatctgtgtaatccgtgcctaaaagttattattcctgttattactcaaagcgcggcatcacatacttgtccgtataagaagtgaaactgatgccgggcatataatgagtattcgaattattttccagcttctttatcagtgaataatcatccgcgttcaaagcatagtaattatcggaagacggactcgtcacccgtaccgtccagtcgaacatatttccaatgatggtcagcgcgtccgtttcgggattgaatgcaggaactcctgttttcaccacatcatacgtgcggcttttcagcacatataaagcattgttgatatctgtcaggaaagcaagcgtctttttatttctgaattccgtcagataaaggtgctctaatgttaatccttccggcaaagtgatagcacgaacgtagggacgccctttcacctgtttcagatggaacagacgacggtcggcatccaacagaaggtatccttcgtcatactccttcttcaccgtcgggtttcctgcgatctcaatggccggaaagcggaaatccttcttggtcatagcttctgtaaacaagaggcttttttctgcattcacgctattggaagccatatcgataaactcaatgccttgcgaagtaatgcggaaaacatcatccggcatcttcaggtctacacgcccggacatcgactccaacagaggataaagaccgatggaaggagcgttgatatccgtaggtacgctgcggaaattgaaattctccgtctgcacgatcttcggagtgacagctatcccgttaatcgtatccggaaaacgttcgtcggacatcaactggcggaaataaaacataggcagaatactgtcgaaagctgcttcggaataaatgtttccggcagcgtcgcgacgtacggttccttttccctcttcctgtcccatcaaggcgaaatcgccgatcacgaaactatatagagtgaaaggagtcttctccggctttacgacaaagaagttgtaacaccaaggcaactgccagagaagcaggaaggcgatggtgacatataatagtagggtactgaaacgtttcatctttatttaattcttcatttttagttctttattcttcattatcctagtcctgctttcccgctttgaaccgtacgatggagagccaggagaaagacgcggtcagcaacgtatagaccagcagatacgggaggaatttgttataagcttccggcgtgggcgacaggaagaagattcgcagtaacaatacggcgataatgagattgatgattctgcgtttccatgccggttcgaggcagatccatgcgatgagcaggtagccggaaataccggcaagataccacgtgagggcggtcagcagtatatgattcttcagttcgtgagccagtactccgctcagatagacctccatcagaaggaagttggaagcgaagcagacaagcaacagtaccaaaccggagaacaacatattgccggtcattttcagttcgggatagggcaggtgcaaagtcagtttcagacatttgcgctgcatctcgggaacaaactgcacgatggccatcagcactccggcaatcagggggatgtattgtaacatatcgatgaatatggcatcccgctgcatcatgacttcccatacatgcgcggcgcctttcatttctatcacccggttgatgcgaagcatacagtagcctgtaaaaccgagtgtagtgactacggcaagcagaaaataccaccgtgtcttgatccattctttataaaatatagcgtacatgagacttctaatttactttttaatctttaattattttattgaatcagtatttgccggtcagaccgatgaaggcatcttccagattcacatgttcgctatgcaggtccgtatagggtactgacatggatttcagttttgcttccgcctctgtgagggggaggaaggagaatgtttccagtgtattccgtatcacggaaggatgatagaaatcatcggatgcgggcagttcgtaaccttcgggaacagtacaggtatagcggcgtccttctttcagtaattcgtcaattggcttctgaatcagtatctttccgtagtccattatgatacagtcgtctaccagtcgttccatatcctgaatgatatgcgaagtcagaaagacagtcttgccttcggaacgtgcataatcgcggagatagtctacaaacaggcggcgataaccggggtcgagaccgagggagaagtcgtctaatacaagaagctcgggattctgtgccagaatcagtccgagtgctacttgtgaacgttgtccgcaagacatacgggagatgcgctgtccggtagctactttcagtttgttcatcagttcataataagcctcttttttccattgattggggtaaaaggctgcgtagaacttctcaatctgggtgatgctcatgaattgatactgtacgtgcccttctatcagcagcccgatgttgcggcgcaatgccggagccatcgtctgtatctcttgtccgaagatacggcattctccggaacgtggtttcagatatccgctcaggatgttgatggtcgtggtcttgcccgtaccattcttgcccagtagtccgaggatgcggcctttggggactgtgaaactaagattttcgtaaatcaaccgtttgccgtagtagtgcgtcaggttgttacattctatgatttgttccattttattttatcagttattctgttcaaaagaagagaagaaaaaggatgggaatcacgattccgacaatcatttctattcctcctctgccgataatacctttgttgcctttcagcatgatgactccggaaagggtgatgatgatgaggccgactgcgaaaatatccgcaaagtaagtccaccattgtccggggttgtagtgcaggcgtgccattgctccgatgagcgggcggcgggtgacagattcgtagactgcctctcccgtacggacgtttacctgcaagttggacccgcctttcaagaacactttcatgatgtccgctttcgggaaatagtgcttggtatagttaccttcctctcccaatggttgcagcagagtcagtacattttcccttttcattccctctttgcccggcagtttttcggcaatcttatattctttccgttcgatggagaagttcgggttgatggtgtcacggtgattcatcacaatgccggaaatggcataaatcaagaccattccggcaaagaaaaaggataaatcacggtgtatcagcctactccatttacggatgctgctactccacttcatacgaattagcttccatgaaatagaaagacagatactctttgccgctgcttgcttttcggtcggctatcttcgcgcggaagtcggcgatacgggcttcgggcgtgttggctgtctcgccgcgtgctttcttctctgtgtcacagccggcttcaccggttccgtgtttttcggcagcttgcgctttgagttgtgcttcccagttttggaggtaggcttcgtcaatgcgttgttctttcagtgttccggtgacgcggacgatggagttcacacatttcgggtcgaatgctcccaaggtgccggcttctacgcggatcacttgtgtgtcgtcactgcccatcaggaagattttcttggcgccatgcttgcaggtatgtgtgcaaacgccttcgatggttacttcttttcctgcaaggttttctgcatttgcaagaagagagtcaatttctaaagcagacgaagtggtctgttctgttgttgtgtccgaggaacttttctgctgtttgtttctacaagaggttccgataacggcaaccgccagtagagcgattgcgatgcttagcttttttgttttcattgttactttttgtttttatgtagtttatattcttttttatgaacttgcaaatggcttttagttctggttctttacacaacgaactgtttgaccactaagtacactgatataactcagagacaatctgccttccggatacttcgccattgagaatgtgctcattagtccgaagaactgaatattggtcaggtcgccggtgcttgtactataaataggcttatatgcagttgaagtcatgtaataactcatactgggttttccaaaccattcggttaccgtactgttgctgctggttattgccgttgcctgatatttggggacggctgaataaccggttgacatacgtactcccgagaattgataattaaatttagcctcgttgagtgtcgggattttaccaccgtcatatgctgtgtcatagaaaagagcgtcttttccgttttccaaactattgccgtccgcatctttggtcgaattacctacaaggctgaaatattcggcgcgagtcgggatgtgccatcccttcggacagatgccctgtgctccttcaaagtcgtagcagttttccggagtaactgctttgccgctaagtgcggcatggatgtcgtagagataaccgtactgcttgatagaagttgcgtcctgcaatgcttttgcagtaagtgtaccgtcaactgtaaccaattcgtacggataccagatgtgagaatctgcagccggatcacttgacggagtatatccatccggtacatagcgtaatggttccgccatccatgttgttccgttggagagagttaccgtattgtaggtaatgccgtcgtagatgaaatatccgtcatgctcttcaaaaggaacttccggctcatctcccttgatctctccctcgtctgtccagttctcgatttcaccactgagtgtaacgatgatattatcgggtaatacacgtatattgacactgtattgtccgccttgaactaaatctgtggatacgagcttttgcatcaatgtattgttatctgaagttgttactgcaagagtgaacgcagccgtctgtgggactacaatggcacgaaaagtcttattctttgtcacttgttgtgctgtgatgtctgtggcggcggcgctctcgtttacggttgtcttcatggttgccaaattgatattggcagtaggaacagagcctttgagcactatagatgaaatatccaaattcgtttcgtttgtcacattaataaccagtttggtcagcatgtgcttgaagatcatgctgatggagttcaccgaaggaagtacgtcggatttgcttgccgccataaagtcggagattccgtagttggtggtctggtcggcatgcacggtgaatgaagtcggtacaccggttgcgctgtaaggatagtaagccacgaatgaagacttgtctgctccttcgggataccatttcagacttccggcgaaagctccgtcattgaaagtcataagctcgttggtggcatatacagtgccgtcttctttagtgacactcaatccgatctgatcctgatcttcgaaattaacctctgtggcacgtgtgataataggagtgatggtcacccggtccacagatgctactccctcgttttcctcctgctggcaagatgccagaaatgctgctgtcagcacaaataatatcccctttttcatcatttgatagttttatattatgtaaatgaataattttaaaatgtataacctaacttaatcgtctcattccaacggctcgaacctgctatatattcaaggttgaaaccgtgcgtatatccgccctgaatttcggcataaatcccccgatgaaagtgatagcgtaatccgacgttcactgtcgcccgtggggcagttgcatactcattctgcagatggtaataatctgtcaggcggtatggaggatcgcccggttcggctgtcgtttcagtagtcctgctcttctccgtgaagtctcctatggataaacttgcggcagctttcacatcgaatcttccggcatgaagtacgccggatgcgtaaacccgtccacaagtcattgtctgtgacgcgacataagggtacatttgggtagtcatgcttttaaaagacgaaatctcggctccgacacgcaattctcctttaggagcgatcaactcatattcgggctgaacggataaagcctttctttcgaaaatccggttggaaccgtaaacatgggtagtcgtgattccgttggatatctcctgtcccaatacattctcgtcatttgtctggcgtgaccatgagaggttgatccgcaggaaatgttcggtactgcctttggcgaaacggtatctcagatgcgatgtaatccggtgtgccggaaacttaaaccagataacctctttctctccggcggaaccggaagaatgcagatactccacatctccgtaaagcgatccccattggacctgaactgctgctccgtgagacagttccttgatggggaatccgttgatacccgattcgctcagatggactccgcttcccgaccatgcttcgtaggcaccgtacatcagtcctttatcaaggaatgcgtaataaggtgtagcggctgttccgatctcttctgctgaaacggattcgctgtttttgctgaaaatataagagaatccgatcgcataatggtccgaatgatacatgatgccgggagctacttttaagtccagtctgtagttggtatgtcgcaagtccttgcgtttggagtaattggcagaggtgaaatcgatctttccgccgatgcgccagttggtgccggcatctgctgctatacctcccatgaacgcataagtttgtaaatcctttcggccgggggtaaactccagtaggtctaccggataaaatccgggatggatgaacatggagccgctcatatccttgccggaagtgtggtcgaatgagaacgagccgatcagagaatacttctttaagtgtgtgatggacttggctactgcaccggcactccataatttgccggcttcgtagtagttgcggaagtcaccgtgattgttcttgccgtacagttcggcgtaggagacggtgacgctgtccatcatgattcccgttacgtttgttccggcattccatgaatttcgtcgttcgataacatcgtaagtctgtgccgagcttacggctgctatacacaacagcatacatcctatatatattcctttcatattactcatgcagggattgttgttctctttcataaaaatcggcggaagagttgttcgtatcttccagtatttcataaccggcctccttcgatgcttcctcgtctacccgacggtgcaggctgcgtccgtcatacagtgcactttgactgacatatccggcatcgatggaaggcgaaatgcgttttttgttgctcgacgaaccgccatagtacacctctaccccgtcaatcacccagtcgagcggaatcttgatgacctgatccaccgtgctgccgggcttttgtatcacactgcccgtttgctgtacatactcctgtatcgtagtgtcctgagccttgaagatgacagtggcgggagaaaatatagagaatgtataggcattcgcctgtcccagtttgatgaccacgtccagataatggtcgcggctgatctggtcgcccggagcaggatgatacatcgtattccagtaataaacattgttgtagcaggcaaaatatcccggtttgttcagattgaccgacagcgggtattgcgcggcatgatcgatggctccgttgacggcgatgaccgcatcggcaccgggtgccagcgggaaggaagtgccgttaccgccgaattgccagatgcactggacgataggagcgaaatcggggaaaatggttgctccggttgcttcgtcctgcgtcacccatacgttggtggactgggagttgtaaggatcgagcgtacctaaacacaaatggtcgagatactgcgtctgggaatcattgttgtgcaggataatgtatttatcagcctgataagtaccttcctgcggcagcttggtacatcctccgcaatagatttccttgataatgatggcaccggctttggagtgtgtgagcggaacgttgagtgtgacatccccgtttacgagttttaccttgtctgccagtccgttgaatatatgctggtcggctttatcactgatttgtatgcggtatatgccgttggtcagggcgaattgcgctgtaccgttctggtcggttaccgtcttgtaggaattgccgcggtcgatgtcttcgatttggacggtgatgccttcccgaaggtattccgcgtattcgtccggatagacggcagtcacctgcaaggtgtgcagctggtcttcgtaaggattgcctttgtcgaggtccgtacatcctccgagtaaggatgtgacgaaaagcagtacgatatagattgactgttgtttcatatttctaaagtttaatgcggcaggttagtccataataaaagttcggggtaaagattgcactggttccggttgcgtatgatttcacatacgcccgtgagttcgtgaaattaatcgcgttgaacgacagcgaaacatgatcgcctatctccttggtaatgctgatattggcagagaaatacggatcatatccgtcggctgcgaaagtataggcattgcccgatttacgtatcagatgtgcgaagtccggattttcggcttcggcggcggtgaaaggatgtacctcgttgttcaggtcgaggtaggcaaccggataaatagccgtataagaatttccgtcgtagatgctgcctcctgttttctcgttgctgttttcgctgacgttgaacgcatacgacgtaccgttatattcggagaggttctgcgaccgcttgatgagcgaggcttctagtttgcaggatatgatcagccttgctttcgggatacgggtgatcgctgtgatattggcatccagcgagtgagtgcgcttgccgttggcggttgtggatgagttgtcgccgttggcatatatacctacatattggtaggaacggttggcgagactggtgtgcgaccatccgttttggtagtaataagacaaggaattgtctatgtatttggtatatgtataggccgcatccacacggaactgcgtacggagaggagtgatctccggaaaatcgatgatcatttccgctcctctgcgggtgatgtccggtccgttatcgggagaggttgacctgacgaaagtctggtctttcacctttacgtccagcggtgtccagtaactgttctcatcgtcccgtatatatcccatgcccgtctgattgtctacggtaatctgcggattggcggacagctcgaatccttccggcaactgtagaacattgtacgcgaacggagtataggtacttgtatatttataaggcatcttcgtgcggttaaagtatcctaccagtgaaatacgggtgcgggctacattgatgtcaactcctatttcggcattctgattcttctgccagcggagtttctcgttgtgtaataaagtatatggctgactgtaatagacgtaagccgactcattgttattgtatgagactccgaaagtctgaatatcccgatactcctgtcggggatagagtacatagtacgaaggcagcttctcggtcactccccatccgccccgaatcgctatgttttcgttcagctgccatctggcgttgaaacgtggcgacagtgtgttcagcttgtcgtattgcgttccgctgatgaacagattctcccaacgcaatcccgccatcagcctcagcatggtgctgccgacaggtaccgacaggctttcttccgcatacaacgaaacattgtgcatatacggataagccgagtaagaacgggggcgatatccgttgggagccagcgaaggattctgataatactctccgtcgcccacattgcctgttcctttccattgcacgcctgctttcagattgctggttatgttcttgaaacgacggttccattcgtacttcaacgaagcggcataatccagttctttggaatcgacaatctgatcggcaaagaaatggtaaggcagtttgcctgcaatgaaatagccttcctgttcggcgtggactgccggctgttcggacgcataagaataaggtgtatgtgcatgcgacttgttatcattgtaatacaccgatgcatccagtttgaggttggtaatccatgacttgttgagcagccatgccaatgacgtgtttgcacggaaaacgttgtctctgactttggtatattctcccgtatatgcgtcgggatcatccttcgtattcatacctccgatgttaccggtcagcccgatgtcgaatcggagcactttccggaacgtattgctgtaacttgcggagaatcctctgcgggtataagaagtatagggtgaattaagcttttgagtagctttggtccattcaccgcttatgttgacgattcctttatcgttgccgaggtccagccctttggaaaaggacacctgttctgtgcggggattgatggatagcagtacattccacggagtcttcccttttttcgtatggattttgaccataccgctgttcaagtctccgtactctgccgaaggtactccggtgatgacttctaccgattcgatatcggccacagagatgctgcgggtatctattccggtcatattgccgaaagaagagttgttgccgatgcgtactccgtctacttctatcgccgttccgaaagccgcgttgcctgcggatgaacctccgtcgcgcagagagaaaatattgttgctggtcaagtccggaactttcgtctttcctcccggaagaagggcggaaatatcgcttacattcgatatctgcagatgttccagtgcgttactcccgatgttgagcgtggtgttcagctcactcttcggagcttgtgcggtaacgattacgtcgttcagggcaagtgtattttccttcagttgtatctttaatcctttgatgctgttgttcacattcaccggaaccgttgccggaacataaccgaggaaggaaacttccaattgatacttgccttcctgtattccttgtatcgtaaattcccccttctggtcggatacagcccacaaataggtgcctttgattaaaatggatgcgccgggcaacggcgaacccgtcctttcgtcggatatacgaccggaaatagaataattgttagtattggcttcaattctggaaatgatcaaagaaagaagcaagcagagcattattttaagtgtaagaaacctcatagaacaaattttgtgcaaatttcgttctatatcgttaatactacaatcgcaaataatgactattttgggagtatgcgagtacccataaataggtatttctctccatagtgatttgatagcagttttgctctcatgctctaacaaacggtctgtatccctttattcatcgtggtttccagtgtggtagcaactgtggcggcaggtatgagggcaaacggttgctctcacttgcatcatggacttaatctcgtttgtttagctttatgctttgatttgcaggatgttaatgtctgatgtgtcaactgttaacaattggcatcccagctattaataactgagaaatcagttgttaatagctgacaactccttcattatagactgataaatggtttgaaatggcttgaaaggacaggttaaatgagtcagttgttacggtcaagtcatttcaatcgacagttgtttcagatagtttcaggcgcttgaaacttttagtttcattgcttgaaaccaatggtttcaaaggttgaaactattagttccaaggcatgaaaccttttgtttcaaggcatgaaaccgaatttggaactacttcttggagaataatcttgtaggagagatgggaaaaggaaagccttggtgacttcgaggcaaataaagaagatcggcttgcactgcgacgattgtcgtgtagcaagccgacctttatttcattttatctatgtatcttatacgttctttaccttgatcagatactcagcgatctgtacagcattcagtgcagcaccttttttgatctgatcgccaacgatccagaatgtcagaccgttttcatttgtaaggtctttgcggatacgtccaacgtacacagggtctttgcctgcaaggaacaacggcatcgggtattccttttcagcaggattgtcctgaagaacgagaccctcgcctttggcgaatgcttcacgggcttcttctaccgagatcggacgttctgtttccacccagatgctttcagagtgagcacgaagtgcgggaacacgtacgcaggttgcactgactttcacgtcagagtgcataatcttgcgtgtttcgttatacatcttcatttcttctttggtataaccgttttccgtgaacacgtcgatctgcggaatcaggttgaatgccagctgataagcaaacttctctactgtcacaggctcgttggccaatacctgacggtattgttcgtacaactcgtccatagcggcagcaccggcaccgctggcagcctgataagtagatacgtgcacggtttttatatgagaaagctgttcgatggctttcagtgcaactaccatctggatagttgtacagttaggattggcaatgacgccacgcggacgctccaacgcatctgcggcatttacttcgggcactaccaaaggcacatcagcgtccatacggaaagcgctggagttgtcgatcatcacagcaccgtatttggtgattgttttctcgaactccttggatgttcctgcaccggcagaagtgaaagcaatgtctactcctttaaagtcatcgttgtgttgtaagagtttgacctcgatctgtttaccgcggaaagtataggttgttccggcactgcgtttagaaccgaacaaaactaactcgtccatcgggaaatttctctcatcgagcacgcgcaggaattcctgtcctacggctccgcttacgccaacaatagctactttcatctttttcttttgttaaatgtgaataatgtggttaatcgctgcaaaattagaacattttatcatataatcagcattttggagatacttcttcacattttatcagttcccatcctttaaattggagcaaaatgcaatgcaatgcagtcccttcactgatagttgttacctttttatcccggctatattgttttagttgccctctgccttcttccgcttgttcttccagttccttatcggtggcggtgcgcgggaggtattttaattccagaatataactgtgtgccgtgtccgggtagcgggatttgtccggcaggaggaaaaagtcacaatatccgtaattcatctccaattccggctgaaccagataataagaagcaagagcaaggtatgctttgaagaaaccttgcaaattgtgttctccctcgatggcatcgcggatggcggagttttctttataggcaagggctatgtactcaaacagagggcgccattgtccgtcgaaggccatgtcgtcaattaaatcttttaagtgaggcaagaatacttccttacgctgctggtagtattcccgaaggaatccgaaatactgctcacggacgcaattgttaggaatgcacatcacaatacggtctccacgtgtgccacacattgtaagcagtccataataataaagcaggctgcggaaattgtctgtttcaacaatcttctctgccgggaaggaggtgtggaggtttaccagtatctctcctttagcagctatctcttcaatcgtactcatgcggtcttcccccgacacattctcatggtcgaggcgtgccaacattttcagcttgctgtagtccgtacggatattcttgtcgatcaattccttaggggaggcgtcgaaattaacccggtgacgcaaataatatagcgtcatgtcgcaattgaacattctcggatcggtcttcaaactggcttctgcaaagcagtaattgtcataccacggtttcatttcattaatcatggcatctatatctcctttcagcataccttctttctgataatagccgaacatctcccgtacatccgtttcgctgaatcccatcatcatattgaaatgtgggtccacactgatattccagtctatgttatatccgctggataagtcgtccagcgtaacaggacttacccccatcaggaagatgcgttcgaacatacccttgaactgcttgaagtattctcggtagaagccgctggcgtgggtcaggtcgcggaaaaggtttttcccctgttcactcaggatgacattcgtaaagttgtcatattcatcaatgatgaggtagagcaaatgtcccaggcggcgggcggtggcttccagccaatgcagctttgtagcggcttcggtagaagcgatgatttgctccagttctttctcgccttggtagtattcccggtaagtactgaagaagtcgttcaactgtatgcagcaataattgttgaagttgtcttccagacttccacgtcccaggtttgctttggaaaagtcaaaatagagcacctggtagattccctgaagcggggtggggtgcttaccgatccatagattgccgaaccgttcttcaaaacgatctttctgtgaaatatcgtaataggcacgcatcatggtgagaaatacactcttgccgaaccgtcggggacgaataaggaaaaggtagtttgctatttcttctatctggggaatgaaatgcgttttatctacataataataattttggtctatcagcctgctgaagtccgatatgccgtatgggattccttttgccataatgcgttcattttattgggatggatgcaaagttaagttttctttttatctccaacaactatccttctgcaattgttgctattattcctattaaataaacaggaggatgagatttataatacctgcattgtgattctgcgaacttttttgttcctttgcgtagaaatcctaaaaccacggacctatgaacctgtttgaattcaatttagcgttaccgataaccgatccgacttgggtgttttttctggtgctaattatcattctctttgctccgatgattctggggcgccttcatatacctcatattatcggtatgattctggccggtgtgctgatcggcgaacacggattccatgtgctcgaccgtgacagcagcttcgaactgtttggtaaagtggggctttactatatcatgttccttgccggactcgaaatggacatggaggacttcaagaaaaaccggatgaagagcgttgtcttcggcttgcttactttcctgattcctatggcgctgggtatatggagcagtatgagcatgctgggatacggttttcttaccgcagtgctgctcgccagtatgtacgcttctcacactttgattgcttatcctattatcagccgttacggattatcccgtctgcgcagtgtcaatattactatcggtggtacggccattacggtcactcttgcccttatcatccttgccgttattggcggaatgtttaaaggcaccgtcgatggtctgttctgggtgttcctcgttgcgaaagtagccttccttggtttccttattatcttcttcttcccccgcatcggacgctggttcttccggaagtatgacgatagcgtgatgcagttcgtgttcgtgctggcgatggtcttcctcggaggcggactgatggagtttgtaggaatggaaggaattttgggagctttccttgccggattggtcctgaaccgcttgattcctcatgtctctccgctgatgaaccgtctggaatttgtgggaaatgccttgttcattccttactttctgatcggtgtcggtatgattatcgatgtcagaagcctgtttacggggggcgaagcattgaaagtggcggtagtcatgacagtggtagctactttcagtaaatggcttgccgcatggatcacgcagaagatttaccgtatgcagcccaatgaacgcagcatgatcttcggactcagtaatgcacaggcggcggctacgctggcagcggtgctgatcgggcacgaaattatcatggaaaacggagagcgtctgctcaatgatgacgtactgaacggtacggtcgtgatgatccttttcacctgtgtcatcagttcgctggtaacggaacgttccgcccgccggtttgcactgaacgaagatgcgcagcccgaagataagggagcgaagaaagcgatggagcagattctgattccggtagctaatccggaaacgattgagaacctggtgaatctcgccctggtgatcaaggatgccaagcagaagaatggcatgattgccctgaatgtgattaatgacaataacagctcggagaataaggaactgcaaggcaagcggaatctcgaaaaagccgcaatgattgccgctgccgccgatgtaccggtgacgatggtaagccgctacgatctgaacattgcttcggggattatacatacgattaaggaatatgaggctacggatgtagtgatcggtctgcaccgcaaggcgaatatcgtcgattccttctttggcaaccttgccgaaagcctgctgaaaggtactcaccgcgaagtgatgatagccaaattcctgatgccggtcaatacgctccgccgcatcatcatcgccgttccgcccaaagccgaatttgaaaccggtttttccaaatgggtagagcatttctgccggatgggaagcattctcggctgccgtgtgcacttctttgccaacgaacgtacactgatgcgtctgcaacaactggtgaagaagaaattcagcggtaccccgaccgaattttctctgctcgaagagtggggcgaccttctgctgctgaccggacaggtgaactacgatcatttattcgttgtcatctctgcccgtcggggttctatctcgtatgatccgtcctttgaacgtctgccggcacagctgagcaagtatttctccaacaacagtctgattatcctgtaccccgaccagttcggtgatccgcaggagattgtgtctttctccgacccgcgtggttacaacgaatcgcagcattatgaaaaggtgggcaaatggttttataaatggtttaagaaaagctgatggaagaaaataactggcaacaacggacagaactcctgttgggagaagagaaaatgaagcgtatccgtgcttcgcatgtattggttgtcgggctgggaggcgtgggggcgtatgctgccgaaatgctttgccgggctggggtaggcaggatgacgattgtagacgcggataccgtgcagcctaccaatatgaaccgtcagcttcctgccatgcactccaccctggggatgccgaaagcggaagtgttggcggcacgctaccaagacatcaatccggatattgaactgaccgttttacccgtctatctgaaagacgagaacatccccgaactgttggactccgctaagtttgacttcatagtggatgccatcgatacgatcagccccaaatgctttctgatctatgaagcgatgaagcgtcatataaagattgtttccagcatgggcgcaggcgcgaagagcgatattacgcagattcgctttgccgatctttgggatacctatcactgcggactcagcaaagcggtgcggaagcgtttgcagaaaatgggagtaaagcgtaaacttcccgtcgtattcagtaccgaacaggcggacccgaaagcggtattgctcacggatgacgaacggaataagaaatcgacctgcggaacggtcagctatatgccggcagtcttcggctgctatctggcggaatatgtcattaaacgaatctaagaagctattatgataaaattagaaggaataaccaagagttttggttctttgcaggtgctgaaaggcattgacctggaaatcaataaaggtgagatcgtcagtatcgtaggacctagcggagccggaaaaacgactctcttacagatcatgggaacgcttgacgaaccggatgcgggcacggtggcgattgacggaacggtagtcagccggatgaaggagaaagaactgtccgctttccgcaataagaatatcggttttgtgtttcagtttcatcagcttctgccggagtttaccgcgttggagaatgtgatgatccccgcatttatcgccggagtatcgtctaaggaagcaaacgaacgtgctatggagatactggctttcatgggactcaccgaccgtgcttcccataagccgaacgaactgtcgggaggagagaagcaacgggtggccgtagcacgtgccttgattaaccatccggcagtcatccttgcggacgaaccttccggaagtctcgatacacataataaagaagatttacaccaattgttcttcgacctgagggaccggttgggacagactttcgtcatcgttacccatgatgaaggactggccaaaatcaccgatagaacggtacatatggtggatggcacaattaaaaaagattaataaggaaaccaaacttctaaaaatggataccaaatcactagaagattgtgtgagttcaatcttttagctatatatttatagtcgcttctctacgtaagtctgtgaagatgtcagtagagtgtttgttttgtttgtgtgtgatgcattcttgtctggtgtgataggaatgcatctttttttatatatcacaacaaatacgattctagtcgtaacaaacataaggcgccattcgttcgaaatctgcgggtgtgaattcctcgtaaagcatcagttgtttcaagtctcttactttccccttcttcttccggtactctgcaatgaccttggcttgataatagctgatgtacggatgatgcatcattcgctctacacttgccttattgatgttgatccggtgaatctttccggcatccacggagaaccacgaacggagtttttccgcttttaaccgaatctcccctaactgttctatttgatagaatcctcccaataaccggcgacggtttacaatcgatcgggcaatccggcttccgatccccggaatctttttaagttcggtggtatccgcctgattaaggtcgatgatagtgcccggcgggtatttcattaaagtatcatatggggcagtcgcttgtactactaatatccggctggtatcttgaaggaccggtgtttcggcaatgcgtatatacggttgaagagtccggtattgttcttccgtcagcccgtatattttccgaaagtcttccggacgtcggaatctgccttgctttctgcggtatcgcagaatattacctgccatccagggaggcaagccgagactgaggaaagtggcggagtcggcggtattcggatcgaacgctgtcggtctgatttcttttttcggataggcgggcgatgaatacttgtctctgtaaaccggatatttcttgttctgctttacttcttttatggaagagataaattcattatattccttttcggatttctcctgttcagccgggtcggttttctccggtccggagaaagcttgcaagagtgcggggattgtgtatacccctataataagaacgacaaggacgataatgccttgtcgttcggttttagtaaaataaaaaaagtctttccacattatagtttgataagtcccaactcattgataaagatcagagagatggcaatcggtgcgatatatcttaatataaagatgatcagtttgtatacgggaactttcagcgaaccgtcattggtgatctccgaccagacaatctttttgtcgagataccatccggtaaagatagaaacacacagaccgccgagtgtcagcatgatcttcgctgtgacaaagtcgaacaagtcaaagattcccagtccgaagatggtgaatcctttcatcactccgagcgacaatgaacaaaggatacctagggtgatacatcctccggtcaccagtctggctgccttgccgcgtgtgaagttgaattcttcgtgcagataagcggtgaccacttcgtgcagagaaatggtggaagtcagcgctgccatggcaagcaatacgtaaaacatgacggagaagatataggccaatatcggtactccgctgaatgcctgctggaatacattgggcagtgtgataaagataaggctcggacccgcgtccggttgtatccctacagagaatgcggccggaaagataatgaagcctgccaatactgctacaaacgtgtctataatccctacgctgaatgctgtcttggtcagattggtttctttgctgaaataagaagcgtaggtgcagagacatcccatccccagactaagggagaagaaagcctgtcccatcgcactcagaaatacatttccgtccaccttgctgaaatccggtttcagcagaaactcgatacccgcaccagctcccggcagggtaaccgaacagattacaagtatcaatataataatgaacagagtcggcatcatgatcttggaagatttctcgatacctttctccacacctttgacaataataaaatgagtaaccaacagaaacagaaccaaccacaagaccggtcgccacggactgctggagaactgctggaaggaagagatgaattctgtgggagtcttacccgtaaagccgttcgtaagagcttcatacacatactccagcgtccatcctgccactacggaataataactgagaatcagaaaagctgcgaggactcccatgcgtcccacccagcgccaatgagtgccgggagctaatttctgataggctcccgctgtatttgccctcgaacggcgtccgattaggaattcggcaatcaaaatgggaagtcccaaaagaaaaacgcatcctaaatagatcagtataaaggctgcgccaccgtgattacccgtttcatagggaaatctccagatgtttcccaatcctactgccgagccggcggaagcaagtattacgcctaatttacttccgaagttcgctctatcaattttcgtcataaatcttgttttgtcttacaaatcgttataaaatgtacgtattaaaatgcaaatatagaaaatgatagttatatttgtaccggaatcgtaattttatttagatatgctatcttatattaagaaatatcctatttcactttttatcatcttaactgtgatttatctgtctttcttcaaacctcctaaaacggacttgaatgaaatccctaacttagataaattagttcacatctgtatgtactttggtatgtcaggtatgttatggctggaatttctgcgggcgcatcgtcgtgatgacgcaccgttatggcacgcatgggtaggggcattcctctgtcccatactgttcagcggctgtgtggaattgctgcaagaatattgcacgacttatcggggaggagactggctggactttgccgccaactcggtgggtgccatccttgccagtttagtggcttattatgtggttcgtccgcgaatgatgagaagggaatagaagactgtagtaatgcataatcatactcatgcctatgagaaaaaattctcattgcagtgagaaaatattctcataggcatgagtattttttctcatcgtggtgagaattttttttcaaaggcatgagaatactttgagaaattaacagcgatattatagataatctacaaccgaactgagtttaattccgttggaccctttgatcaggatagtgtatcctttcggcttgtcggcctccagttcctttattacttcctgtacgttgggataggtttggaaggagtgctctgctgctgcaaactgatctcctaccagccatactttttcgaacgcgcattctttgaggtagtctgctatcttctgatgttcggcagcgctttcggcacccagttcgcgcatatcaccaaggatgagcattttgtgaggaacttccatgttgcggaagttctgtaaggcagccatcatgctggtcggattggcgttgtatgcgtcgatgatcagtgtgttatcgtccgttttctttagttgcgagcggttgttctgtggtgtatatccggctaaggcttcgttgatctttgcatcttccactccgaagaagcgaccgatggtgatggcagccagtgcattggggaagttgtattctccgatcagttgcgtctgaacctgataggatttaccatccttgcccgctttccattcgaaagtgagataaggggagttgccggtgattcgtccgtttacgtaaaggtcatcttcggtgccgtaagggatcaggttcagtccttcggcaatgttcatcagataagcattgtcgtgatggataaagacggtagaaccttctttcttacggagaaagtcataaagttctcctttggtttttatcacaccttcgaaagaaccgaagccttccaaatgggctttgcctacattggtgatgataccgcagtccggctctacgatttcgctgaggaatttgatttctcccggatgattggcgcccatctcgatgacggcaaggtcgtgttccgctttcaggcggagcagggtagagggcacgccgatgtggttgttcagattacctagcgtataaagaatgttgtggctctgagagagtacggcggagatcagttccttcgtagtcgtcttgccgttggtaccagtgataccgattactcgtgtacccagctggcggcggtggtaattggcaagctgctgcaatgtttgcaggcagtcgtctacgagtatatatcgttgatcgccttcaatcgcgtattcggattcgtcgatgacagcataggcgcaaccggtttccaatgcttttccggcaaaagcgtttccattgaatgactcgcctttcagagcgataaacagtgatccttcaggacagttccgactatcggtcgtcactaattggcaatccagaaatatctggtaaagagcagaaagtttcatagcctgagcttttatttttaaatgttgcaaagataggctattctttcggatttggtatcggtcagaagcgttttttactcagcatataccaaaggaagagtcagcaccatccggcacccgtccgtataggatgaatcgatgtggaggatgcctcctaacttttcggcaatcgtccggctgatcgacagtccgaggcccgtgccctgtgagaaggagttcattttgtagaagcgttcgaatactttttcctgtttctccttagggattcctataccggtgtcagtaacgctgatctcgagtttcttttctgcttccaataccgaataagtcagttcgatgctgccatgagtcgtgaatttgatcgcattgtgtgccagattggcaagtaactgcgaaatgcgttccggattgctgagtatgattagtttttccctttccggtttgaaaaggaattcgactgtgtcttgtttctgcattttagctacttcgatagatagctggcagatcatattgatatccgtttggatatttgtagggagcttgttatattggtcgagctccgacaatgcgagcacatcggtcacgagtcgaagcagatcgtccgtgttggctttgatgatgttgacgaattctttcgtttcctcattgccgtagtggtcacttaatacttgtgagaagcctatgatcgaattgagcggtgtccgtatttcgtgagacatactctgaataaaagtcgttttcatctggctggtcgcttctgcctgatctctggctttgcgcagttcttctctcgaataagtcagttcttcgttcttatttcttaattcactttccgaggccttcagcctccggttcagacggctttcccgatataagaacaagaagaggatggttaacaggatgatcaatgaaaaaatcagcgtcgttttattgctcaactccttttcttttgtccgaagcattaattcctttttctccgcattgagcttttctacatttagcagcgtggcatattcgctgctcgccagttgttcattggctattttcaaagaatcgtctacttcaatatactttttcagaaatttcaccgcttcatccggtctgcccatctgtctgtagatttctcctttgaggcggtattgtccgctgctcatggcgtactcattcagccgttgctcttcggctttctgcttctcgacagcttccagtgccttgacgaactgtttgctgcgctggtagtagaaagcctctgtgcggtaaaacctttttttgagtgagtccagccttttgtcctggtcgaacagttccctgcattctttcagcatcttctccgctgctgagaaatctttaaattcactgtaatactctacgtatgtcagctttgccagtattttatggctggcggagttggctgtttttactgctttttccagtgcttccagcgctggttccggctgatgatgcgtaatgtagtaattggcaagttgagcgtaagtattactgatgttatagttttctaatttgtatttttcggtcagttcgatttctttcacgcgccattcggacgccatgacatcaaagttcttgattgtgtaaatctgcgacatgatgttgtagcagtacatgagtccggtcttgttgtcctcggcttgtgcctctttcagcactttttcggcttcatagagggcgatgttacttcttccggttttcaggtaatataggatcagccggttggcccaggcgaaatagtagtacttggactgctgtatttctttagcgaattgttttaccttattggtataaaaaatgatgctgtcttcattattggcctggtaataataatagtccagccgggtggagagagctaccgcctgcatccgctggtcgttttgtccgctagccatacggaacagcgtatcggacatactcagcacgaccggttccagcaaatgttcctggcaacgctgatagtaggcatacaaagaggaatcaacgttataaacttcagcttctttctgggcttttgcaggaataacgatgaacaaaaaagagacaaggtatcctaagataattcgggacaatcggctcatggtattcgttttcggtagttctattgattgctattgattgcaaatatacgtttatttcctaattttaatacgaatacttgctttttttatctacatttgcaacagtctaactggaatataatcaagaatgaaattgatctctccaacttatataaatgtgaaaggacgtctgctcgatcttgctactccgcaagtgatgggtattctcaatgtgacacccgattctttttattccggcagccggatgcagacgcaggaggaaattgcggcgagggcacggcagatcatcgatgaaggagcctctatcattgatatcggagcttactcctcgcgcccgaacgccgaacacatcactgccgaagaagaaatgaaccgcttacgtaccggactggagatcgtaaaccggaatcatccggatgctatcgtttcggtcgatactttccgggcggatgtagccgaacagtgtgtggaggagtatggcgtagctatcgtcaatgatatcgctgccggtgagatggacaaccggatgtttgagactgtggcccgcctgggagtcccttatatcatgatgcacatgcagggaactccccaaaatatgcagaaagaaccccattatgataatttgatgaaggaagtgttcatgtactttgctcgcaaggtgcaacaacttcgtgaattgggtctgaaagacattatactcgatccgggttttggttttgggaagacactggagcataattatgagttgatggctcatttggaagagttcagcattttcgaacttccactgttagtcggtgtttcccggaaatcaatgatttataaactattgggaggaactccgcaggattcattgaatggaacaaccgtactggataccgttgcgttaatgaaaggagcgaacattcttcgggtgcatgacgtgcgcgaagcggtggaagccgtccggattgtggataaactgagaactgagagtgaatatggcaaatgatagaatggcattatccgttggtgatactctcttgtcgtttgtgaattaataacttgtaataagtaataagtaccgtgttttttgacgttggcataaaagattttatcgatgtactgctggtcgcccttctgttgtactacacctacaaactgatgaaggcctccggctctatcaaggtttttaccggcattctggtttttatcctgatctggctggtggtcactcagattctggagatgaaactgctgggctccatattcgataccttgatgaatgtgggtgtgattgctttgatcgtcctttttcaggatgagattcgtcgtttcctcttgacgctgggctcgcatcggcatgtcagtgcattggcgcattttttcagcggggcgaggaaagaagccttgaaacatgatgatatcatgccggtggtaatggcttgcctgagcatgggaaagcagaaagtaggcgcattgatcgtgatcgagcataccactccgctggatgaagtggtccgtacaggagaaattatagatgcggctatcagccagcgtctgattgagaatatattttttaagaacagtcctctgcacgacggagcaatggttatcagcaaaaaacggatcaaagccgcaggctgtatcctgccagtctctcacgacctgaacatcccgaaagaactgggcttgcgtcaccgtgcggctatgggcatctcgcagaaatcggatgcgcacgccatcatcgtctccgaagagacaggagctatttctgtagcttatcgcggacaattctatcttcgtctgaatgccgaagaactggaaagtctgctgacaaaagaaaactgaaactaaatataagtgaacatggacagacgaaattttctaaaaaccggaggtatagctctactcggatcattggcgacaggttctgctatggctctgactaccccgggtgcattgggcggcgaaggagctgacaagaaagcagcagttgctttggctatgaatcatttcggagtaagcgaggcagacttgaagaaggtgcttgccgcggcattggagaaaggaggcgattatgccgaccttttctttgaacacacgatatccaacagcatccgcctgatggatggtgcagtgaacaacagttattcgaatattgactatggagtcggagtccgtgtactgattggagaccagagtggctatgcctacgtggagaatattactgtggaggatatgctgaaagctgcccgtactgccgcccgcatcgcttccgccaacaaaggcaacaaaccgctgaatctcaccgaaaaggaactgaagaagaactattataccgttgcttctccgtgggaggaagtcagcctgaaagataagatgccttatctgcaaaaactgaacgaccggattttcgctttggacaaacgggtacataaagtacaggcaagtcagagcgataccacttcgcatatcttcttctgcaattcggagggagtgatgttctacgattaccgtccgatggtgacgctgggtgccgtgtgcatcatggaagaagacggaaagacggagaacggctacgctgcccgtgcttaccgcagaggattcgatttcctgtcggacgaggtagtggacgtaatcgcccgcgaagcggtagaccagacttctcttctgttcaaggctatcaaacccaaaggcggtgaaatgcctgttgtcatgggtgccggaggatcgggtatcttgcttcacgaggctatcggacatacttttgaggcggacttcaaccggaagaatgtttccatatttgccgatcagctgaataagaaagtctgcaacgaacatatcaacgtggtggatgacggtacgattccgttcaatcggggttcggtgaacttcgatgatgaaggtgccgaaggacagaaaacttatctgattaaagacggagtactgactagttatctgcacgaccgtatcagtgcaaagcactacggagtggaaccaaccggcaacggacgtcgcgaatcgttccgcaatatgccgataccccgtatgcgtgctacatatatggaagccggaaatgtgagcgaatcggatatcatttcttctgtaaagaagggaatctttgtagataactttacgaacggtcaggtacagattggtgccggagactttacattctttgtgaagtcgggctacatgatcgaagacggtaaactgacgcaaccgatcaaggacattaatattatcggtaacggtccgaaagctttggcggatatcacgatggtagctaccaatgcgaagatcgacaacggtacatggacttgcggaaaagacggacaatcctgtccggtgacttgcggtatgccttcagccttggttagcaaactgactgtcggtggagagaactagaagtaaatgcttactttaaaaagacgaacctatgattacagacgaaaataagaaactggcacagtgggcgatggactacgccttgaagaatggctgccaggcagcaaaagtccttttatactcttcttcgaacacttctttcgaactgcgcgatgcgaagatggacagattgcaacaggcatcggaaggcggattaagcctttccctgtatgtggacggacgttatggtagtatctctaccaaccgcctgaaccggaaagagctcgaaacatttatcaaaaacggaatagactctacacgctatctggctaaagatgaggcgcgtgtattggcggacccttcccgttactataaaggtgggaaaccggacttaaagctatatgatgccaagttcgcatccttaaatccggacgataaaatagagatggcgaaagccgtagcggaagaagcactaggcaaggacgaacggatcatctctgtcggttcttcctatggcgatggcgaggactttgcttaccacctgatcagcaatggtttcgaaggagaaaccaaaagtacgtggtactcactttctgccgacatcacgatcagaggggaaggcgaggcgcgtccttctgcttattggtatgagtcgtcgctttatatgaacgatctgattaagaaaggaatcggtcagaaagcgctggaacgtgtattacgcaaactgggacaaaagaaagtacagtccggcaaatatacgatggtggtcgatccgatgaattccagccgtttgctaagtccgatgatcagtgcgctgaacggctcggctttgcaacagaaaaactcattcttattaaataaattgaatgaaaagatagctagtgaccgactgactttgacggacgaacctcatttggtgaaagcctccggcgcccgctatttcgacaacgaaggtattgctacggaacgtcgctccatctttgacaagggagtactgaatacctatttcattgatacctacaatgctaagaagatgggagtcgatccgactatcagcggttcatctattctggtcatggaaacgggagataagaatctggatggactgattgccggagtggaaaaaggtatcctcgttacgggctttaatggtggtaacaacaacagttcgaccggagatttctcttatggcatcgaaggtttcctgattgagaatggaaaactgacgcaaccggtatccgagatgaatgttaccggcaatctgattaccttgtggaactcgttggttgcaaccggaaacgacccgcgtctgaactcctcctggcgtatcccttcactggtatttgagggagtcgatttcagcggattgtagacactgactttgaatagacttaagtaatggtcaggagatgatggtcataaaatggacatcatcttctgaccattactgtaatattaccctctgaattttataaatataccctgctataccccgtcttctgcctaactaatgctttattaattaacgtattatctgatttttgcttacctgtatttataccccctctttgtttgctaatttgtgggatgctgtttacttttgcctgtgtcaaaattgaataggatataactattgaaaactgatatacacacaaaagtaaaagcatgggaattatatattttggatcgggacttatactgctaatcgcactttggtatatttgggcagtcaacaatttgatcgctaagcgaaacagggtgaagcaatgtcgtagcggtatttgcgtggcattaaagcagcggaatgacatgatacctaatttggtggccgccgttaagtcatatatgggtcatgaaaatgaaattcttacccgcattacggaacttcgatcacattctttccaaccttcacaggaagccgaacaaataaaaagtggcaatgaattgtccggtctgttaaccaaattacagttgtcggtcgagaattaccctgaactgaaagcgaatgaacaattccatcgcctgcaaaacagtattgaggacatggaactgcaactgcaagccatccggcgcacctataatgcggcagtaacagactacaataataccatcgagatgtttccttcttccgttgttgcccgtcagcaaggtcatcatcaggaagaactgattgatattcccgaaccggaacaacagaatgtaaatgtcgccgaacttctcagataatacgaatatggacacaattgattttaagaaattatcagaacagcttcgttcggagcttttacgggtaaatggctggagaaaggtggtacgaacaggaagtattgcagtttatctttttgtattctgctggtttatgtttgtgttgtttggcggtgcgcttgtatcttatataggtcttgagaactatatgcagttcacgcagtatataatacctgtattcattggatttatagtggtcaacttcgttttcacccgctgtatgactaactttcaggaacgggagtcggaagctatgcagcacattatgtctactctgtttcctactgtttatttctcggcttcctctcaggtagacagccggatattgagagacagcaaactcttttccacctctttttctgattcggcactggcagccaatacatatggatatattcagtttccgcacggcgagcactctttgcacgtggcggatatcggtgtgtcttacgggctgttgaataagttgcagtacaatcctgtattgggatattttgtcatgatctaccgttttgtgcttcgtccgctgtttgcctcgcggctggatagcagtccgcacaattttcggggtatgtttgcctggtgtaagatagacaagcgattcaaaggaaatattatcatattgcccgaccacttagaacaaaagatcggatatctggcgaagaatatccaggggttgaagaagcgctatagtgcccgactggtacaactggaagatcaggagtttgagaactattttgccgtttatgccgatgatgaagtagaagcacgtatgttgctcactcctgcgatgatgcgtcatatgacggcgctgcgccagactttcggatgtgatatcatgctttcgttcagcagaggtactttctactatgccgccgtgatgccttccggttttttatgtgtgcgtccaagtgcgttgaatgacgggaagctgcttgaggacatatataatgatatcagcctgtcctgcaaagtggcagaggaattaagattgaattagtattaacaataaaacaaaaacactatttatgacagacatgagttggatgccttgggtcgtaggcggagtaatggtcctttcttttctttatatgaaggtatggccatttgtccgtactattataagagcttttcgggggcctcgttttaaatcaaaatcaaaattatccgtagaacagtataaaaaactgtctataggttcattgtatgccttgcagcaaggcggatatctgaacactctctcgttggatatcaaagataagttgcctactattctcggtgaatggtggggaataaataatgctcatgatgcccgcgaaacattggatgatttgtgccggaaaggttacgattactactttccgtttgtttatgaggcttttttgcttaacgatgaaaatgcgcaagacgatattttccagcagaacatggagagtcaggaagattatgaaaaagctgtcgggcaactgcaaaatttgaaagaggtctatgaggagttgatagcttatgaagtgattacttctaaagaagatatagcccgctatggagtgattggctgggatgccggcagaattaattttgttgcccgtgcctgctgcgatatgaaatatatctcagaaatggaagcgtggaattatatcgacaaggcgtatgaattggctcattcttctttcacatcatggcacgatatggcgatgagttatgttattggcagggctatctggggagggaccaatgctcacaatttaggaatgaagggaatggcagacgatctgttgtctaatcctaagagcccttgggtgcaaatcaaatggtaaattgatcaagatagtttaatcacaaaaacacataattatggaacaaaagaacaacaagtactacagttacatcagcgagtattatgccgccaacccgactaaatttgaaaaaagaaagaacaatctgaaacctgtgttatatttaggtttggccgtggtaggagccgttctggctatttttcccggtttgcttccattggtaggctggttggtgcgtacagccggaatcatcatgacactggtttgcctgatagctgcctatctgaataactttgatatatacaactttcaaagtggaggaaaagtcaagagtatgggagtcaagaagtttaagcgtgatgagacaaaccctgcgaagatagtggaagctttcttatccaggaactttgaatatctggcagaccttcccggaggaagaagtgaaccggtacaacttcatattgaagaagacgccacaggacgtgaaatgtactgtttgctgaccacttatgattcagattcgaatattgtaggtttggcagatgtcatcactttatcgggtaatgattatgatgataatattgatctaattaaacaaatgtttaaagacgaagaagataattgattcatcggggctggattataaaacagctctgaggagaagaaaactcttctaaatggaagaaaaaacacaagaaagaaaaacattcatactataaaggaaatcgaccggaggggcgggtacagacacaagtaacctgtcaacaaaaggtcgtatttcctttaaaaataatctgtctcaggggattttgctttatttctaaccttttttgaatgataattggtacctgcggtttaggtgaatcgcctatctttgccgtatactatatataattataattctatattgagataaaagccatgagacacagatttattgctttactagtactttttacagtcatctttttcagtagtgcagaggcgcagactactgcccgtaagtttgaggcaggcaagaatactttcttgctggacgggaagccgttcgtagtaaaagctgccgaactgcactatacccgtattccgcaagcctattgggatcatcgtattgagatgtgtaaggcgttgggaatgaacactatttgtatttatatcttctggaatatacacgaacaggaagaaggcaagtttgactttacaggtcagaatgatatcgctgccttctgtcgtgccgctcagaaacacggaatgtatgtcatcatccgccccggtccgtatgtgtgtgcggaatgggaaatgggcggcctgccctggtggttgctgaagaagaaagatgtggcactgcgcacgctcgatccttattatatggaacgggtaggcatcttcatgaaagaagtcggtaagcaactggcgccgctacaggtaaataagggcggaaatattatcatggtgcaggtggagaacgaatacggttcttacggcactgacaagccttatgtttctgccgtacgcgacttggtgcgcgaatccggttttaccgatgtacctctcttccaatgcgactggagcagtaactttacacggaatgcactcgacgacctgatctggaccatcaacttcggaacaggcgccaatatagaccagcaatttaagaaactgaaagaacttcgtccggaaactccgttgatgtgcagcgagttctggagcggatggttcgaccactggggacggaaacatgaaacacgtcctgccaaagatatggtacagggcatcaaagaaatgctcgaccgcaacatctccttcagcctttatatgactcacggaggaacgactttcggacattggggtggtgccaacaatcctgcctactccgctatgtgcagttcttacgactacgatgccccgatcagcgaagccggatggacgacagagaaatactatctcctccgcgacctgctgaaaacgtatcttcctgccggtgaagcactgccggaagtccctgctgcaatgccggtcattgaagtacccgaatttcattttaccaaagtagctccgcttttctccaacttgccggatgccaaacagtcggtggatatccagccgatggagcaattcaaccaagggtggggaacaatcctgtaccgtaccacattgcccgaagcagtaacctcaggcactacattgaaaatcaccgaagtgcacgactgggcacaaatctacgctgatggcaagctgctggcccgtctcgaccgccgcaaaggagaatttaccactatcttgccggccttgaagaaaggtacgcaactggatattctggtagaggcaatgggacgtgtcaactttgataagtccatccacgaccggaagggaatcaccgaaaaggtagaactcctttcgggcaatcaggtgaaagaactgaaaaactggactgtatataacttccccgtagactactcatttatcaagaacaagaactacaaggatacgaagatattaccgactatgcccgcttactatcgatcatctttcaaactcgataaagtaggcgacactttcctcgacatgagcacatggggcaaaggtatggtatgggtgaacggtcatgcgatgggacgtttctgggaaatcggtccccagcagacactcttcataccgggctgctggctgaaagaaggcgagaatgaaattctcgttctcgacctgaaaggtccgacgaaatcatcaatcaaaggtctgaagaaaccgatcctcgacgtactccgcgagaaagcaccggaaacacatcgcaaggatggagaaaagttgaagctgacaggagaaaaggttgcgcacgaaggagccttcactccgggcaacggctggcaggaagtacgtttcgccgctccggtgaaaggacgtttcttctgtctggaagcactctctccgcaagccaataacaatattgccgctattgcagagttcgatgtgctgggagccgacggcaaacccgtatcccgcgaacattggaaaatccgttatgccgatagcgaagagacacgcagcggaaaccgtacggcggataagatattcgacttgcaggaatccactttctggatgaccgttgataatgtcgcttatccccaccaactggtaatcgacctgagcaaagtggaaacagtgactggcttccgttatctgccccgtgccgagaaggactttccgggcatgattcgtgaataccgcgtctatgtgaaaccgtctgatttcaagtattaaaccaataataagccaatatcggccttttgataataaagcattcactttataaataagcatttactctcaaatgaatatgaaaaaatatactttacttctggcactccttttagtaggagtgctgacaggatacagccagcagtctgcctacctgtttgtctatttcaccggaaacaggatgagtgaggaagccatccggatggctgtcagccccgatggatacaactactatgcattgaacggaaaccagccggtcattgattcccgtgaaatcagttctacgggtggagtgcgtgacccgcacatccttcgttgtgaagacggaaagacattctacatggtcgtaaccgacatggtctccggcaacggatggagttctaaccgtgccatggtactgttgaaatcgaaagatctcgtcaactggacctccaacatcgtgaacatccagaagaaatacccgaaccaggaagatttgaaacgggtatgggcaccgcaaactatttatgataaagaagcgaagaaatacatggtctactggtcaatgcagcatggcaacggcccggacattatttattacgcatacgccaacaaagatttcaccgatatagaaggagaacccaaaactttgttcctcccgaagaatggcaagtcctgtattgacggagacatcatttacaaagacggactttaccacctgttctataaaacggaaggagacggcaatggaattaaaaaagcaaccaccgcctccctgacctccggacaatggaaagaatcggaagattataagcaacagacgaaagaagctgtagaaggtgccggcatcttcccgctgataggtacggacaagtacatcctgatgtacgatgtatatatgaaaggcaagtatcagtttacggaaagcaccgatttggagaatttcaaagtcatagacaatgccattagcatgaacttccatccgcgccacggcaccgtaatgccgataacctacaaggagctgaaacgcttgtacaaggcctacggcaaacccgataagatgtaaagccatcagatgcaccatcatcaggttataatagcccataaataaataccatgaaaaaactcctgttgttcattttgcttgtctgtgcaacagtacaggcctattcgcaagaatacccgaaagtcattttgtcgggtgactacccggacccttctgtcatgcgcgatggtgaggattattacatgactcattctcctttttactacgctcccggattcctcatatggcactcccgtgacttgatgaactgggaacccgtttgccgcgtaatgcccgaatacgaaggctctgcaatggcgcccgacttattgaagtacaaaggaaaatactacatctattatccggccaaaggaacaaactgggtgatctgggcaaatgacatcaagggcccgtggagcaaacccatcgacttgaaagtgagtggcattgaccccggacacatagccgatcaggaggggaacagatatttatatgtcgacaaaggagaagtcatccgactgacggacgacggactggccaccatcggccaaaaacagaaagtgtacgaaggctggcgatatcccaaccattgggaaacagaatgtatgtgtctggaatcgccgaagctgaattaccataacggttattattacctgacttccgcgcagggaggaacagccggcccggcaacaagccacatggcagttgctgcccgttcgaagagtgtcaccggaccgtgggaaaattctccctataatccggtagtgcatacctatagcgcccatgacaactggtggtcgaaagggcacggcacactgattgatgatgtgaacggcaactggtgggtcgtatatcatgcctatgccaaaggctatcacaccctgggacgctccaccctcatcgaaccgattgaatggaccgccgacggatggtatcgaaccaaatccaccgccactcccatcaagaccgattcgtccattaaacacggactcaacctctcggatgatttcgcaggaccggaaccgggactccaatggactttctggaaagaatatgcccctcagtcgctcagcttcaagaaacagactttatggatggatgcgaaaggaagtaccccttccgatgcccgcctactgctgaccaccgccgaagacaagaattacgaaacacaggtggaagtcaacgtaggcaagggtaacacagccggacttcttctatattacagcgaaaaggcctactttggagtcgtgtccgacggaaaggacttcactatctacagaaacgcggaaaacagctttaccctccctaacaagttgggcaaacgcttcttcgccaaaatacagaatcagggaaacagtgtccggctggcagtcagcaaggacggtaaggaatggactacgctggtagaaaacatggatgtatctcagttgcaccataacaactacggcggcttctacgctttacgcatcggactgctctcctccggaaaaggcagcgccggcttccgtcagtttcgttaccgcaacgccatcccgcaggaaaaggagatgggggcttacttgatggtcttccataaagacgaaacgcacagcctttacatggccgtcagtgacgacggatatacatttacggccttgaacgatggcaaaccggtgatcgccggagataccatcgccctgcaaaaaggcatccgtgacccgcacatcttccgcggtccggacggagctttctacctttccatgaccgacctgcacatctatgcgcagaaagacggcttccgtgataccgaatgggaacgtgacggaaaagaatacggctggggaaacaaccgcggactcgtactgatgaaatcgtgggacctgatcaactggaaacgtaccaatgcccgtttcgacctgttatcggcaggcttgggtgaaatcggctgcgtatgggcgcccgaagtgacttatgatgacaagaaaggtaaactgatgatttacttcaccatgcatttcaagaacgaggcgaacaaactgtactatgtctatgtcaacgatgacttcgaccggatagagacactcccgcaaatcctcttcgagtatcccaacgagaaaatatcggctatcgacggcgacatcaccaaggtaggcgaccggtatcgtatgttctacgtttcgcacgacggaggcgccggaatcaaacaggccgtatcagaccgcatcaacggtgattacgaatatgaccctcgctggtacgacttcgaacctagggcctgcgaagctcccaacctctggaagcgtatcggagaagacaaatgggtattgatgtatgacgtctacggcatcaacccccataacttcgctttcatcgaaacttccgacttcgtgaatttcaagaacctgggacgtttcaacgaaggagtgatgaagacgactaatttctcgtcgcccaaacacggcgcggtgatccatttgacaaaagaagaagccgccaaactgagaagtcattgggaaaacaggaaataacagagtatcagaccttttttagtgaatacgtactcttttttgcagagatcttatattataatttataccatgaaacatttacttctactatttagtgtattactactatcgttgcagccggccgcatttgccgcaatgcatgaaacgactgctactcccgattcagtatccctttttgcttacgccacccgaggtgacgacggccgtagcggactccgctttgcatggagcatggacgggaaacattggtttgaaataggacaaaactacggctatcttcgttgcgattacggccgttggggatcgcagaagaagatgctcgacccgaatctgaaacaacttcccggcggagaatggctctgtatctggaagttgaacgaccacgacggatacggtcaggccagatcaaaagacctgatctactgggaagcccagcaatatccccgtacgacttccgattttgaaggaacaagagtcaaagcaaagattgccggacacgaagaaacgggaaccgtcagccaagtgccctggtcggtagtggacggactgacccggacgtacgaacggaaccaataccgtaactccctgtatggcgaacgccctgtacaagataaagaacgctttgccggactgaaaccgatcaaagccaccgtcacagcacaaccggaagaaacaaaagaaatcagcgatttattgatgggtatcttcttcgaagacatcaactactccgccgacggcggcctgtatgccgaactgatccagaaccgggacttcgaatacgacccgtccgaccgtgaaggggacaagaactggaacagcacccattcatggaagctggaaggagaaaacgccacctttaccatatcgacttcggatcctatccatccgaacaatccgcattatgccgtcttgaagacgaaccagccgggagccgctctgaccaacaccggttttgacggaatcgcccttaaagcaggcgagaaatatgatttctccttgtttgcccgtatcccggaaggcagcaagtccggaaaactactggtacgcctcgtagatgccgacggcaccgtacagggtgaaacgacagttaccgtctcttcccgttcgtggaaaacgtataaagcagtgctgacagcgaaaacgtccgccgatacccgtctggaacttcgcccgcaatcggcaggtgaaattgaactggatatgatttctctcttcccgcagaatacattcaaaggcagaaagaacggtttgcgtcccgaccttgcacaaacacttgccgatatgcacccgcgctttgtccgtttccccggaggctgcgtggctcatggagacggtttgaagaacatctatcaatggaaaaatactatcggaccgctggaagcccgtaaacctgcccgtaacctttggggatatcaccagagcatgggactgggttattatgaatacttccagttctgcgaagacataggtgcggaaccgcttccggtactggcggcaggtgttccttgtcagaactccgcctgtcatggcgatttgaggggcggtcagcaaggcggtatcccgatgagtgaaatgggtgcttacattcaggatattctcgatttgatagaatgggcgaacggtgatgcaaggaagaccaaatggggcaagatacgtgccgaatccggtcatccgaagcctttcaatctgaaatatatcggcatcggcaatgaagacttgatcaccgatgtcttcgaagaacgtttcacgatgatataccttgctatcaaagagaagtatccggagatgatcgttgtcggtacggtaggccctttcaatgagggaacagactatgtggaaggctggaaactggcggacaaactcggtgttccgatggtagacgaacattattatcagtctccgggatggttcctgcacaatcaggacttctatgacaagtacgaccgctctaaaaaaacgaaagtatatctgggcgaatatgccactcatatctccggacgcagagcgaatatggaaactgctttgaccgaagcgctttatctggctgctttggaacggaatggagacgtagtgcacatgacttcttatgctcctctgctggcaaaagacggacggacgcagtggaatccggacttgatctacttcaacaatcgggaagtaagaccgacaacgggttactatgtgcagaaactctacggtcagcacgcaggcgaccattacatcccttcacaggtaaaccttgataatcaggacagtcgcgtaaaactccgtgttggttcttccatcgttcgtgacagtaagacgggggatgtgattgtgaagttagtcaatctgttgcccgtcagcatagagaccgatgtccggttgccgggaatggatggtatccagtcttccgctacgcggactgtactggcaggtgcacccgaggcgactccgcttccggtgacggatacgatagaggcaggaaccagctttaagcaggaattgcctgcttattcgttcacggtcatccgcttgaagacacaaaaggtgaaataagaaactataaactataaacaataaactggttttcaataggggttagtttattttggggaggggtgctcacctatcacctccccctgtgggtaggggctgactaaaaagtcaatagtatcctaaatctcctccttcgggaaggaggagtacccgtagggggaggtggtaggtgaatacataatcctatcatttacaaagaaataggaacaaacattatttctcctaccacctcggtcttcgaccactcctccttcccgaaggaggagattcgagatagaatcgactttttagtcagcccaggtttaggtattattgacttttgtaccttctcttttcttcttcataatagaaaagatggttttcatctttcaccgaacgggtggttcgtttgctgtctatagtgtaatcagccgtaagatagtactaaagttctctttaacctcttgcatctttgctttttcctatagggaaagtaggaataagacgccgatatctttagttgttcacggccgtgaacaggtctgatcacatccgtgaagagcattgctcacggttgtgatcaattcttgccacggccgtgaacaactaacaatatcggcgtcttaatggaagaataaaggcactataagtgaaagataccggtagtatatggtatttgttgtatagggtcaggggccgaatataggggaacgtaataagtaataagtaacaagtaataagtaataggcattgaatcataagtaataggtaatatgtggtaggatggggaaaggtgacaataaaatgtgtgatatatggctattgtcaccctattatcaccccttattatcaccaaatgattgctgataatcagtttattatccttcaaaggtgataagtgacaatagaaaagcatgttattactatggtacgagttcgatataatccaacaagttgggccatatcgaactcgtgttagttatctgattatcgtcagtttatagcttagcaatcactttcttacctctataggagatggatttgtcaaaggtggttgagtctccgtcgccacagccttttcccggttctacaactatgaggttgaatttgcggcttttcagcattcctttgtagctgcctttccggtcgtcgatggtcagtgtacggtcttggtcgttccatttcaaggtgatggtggagtaagctcccttttcatagttgtaattgtcgaactcatcttcgtaaagggtaaattccgcgttcgctcccggatagatacggatggtcagattgtcccatttcttttccgtagagtattgcacggcgggcccccaggggagaatagagccggcacggacgtagatcggcataatgtcaatcgggacttcacgttgcagggtctgtccgccttccagtgtttgtccggtccagaagtcgatccagcgggcaccttggggaaggtaaacatcggtctttccgattttgctcatgtctttctgatgaccgttttgcttcttgtcttgccatgtatacaatgaatccgtcaccgggcgaaccaggaagttgcgtccgaacatatattcggtgtccatatcgagcactttcttgtctttcgggaagtccatcatgagagggcgcatgatgctgcctgctttgctggtcacttcccaggaagtgctgtagatgtatggcaacaggcggtaacgtaagtgagtgtatttctccagtgcatcgtatgaccagtcgcctttcttgccgaactggtagatttctacggctaccggactggaattgtgtgaacgcatgatcggctggaatactccccactgataccagcggacgtgcagttcatgataggcgatgttgtttacgttattgttatatctccatgcgaagaagccacctaggtctgtattccagtacgggatgccgcataacgcatagttcagtcctgccgctagttgcttgcgcatgacggaccattcggaagttacgtctccgctccatgaatgggaagcataccgttgctgtccgaggaaggaggaacgggtaagcaggaatacgcgcttgtcggaagtagtggcgcgttggtgttcatatacgcctttgttggacattaaggggaaggcgttgtgtaccctgcggaaagaacccagataggtctgcgtgttgaagtcctggtctttgatatccatgtggtccggttcggtggagtcgagccaccaggcatccatacccaggtcgaagatgttctttttcattgcttcccagtagatgtcccgtgctgccggattatacgggtcgtaaggtttgactccggctttgggcggccacgtttcgaaatggagcagtgctttcagactgtccatcttctgatacatttctgtccacggaccgaaggaggcccatacggagatcatgatgtgggcgttctgcttgtgcacgtagtcgatcatttctttggggcttttgatgcgaggagtgccgtagtcggcattcttgtcttctccgttcgggaggaatttcatgtattccgggtcacccatcttgttgatgtagcgtggattctggaatttcatggagttccagttctcgttgcagccccagtattgccagtcttggatgattccatccaaaggaactttcagttcccggtatttgtctacgacttcgcacagttcgtccggacttttgtagcgttcacggcattgccagaagcccagtgtccagagaggatacaacggggcttgtccggtcaggtcgcgtactccggctatgactccgtcggcgttgccgccgtagatgaagtagtagtcggcacagtcgcctacttccgagtcgaaggaggtttcttgcggattgtcgaggaaggtggtaggagagtaattgtcccagtagagggcatagcctttgatggagtggatgaaggggatgcagatactcatgttctggttgcggagaaagagtttctgattgcgttggttcactttgccggtctgctgttggcccagaccgtagattacttcgtccttatccagcagaaaagcctgacggacattgtaggaggggacgcccgcgtcattgaaaggggtaaactgtgttccgtagtctttgtcggtcagcagccgttgccctagcttgtcgaagaagtagatgccgcctgtttcggggttcacttccacttgtatcatctgactgctcaatgttacatttttcccgttttcaccgaaggaaaccggggtttgttccggtgctttgatgacaacgaggctttctttgtcggaagctgtctcaccgggcgtcttatatacccggacgatggaaggcgaataaaattctacactgacgttcatcccttgtgctgcatacttgatgccttgggaagtacgttgtacgttttgtgccgtaccgtttgcggcaatgatcatggcccatgccaacaggatgcctgtttttcttagattcattttcatggtttctttaagtgctttatgatacggcaaaggtaggatggaaggacattttgcggacaatagctatgttgaaacaaacaacaatcaggttgatttcttcatttccttttcttcttttgctttctcatgtggcttctcgttctctgcttgccctgcttttgctctgttctcttcttgtcccattctcttcgctttctctgtatattccgagggacggcatccatacatttcttgaaaacatttgcttaggtagctggaactgctgaagccggtacgttccgctatttcggttacgctcagtttgccttcggcaagtagttgcgctgcccgttggagacggatgttgcggataaagaggctgggggactggtcgagcaaagtcaccagcttgcggtagagtccggtgcgttccatgcagaggtcacggcttagttgctctacggagtagccgttgacgtcgaggttcttttctaccagttctatcgcttgtaccaggaaggcggattctgcactgtccggttcggggatattttgtacagtacggttggactctgcactgtccggttctatgccgtttggcttttcattatcatctgccgtttcgttcctgtcgcagacggaagggtggcttttcttctccgaacgggctttctgttcggcttcatagctgttgcattgctctatcaggttgcggatgcggagcagcaggatttcttctttatgttgctgtttcatctttttcttggtctgatagatatagaggcggatgcttgctaagacaatcagtaacacgaaaaccgtatacagaacgtaggcggtagtcgttttccaccagggagcgtggatagtgacgtgtatctttgtgatgttatcgttccattgtaacaggttgtcggatgcagcgactttgaatgtgtattctcccggcggtagattggtataggatgcctgcaggatgccgttgccgactgttgcattcccttgtccgctggcaaaagcgttcatccattgttggtcgatgccttccagttggtagcggtagtaggtgcgttcgctgttcacgtagttcagtgccgaacattcgaaggtcagaaagttctggttatagtccagttctagctcctttgtgtaaggggcggcttgcggcaggatgatgcggtttccgtacttttctcctgtgtttactttttcaccgtagagatgtaagttggtgaaaaccggtttgtaaggcaggcccggagtggcggattcatggtcgggacggaaaatggtaaagccgtcgatgcctccgaaatagagtgtaccgtccgaagactcaaagatagctccctgtatatattcctcttctaaagccccgtccagttgattgaagttggtaaagccgatttcctgattctccggattgatatggatgcgtgaaatgccattgctggtagttacccagatatagttgtttctgtcttcgatgattgattgtacgaagttattgctcagtccgtcttcacgatagaaaatgcggtgggcttgggtattggatgaggcggggtgattatctgctgtttgtgtggtcggtttgctatccggtgtttgctcttgatcggtgaagagttccagtccgtcggctgtccctgcccatgtccagccacgtgtgtcggtgcatagagcggtgtatgattgccttctgtaatatttgtttccacctctttgatctaattcctttgccaattctgcagagaccgataaggctggtacaggtagcagagtccgtgaaccgtcctgattgacagctagctgatagattgtggaatggcttttcagatagatattgccgttatcatcttctgcaaaagctttgacggcgatgtcctcttccggtgatgcggggaaagcagtgcggctgacgtgaatcagtttgtgtgtggcaggatgatgatagagtaatccccgattgagtgtgcctacccataatccgccttgggcatcctgaaagatggtgctgacttcggtcgaaacgagctttcccttctttgtttccagtacggggatgtattgctgttccctgctttggaggtcgatgatccagaaaccgtgaacacaactgatataagctttatcgccctgtggagtgatgatcagggtgttgagcgtgtagttctgttcgaacagcttctcccatgtccggttttggggattaaagtagaagaatcctcctttgcggccgttgcgtaactggtagaatcctttttggcttttgacaacgagagaagtacggttgaagtcctcctgttccgaggcgggataagcagctctgtcatacaactgctttccggctttcgggtcgtagcaaacgacttcgccggtatgatagaataggtaaaccgcaagttcatccgaatgtatgtcctgtagctttcgatgctcattttccggcagggcgaggcggatgcccgtttccagttcccgcaactcctgagaagtaagtagccagatacgtcccgaattgtcgacgaaaaggtcttctaccggttcgtgtatctcttttccccggaaataggagtcaaggtgaggtatgtatttttcttgatggagatcgatgcacatcagtttatgataatctttaatccataggagtgaatctccgcattgatagatgcggtaacatccttcatactgtttcagcggggaaatgtcttctgccgtgcggtgaaggtagctgaaatgtacgccgtcatacagattgacattcccgttggtggtgaataccattcttccgtcggggagttggagtatgtagcgtatctggttgtcgctcaatccttgtgccgtgttgatcgatgtaaacaggaagtcattggcgtccaccgtcagtgttatcctgatacacaggaggaggaatagtagtattcgggtgtttttctggttatttgccgccattgggataaggattatgatgttcgatgatgcaaagataaaaaaagtcggggttatacttggataaactgttctttttgtaaagggtttcgggagggaatgtctgcatatcaatcaaaaaaggggggaaatcatgcaaacgatgaaagtttgtatgcgaatataattatattccctatttttgcttttgttacaatgaggacatttaatcataaaagaaaaataatattatgaagaaacttgtaagcactttgacagcgattcttggtataagcactcttgcagcacaggatgtggttgtaaaaggaccggacgaaaagttgcagttggcggtatttgtgcaaaacgagacgaagccttgttattctgtgagttacaacggaaagacgatgttggaaaagtctcctttaggcatgaataccaatatcggtgattttacgaagaatcttaaactgaccggacattccgtcgacaagatcgacactgtttatcaacagacacgtatcaaagtttccaacgtacattaccgtgccaatgaactgacttgtcatttagagaatgagcagggacaaaagctgggagttgtttttcgggtgagtgataatgatgtggctttccgctatactttgccgcatcagggaggaaaagcgagtgtgacggtgaaggaagaacaaacaggtttccgctttccggagcagactactactttcttgtgtccgcagagcgatgcgatgattggctggaaacgtacgaaacccagttatgaagaagaatataaagcggatgcgccgatgagcgaccgttcgcagtacggacatgggtatacgttcccttgtttgtttcgtataggaaatgacggttgggtgctggtcagcgagacgggtgtggacagtcgttattgcggttcacgtttgagtgatgtgagtgaagggaatttatatacggtcgcctttccgatggcggaagaaaataatggaaacggaacggtcgctcctgcttttgcactgcccggcgctactccgtggcgtaccatcacagtgggagatcatctgaagccgattgtagaaacaaccgttccgtgggatgtggtaagcccgctttatgaaacaaaacatgattatcgtttcgggcgtggcacgtggagctggattctttggcaggacggcagtatcaactatgatgatcaggtacgttacattgattttgcttcggctatgggatatgagtatgcgttgatcgataactggtgggataccagaatcgggcatcagcgtatgaagtcgctggttgagtatgcacgcgataaaggtgtcgagttgttcttgtggtatagttcttccggctattggaatgacattgaacagggaccggtgaaccgaatggataatgcaatcattcgtaaacgtgaaatgaaatggctgcaaagtctcggtgtgaagggaatcaaggttgatttcttcggcggtgacaagcaggagacaatgcggctgtatgaagatattctgagcgatgcggacgatcacggattgatggtgattttccacggttgcacattacctcgcggatgggagcgtatgtatccgaattatgtgggcagtgaagcagtgctggcttcggaaaatatggtgttcaatcagcatttctgtgatgaggaagcgttcaatacttgcctgcatccgtttatccgcaatacggtgggatcgatggagtttggcggctgctttctgaataagcgcctgaaccgtaataacgacggcggtacgacacgccggactacggacgtgttccagttggcgactaccgttctctttcagaatccggttcagaactttgcactggctcctaacaatctgaaagatgttccggctgtttgcatggactttatgaagcgggtgcccacaacgtgggatgagacacggtttgttgatggctatccggggaagtatgtggtgttggcccgtcgtcagggagatacctggtatctggcggctgtaaatgccggcaaagaaccgctgaaactaaaactggatttggaaatgtttgccggaaagacggtggctctttataaggatgataaaaagggagaaccggagttaacgtcactgaaagtgaaggaaaacggtaaggtgcagttggaaatccgccctcaaggaggtattctttgtataaagtagcctgtcaatatggtttatttgtaaatgctgttactttaaatatcggtattgtcttatcgtaaatcgtatttatcctattaaacttaccagaaaaaaagtacgtttgcattgtcttattcaactgtaatttttgtatgaatcaggcattaactttggataatagataatagtatgcaaaaacagatcttttttagttttgtgctggtaatgatgttgttagggaaagtgaaagctcagcacaataatccttttggcaatgcattgattccggatatgattgccgatgcgagtattcaggaaattaatggtgtcttttattgctatgccactactgatggctatgggcagggacttaaaacatcaggccctccggtagtatggaaatcaaaagactttgtacactggagttttgatggaacttacttcccttcggctgcaaaggagaagtattgggctcccagtaaagcaatttttgctaatggtaaatattatatatatcccactatcaatgggtatatgtatcctgctgtagctgataagcctgaaggaccgtttaaactggcacgtgggaaagacgaattctataagccttttactccttctactttattgcagagtaagaatccgggcgggattgatgctgaaatctttgttgacgacgatggacaggcttatgtgttttggggacgaaggcatgtagccaaactcaacgaggatatgattacggtggattctgtagtacaggtaatttctactcctcgcaaggagtactctgagggacctatctttttcaaacgtaaaggaatatattattatttgtacactatcggaggggatgagaaatatcaatatgcgtatgtaatgagccgggtttcccctatgggaccttttgaagctcctgaacaggatataatatctactaccaattatgaacggggaatcttcggaccgggacatggttgtgtctttcatcttgagggtacggataattattatttcgcatatttagagtttggcaggcgaagtacaaaccgtcagacatatgtgaatcaactgaaatttaatgaagacggtacgattcgccctgtcgaactaacaatggatggagtgggggcattgaagaaggtgaaatcagataaaaaaataaaaatagatactgtttatgcgtctagtattgaagtgccgttgaagattgaaccgatgaaagacccgacatgtctgcggacagaatattttgttccttcttttgcggtggacggggcaaatggttcccgatggatgtctgctgccgaagatagtattaatccatggattgtggcagatttgggtactgtaaagaaggtcagacgcagtgaaatttattttgtacgccctactgccggacatgcttatgttattgaagcatcgatagatggaaaagtctggcaagagttcgctgtccatcaagataggaagatgtgttcaccacataccgatgtcttgaataaaaggttccgttatctgagaattaaaatcctaaaaggagtccccggtatctgggaatggaatatttattaataagccaaaagtgtatgaatataaaaatgaatatgaaagtccccacatgtattgtagtattgatttttactttgtcaacagtaaatgtatttgcacagaatgattacaagtgaggagaatggacaacttggggcgatcagggagatggcacctattgtaatcctgtccttccttccgattacagtgacattgattgtattcgtgtgggggatgattattatgctatttcttctacctttcaatattccccaggtatggtgatcatacattccaaggatttggtgaactggacgattaaaggtcatgtggtttctgatctgagacagatcagtgaagaaatgaactggacgcgtatgaatcgttatggccgaggtatttgggcaggggcaattcgttattatcagggaaaattctatgtgtatttcggtacaccggatgaaggttattttatgtcgacagctaccgatcctgcgggaccgtgggaaccgttgcactgtgtaaaagcagaaaagggatgggatgactgttgtcctttctttgacgatgacgggcaactatattttgtaggtacccattttgctgataaatacaaaacttacctgtatcggatgacacctgatgggaagaccttgatcgaaaactctaaaatattaattaatgaggggtatggtcgcgaggcaagtaaactttataaaatcaacggaacatattatcattttttcagtgaagttaaaaatggcggtagatatatcatgatgcaacgttcttcttcaattacaggaccgtatcttgaaaggaaacaattaagtcatgtacagcgtgaatataatgagcctaatcaaggcggacttgttgaaggtcctgacaggaagtggtatttctttacccaccatggtacgggtgactgggcaggtcggattgctagtctgttaccggtatattgggtcgatggttggccgattattggtgaggttgggcaggatggcattggcacaatggtatggcaagcggccaagccttccaatgagtatccggttcggactccacaatcatctgatgattttagcaagtcggtactttctcctcaatgggaatggaactaccagccccgggacgagatgtggtcattaacggaaagaccaggcaatttgcggttaaaagcttttcgtccattagtcacggataatttgctgaaagcgggaaataccttgactcagcgttgtttttgtacaaacaaaaatgaggttattgtaaaaatgaacattgagggcatggttgacggacagaaagccggactgtgtcattactctaagagttatgccatggtgggggtacgccagtccggcaaagaccggaatctggaatttcagaccaataaagagaaaatcacaggtcctgcgataaagggaaacaaggtgtggattaaatctgtatgggggctggatggaaaaagccaattttcatatagtacagatggcaggaagtttaccccgttcggagaggtatatcaacttgaatggggatattaccggggaagccgcattgggatttactgttttaataatatagcggatgcggggtatatcgatgtggatgagtttatttatttatattaactgtttagtgtatgaaacattcctttaattgtttaagttatgaattactgctttatgtgctcatttgtattccattctgttcttgttctcaaaaagatacaggtgtgatttctcctaatgggaagatatgtctttctgttgaaataaaggaagatactgaaaaagacggttttggcaaagtcttttttaatgtagagtacaaagatggtaaaacttccagaagggttctatctgatacccgaattggcttggaaacccagcttatgtcatttaccgataacatcaggttgaaatctgtgtccggtactaaactaattgaagatgattatgtgatgcttaccggtaaaagaagtcattgtcagaatagaggaaatgaaaggatatttcggtttgagaatgagaaggcagaaaccttagatatcgttttcagggcttacgatgacgggattgtatttcgatatagcttaccatctgttcaagataaggatagtctgacatctgaacatacagcttactatattccagaaggaacgaaaagatggatacagaattattctgttggttatgaaggtttctatccattgaaaaccagagcagaaagaggcaaagacaatatgtggggctatccattacttttggaaccagccgattcattgtttgtgttgataactgaggccaatatacttcgtggacatagtggttccagattgtataatggaaatgatatgaatcaatatcaagtgcggatgacagatgataaattagccttgggtgattcattcacatcgccatggagagttcttatgataggttctttgtctgatgttgtagaatctactttagtgacagatgtctctgaacctaacaaaatttctgatacaagttggattatgccgggctctgcatcatgggtatactgggcgcataatcatggttccaaaaatttcaagattgtaaaagactacattgacttggctgttgatatgaagtggccatatagtctgatagatgcggaatggaatgaaatgtcaaacggtggagatattgaagatttgataacctattctcttagtcgaaatataaagcctatgatttggtataattcgtcaactgcttggatggggccgggtcctctttaccgcttgaatagtaaggaaaatagaataaaggaatatacttggcttcaaaagtcaggtgtagtaggggttaagattgatttttttcctgatgattattcgtctaatatggattattatattgatttgctggaagatgcagctaaatataaattaatggtcaattttcatggagctactattcctcgtggatggcaaaggacttatcctcatctgatgactatggaagccgtttatggggcagagtggtataacaataagccaatacttacagatcgtgctgctgaacataatgtaacattgccatttaccagaaatgtcattggctcaatggattatacacctggtacattctctgattcccaacatcctcatatcactacttgtgggcatgaactagctttgtctgttgtgtttgagtcagcattgcagcatatgcctgataggccggaggtgtacagttcattacctcgaaaagtaagagaattcctttcgggattacctactgcctgggatgatacaaaactgttgtgtggttatccgggtactgacatcgtactggcacgacgtaagggagatgtatggtatattggaggattgaacggaactaacgagaataaaattctttctttttcattggctcctctgcaagttgaaggaaaaacgatggatgtatttaaggatggggtggacgataagagttttgccatcgaagaaaacatccagttatcaaacgataaaatggatatgtcatgtcttcctcgtggaggatttgtggcagtaataaagtaaggataataaatgatattgttttaaatgtcgatattgttttattgtaaatcgtattcatcctatttttttctactaaaaaagcgctacgtttgcattatataattcaatcgtaatatttatgaaagcaaaaaaattactattactatccttgttatttataacggagactttatctgctcaaaactatcaggttcctgtttcggagcaagatgaacctatgatgcaagggaaattccagcctacttgggaatcattggctaattataaaataccggaatggtttagaaatgtaaagtttggtatttgggctcattggggcccccaatgtgtggaaggatctggcgattggatggctcgttctttgtatatggaaaattcgcctgaatatcgacatcatatagcgaactatggtcatccttctgaatttggctttaaagatattattccgttatggaaggctgaaaaatgggaccccgataagttggttgcattttataaaaaaataggtgctcagtatttttttgctttgggtaaccatcatgataatatggacctttgggatagtaagtatcaaccatggaactcggttaatatggggcctaaaaaagatatattgaaaggatgggaaagagcagcgcgtaaacatggactttattttggggtcagtctgcatgcagaccatgcctggagttggtatgagacttcccaaagacacgatactcaaggtcctaaaaaaggtattccgtatgatgggaaattaacgaaagctgatggaaaaggaaagtggtgggaaggatatgatcctcaggacttgtatgctcagaatcatccgttaagtcaggatagttgggataatggtacaattcataggcaatgggcatggggaaatggagtttgtttaccaacacaggaatattgcactaatttctataatcgtacacttgatgtaataaaccgttataatccggatttgttgtattttgatgtaactgttgcacctttttatcctataagtgatgcaggcttaaaaattgcggctcatttttataatcataatatgtcaatgcaaaagggtaaattgaatgccgtaatgtttggtaagattcttgatgcaaatcaacgtaaagctttggtatgggacgtagaacgtggagctcctaataaaataatagatgaaccttggcagtcatgttcgtgccttggcgggtggcattataatacgtctatttataataataatcaatataagtcggcagctgacgtagtgaagctgttagttgatattgtcagtaaaaatggtaacttacttctgagtgtcccgttgcgtgcagatggtacatttgatgaaaaagaagaaaagatattgaatgaatttggtaattggatgaatatcaataaggaagcaatctatcaaacgcgtccatggaaaatatttggtgagggacctatagcggataaagatgttcaactcaacgcccaggggtttaacgaatgggcctatagtaaagctgatgcaaaggaaatacgttttacacaaacagataaaaatttgtatgctacagttttaggatggcctgaagatgggaaaatcttaattaggtctttagcggaaggtaacgggttatatcccactaaaataggcagagtagagttgcttggttacggaaaagtatcttttacacgtactgataagggacttgttgttgatatacccgctaaatcgttgaagaatatagcccctgtcttgaaaattagaaaataaaagttattactatgtcgtctattcagggatacaaaatgaaagagtttagcatgcctacaaagaggtattgccaaactttaagccttaaaaataatccgattctgattgaagagtatcgtaagatacatagtgaagaaaaggcatggccggaaataagggcggggatacgtgcagtagggattctggaaatggaaatttatatattgggatcacaactttttatgattatagaaactccactggactttgattggaagatagctatggataaactgtctaatcttccgcggcaggctgagtgggaaaagtatgtgtctaaatttcaagactgtccgtgtttgagttcttctgctgaaaaatggaagttgatggaacgtatgttttatctgtatgaagattagttgaggataacgtaatcgtttactacgtgttgagaaaaaaggaatagtgtgaaagttgctattcctttttttctgcttaagagtgataagaggtgcgatattcttggggagtaatacctgtgatttttttgaataacctgttgaagtatgaataatcttcaaaagcaagatttaatgcaacatttttgattgacatatcatcggttattagtatgagttgagctttttctattttcttacggttaatgtattttaagggggtatctcctgtctcttttttgaatagacgaataaaatggtcttttgataaacaggaattctcagcgagtactcttaaatcaatagtttcatttatatgtttacggatatagtgaatggcttcttctatccgattgtctttcaattccatttttacttgagctctttttaggaaacgtgctagcaattgatatacgatacctcttgattctatcttatcagacaaggtccgttgtttgttttttagcagattctgcataagggtgtaattgttatcgtaagaagtcgggtctgatttctgtaaggtcatatgtggatttatagtgcagagccgctgaaataatgccaaatctatttcgacagccgggatttctattggaaaatcccaattgtccagtaagttgctgtctgactggtgttcttcatatatatgcagataatagtgggaaaaataagagttgcagatatagctatgtttggtaaaagctggaataaaatacatgtggttagcttttagaatctgagttttacccgatattaagacttgtgcagtaccttctgtcacataatataaacgtgtaaaagggctattgacatttttccagttccaatcggcattatgaatagccaaacctatgttcaaaacaagcgggtgcaatttatcaacaaatgaagccatagcatatagggtttattaatgtgaagataaagatatataaaaaataaatataattcttttgatgtcgataattttaaataatatatcgatattgttttataataaatcctactatagtcgttcatgtcgatattgtattactctaaatcgtattagtcctacaatgtgaactgcctagttgttacatttgcggtatataatctaataggaatatttatgaaaagtatgagaaaaaacacatggcttcctcttattggactccgaacttttctttttgtgaccacagcgtttacaattgtttcatgcagcgatgacaaagaagaagacgggtataaccctaatcttccggtcagaattagcgaattgtctccccaggaaggcggatactttgataaagtaatcctccagggtgaaaactttggcaacaaccctaaaaaggtacgtgtattctttaataaaaaagaagcgattgttgtaggagcatccggcgatcgggtactggttcatgtcccgaaactcccgggtgatgattgtaagataggtatgcttttaaacggtaacaccaccgatactattttcgcagaaaagcatttcgcctatgaaaagaattatcagttgatatatgtagccggacagctcaactccaatacagaaacatttgtagaaggaagcttggaaaccacaacatttgccaatagtatgcagcatctagcgtgcgatcccagtggcgtcatatatatgaaccataaaaatacaggtcaaagtggcagtcttatttatattaatgaacctgagaactactctaagtttttggattatggggcatctactgaaaacggaggttcgcctagcactccgtattatgatgaaaaaacagagaaggtttacttctgtgcgcaccatgctccatttttttgggaagttgatcctaaggattcatggtcttttgtgaaaaggaagttgattgcccccgacgccagttatcaggcaaaaggatatcgtccggtaccaagcggtcagaagttggagtatatgtgttcctatgctcgtgcaacagatgctaatggtgaaagttttatctattgtcggacgtggcaaggtcaattcttccgtttcaaacttgaagatcgtgtctacgattatgtcaccacttttgccaaatcagatgcatgtctggctacagaccccgacgatccgaccaagatttattgtgccttgaatgaatacaacaaaataacctgtattgatttgacaaagaatccggaagacagcggctttgagacagatgtctgcggcatacagggaccaggagcatatcaagatggacacgtttctgtggcaagattgaacaatcctcaacagattttgtcaatgcacgaccctgaaaccggagaaaaggtgatatacatctgtgatgccaacaataactgtgtacgtatgtacaatatggagacaaaattaatgagtaccgtagcaggaataggcgggaaatccggatatgctgccggaaatcctacagtttcaagaatgaacagaccttatggtatctgtataactcccgaaaatgacatttacattgcagatgcaggtaataaagtaataatgaaactggcatttatgtaatgatgagtagtaatcgtttaaagaagaaaaaatgaaagcttatataacaaatagaatatatcttatgctgtttttctgctccattaccataatggcacaagcacagcaaaagtttgagatatccggtatagtccaagatgaaacaggacagcctgtcccgggagtcagcgtatatgtaaaagataaaacaggcataggtacaaataccgatatggacggaaaattcgttttgaaagtcgatcgtggagataaagtgcagttcagttttataggatatgccagacacgagtatctagcattaaaaactgaaaaaaaactggttatccaattagtaccggatgtaagtgcacttgatgaagtggtagtagaagcttatggaagcaagactcgtaaaataacaacgacaggtgccgtcacttccgtagatgtagcgacattacagactcctgccaccagcctggctaatatgctgggaggacgagttgccggtatcatctcgacacaaggcagtggcgaaccgggtaaaaatatctcagacttctggatacgtggtatcggaacatttggagcaaacgcatcagcacttgttctcattgacggtctggaaggtagcctaaatgatgtagacccggctgatattgaaagcttctccgtattaaaggatgcttcggcaacagccatgtatggagtacgtggagcaaatggtgtagtacttgtcaccaccaaaaggggaaaacaagaaaaactgagttttaccgcacgtgcaaatgctactatatcatggctaaagcgcttgccggaatattgtgacggatataactatgcgaaattggcgaatgaagcactcgtagtacgtggcgatgatcctaaatatacgaatcaggaactggatatcattaaatacggcctggatccggatttatatccggatgtcaattggcaggatgaagttctcaaaaggtcttattggcaacaaacctattatttgagtgcccggggcggtggtagtatagcacgatactttatcagcttaaatggttctaacgagacttctgcttaccaacaggataaatccagtaaatattttaaaggtttggcatataatacctttgggctacgtgctaatattgatatagatttaactaaaactaccaaattatattttggtgtcaatgccaataaaacaatcagaaatctgccgggtgctgcagatactaatctgatctggtctgcttgcagcaaacttactccggttaccataccagtggtttactctaacggaatgcttccttcagccaatggagtgacagatgaaatgtccccttatgtacttctgaaccacacaggattgaaacaagaagaagaattcacttctacctatacactaagtttagatcaggacctgggtatgctgattaaaggattgaagctgaatatacaaggagcctataccaacgacaacgcttttcatgaaacacgctacatcatccccgaactgtggtcatatgataagcgtaatgcaactggagaacttgctggaaagcgccagaccgaacgcataacgacccagtacagtaaatgggaaatgcaataccgcaaatacttccttcaggctaccatgaactgggcacatgatttaggacacggacacacgcttatggcactggcgcattatgaaatgagtgatcaaaagcggtcaactgatgccaatgacacgatgtcggctatcccagttcgttatcaaggactttccgctaaagtcggctacaattataatgatacgtatatagtcgacggcaacttcggttatacaggttccgagaatttccagccaggacgccagttcggattctttccatccatatctggtgcatgggtaccgagtagctatcaatggacaaaagataaaatgccatggttgaattattttaaaatccgtgcttcatacggtttagttggtaatgaccgtatcaccgacaagcgttttccatatctgactagtataaatgtaaatggttccgctaccacaaactggaagtataccaagggaggtatttgggaaaactcgatcggggcagataatctggaatgggaaaaagcaaagaagtttgacgtaggtttggaaggtaaattattcgataaatttgagtttgtaatagacttcttccgagatactcgcgacggaattttccaagaacgcaaacaagttcctgattttgtaggactcgtaaacatgccattcggtaatgtgggcagcatggtaagctggggtagcgacggcaatatcaccttcaaccaacgcatcaataaagacatggaattcacgcttcgtgctaatttcacatactctaccaataaggtgaactactatgaagaaggagataccaagtatgaatatacatcagcaacaggacgccctaacggctacatgaaaggttatatcgctttaggacttttcaaggatcaggaagagataaacaacagtccgaaacaagattttggaagctacctgccgggagatatcaaatataaggatgtaaacggtgacggtgttgttaacagtgacgaccaggtgccggtcagttatcaggattacccgcgtctgatgtatggcttcggaggagaatttcgatggaaaaagctgacattaggcgtacgtttcagtggaataggtaacacagactattacaaaatatggacatggggaagtaacaatgtgggatatattcctttctacgatggtaaactgggcaatgtactcactattgcagccaatcctgccaaccgttggattccggccgattatgacgatcccagcataccagccagtatgagagaaaatcccaatgccatgttcccgcggctaagttacggtagcaatcagaacaatgcgcaggcatctacattctggaaaggtaatcgcaaatatttacggctcgatgaaatcagtctgaactataactggaactgtaatttattaaaaagtattggaataaattcgatcgatctcgctgtggtagcaaacgatttgcatacttgggacagcgttaaattattcgatccggaactcgccacaagtaatggacgtgcttatccgattccgggccgcgttagtttccaggcaattgttcatttctaaacatgatcattaaataacaaaattatgaaaaagtatatatcacaccgatcaataaacctattcatcgtatttcttgggatacttacaaccggaggattcacctcatgcaattttttaagagtcgacgactattttgacgatacaatgaagtttgacagtatctttactaaatacgagtacctggtacaatatatgtggggaacatcagatcagttccccgacgagagccgcatcctttctgatccggtcactcccggtccgatggctacggatgaagctttctcaagtcagaatccggagcatggccttcgcggactctcctacattctgggaactattaatgccgataacatcggtaactatagcatgaatatatggtcgtccatgtataaagtgatccgtaaatgtaactacatactggcacgcaaaggagaggctcacatgaatacaatacaagatgaggaaatcactggctacacccacatgatgcgtggttatgcttattacaatctgatccagtcttatggtccgtgcattatactcggtgacgatatcttacccaataatgaattacctgaaacttacaattattcccgttcgacttatgacgaatgtgtggattactgttgtaatgaactggaacttgctgccaaatatatgcctatagacttaaatccgactttttttggacgtccttcacgtggtgctgcttttgcgttgatagctcgtctgcggttgcaacaagcaagtccgttatataatggcggacaggccgcacgcacagctttcggcaactggaagcggacagtggacggagccaactatgtgaatctgaactacgatgaaacacgctgggcagtagcagctgcagcatgtaaacgtgtcattgagatgaacaaatacaaattgcatacttctcccatcgatccaagcatgcctccccgagcattgccggcttccgtgacaatcactgaccccaattttcagaatatcgactattatcgttcctattcagaaatgttcaccggagaaacgataggcagtaaaaatccagaatttatctggggtagacagtcggatgctatggcaaacatgacacaatgcagtttcccgacggaaaaagcaatggggggatggaacaacctctgcgttactcaaaaactggtagacgcttattatatggtggatggacgagataaaaatgatgcaagtaaagaatatccatatcatgtagcaaacggtacagtgaccgatgattacttttccaccagtgcagaggagttctccggctacactattccgatgggagtatacggtatgtatctaaaccgagagaatcgtttttatgctacaataggttactccggacgttactgggcagcacgttccaatacccaagaacaatatggcccttatagggcgtggtatcatcaaatggtaacttcaggacgcgatctgttttccgggaaaaattccgccataaccaatcctctggattatccggcaacaggatatgtgctgactaaatggatccatgcggacgacgcatggataggaaccggaagtatgcgaactacaaaatattttcctatcatccgatatgcggaaattttattaggatatgtagaagcaataaatcacctgagtaaaagctataccgtcgaattacccgcaatcaatggtggaaataatgctccgcaaagctatacagtcgaacgtattccaactgaaatacaaaaatacttcaacccgatacgaaatcgcgtcggtctgcctggattatctgacacagaagccgcatcagatgaaacaactttggacaacatcatcaagagagaatatatgatcgaattcgcttgcgaaaaccgcagatactttgatgtacgtcggtggggcatatatgaagagactgaaaaagctggtgtttatggaatgcgtttgggaggagataaatatacttattatcagaatccgattcctgtgaatcaggttaacaaccgaaatcgcgtgatagataagagactgatcctattacccttgcccaaagctgaagtacgtcgtgtagaaaatctcgaccaaaacccgggctgggagaattaataatttacttcgtattaaaacataaataaccatgaaaacaaaatatatttatatagcttttttgacaatcttatgtgggggaagcttggtggcatgctccaatggcgacgagttcttcaaggatgaacgctacaagaaaatgatctatgcaatcagcgacaatgagcaaatatttcacgctgaatttgaactgaataatgaagaagatatcataggcgtgcagcctttcgcagtaagcggcactaatcctatagatcaggatgtgcatctgaccatagaaaaagatccggagctgttgacggaatataactataatacctacatggatgaaacagataaatatgcccgtgagctgaaggacggggattattcacttttatcttctatcgttgaaataaaagcaggagtgaaccccagctatgaagtgggaaaattacaagtgaaaataaagacatcgatcattgaaaaactatccgttgactctgcttactttctttcgttccgcattaaagaggcaacaccttacgaaatcaatgaagaaaaaaggaatgtattattccgaatttataaaaagaatcagtatgcatcccaaaagacacccacttactatgcctcttccggctttatggatgatgtcgtaatgccgttcgactctaaaattatcatgccattggcatataataagatacgcacttacattgccggacaaatttacgatgcgaatgataccaaagaaacaatcaacaaaaattcgatggtaatcactgtagatgccgataaccaagtgctgatatctgctttcgattctgagaatggattaaaagttgaaatgttatctccaagttctgatcccaatgatggctcatatggatatcggaactattataatccagaagaaaagcaattttacttatattatcgttttgataatggtgaaggctggaaggttgtgcgtgaaactttaagagccgaatctatcataagtaaatagtgattggcgactatagatattttttcattatgcgaaaagaaacagacgaatattgctgtgttttaataaaaatacactatattgcggtattgtttaaccttaaaatatgatagccatgaacacaaaattattcggtttgtttatcgcattgttggtatgcctgccttcgcttgcccaacaaaagcctgtagagaaggtagatagtgatggagtttatctgatgcccgatcaaatgccggagtttccgggtgggatgcaggcgatgatgaagtttttgactacaaatattaagtatcctgtagaagcacagaagaaaggcgtttccggtcgtgtgatcgtacagtttgtcataatggaagacggaacattggatcaggctaaagttgtaagaggaatcgatcccttgctggacgaagaagccttgcgcgtagtgaaattaatgccgaaatggaaaccgggaatggatagaggcgaggcagtgaaagtacgttttacagctccgataatgtttaatctgtccagaccggaggcacagagacctactttccccgaacttgtagtacctatcgggcaggaagtagaaaacaggtctttgcaaggagtatggcagagttgtgttgtgcaaccgggcgaacatggatataaaattctgttattgcctgttataaagatcatatcgcctgatcagacattcatgaatataatgacagccggtatgaacggcaggtcaaatgccatcatctattgtcagggagagtacagtttgccatcggatggcacttacgtggagatggtggaaaaatcggttgatccggtttttatacaaggagtaaagaatgaaatcagtgtggaacgattgcatgataatctgattaagttgtcttttacggttccgggacagggaagaaaagtgacggaatattggttccgggc

SEQ ID NO: 4552 - DNA, 52386 bp, Unknown
  gut microbiota DNA sequence
taaaaagctctctgtactttcttatcttcgactcagcttattattaattcttaaagaatccgttatcttcccattgtcccgctttctgtggctgtgccgacgtggcgcttacatcgataggcagccatacttccatgtcgccttcgccccgatgtgcccaggcataatagggtatcaatgtgagttctacgtctttagttaccagttttcctgctttgtcataacttaatgcctgcgcatcggtcgttatctgacggatgccgtaaagtaactccggtttgtctgttaccttgaattgcggatgttggttgagaagtatgctgtggacgttgaatctgttgtccggccattctgcgcaataaacgatggggccgcgttcaacggcaacacgtccgtgatcggcttctactttgggatttgcctttactattcgggggatcatgtcgaaatgtacttctaccacatctccctttttccatttgcgggcgatgctgaggtagccatcattgacatcgctttctactgtctgtccgtttacggatacttggtaggcaggtttctgattgtcggcgtaagaatacaggtcactgggaagtacattgccacgtacccagccggggatacggagtttcatggtgaagtcctgattgccctgcgttattttcaggcggatgtccccattccagggatagccggtttcttgttccagcagaatctttttcttgtctacctttagctcggctttgttggaaagataaaggttcacgtatacctgatcgttcttcacggcatatacatatcccggtaatgacggaatgaaacggctgacgtttgaagggcagcaggcgcagccgaaccaaggtttgcggctgtattttccattagaagacagcgggttgggatagaagaatgaacctccgtccagtgatacacccgatatcagaccgttgtatagtgtgcgttccaggacatcgaaatatttggcgtctccgtgcagcaggaaaagacggtagttcatgtatacattgccgatagcggcgcaggtttcacaataagcggactggttgggcagctcgtagttgttgccgaatgcttcgcctgcatggcgtgcaccgatacctccggttatataaatctttttagaaacaatgttgtcccaaatcttgtctatcgctttgatgtagctgctgtctccggtgatggctgccacatctgccatgccggagtacatatatacggcacgtacggcatgtcctacggcttcatcctgttctaccacaggtttgtgtgcctgactataggcgtctttccggctggtatatccacgggtatccaggaagaactttgcctgatcaagatactttttgtctcccgtcaccatgtatagtttgactaaagccatttcggctatctgatgccccggtacgtatttcttctgttgagggccgttgccgatttcgcggcagacacagtcggcatatttaatggcaatattgaggaagtttcgttttccggtagcttgataatgtgctacagctccttctatcatgtgcccgagattgtagaactcatgacttaggttctctgccgctacccaacgctcttttcctgcccagttgtgcgggtgcttcgggttcatggtgcgggctgtataaaggtaaccgtccggttcctgtgctccggcaacgatgacgagtacgctgtcaatgtacttttgcagtttcttgtccggataggtttgcagagagtaactggctccttctattgttttgtatacatcggtatcgtcgaaagagaagccctctactttgtaggtatcgctgggatgtgctgcctttacaaagttttcgtaacgtcccgtctcttcacatttgctgaatgccagagggatggttacttcacggcttgcttgaaagcgctgtccccaaaagttgtccgtcactttaacggaagtaaaggggacagggtctataggatatccatgatttatttgcgcgctgcctgttatgcagatgcaggtcaggaatgtcgcagtcagaacgtttttcatcttggtattattttagtatgaatctctgttgtggtgttatggtgtcgggattacctgtttgattgttccgtccggattgaattccatccggtcaatacatacttcgcgatgccagcccggtccgtcattcagatggttcttgttgatacggtggtatacgatataccatttgtcttttcccggtacttgcaggatagagttgtgggcaggtccgtagatttcttcttttagattttgaatgagtactatcggggctttggctacttcgatcggaccgagtggtgactgggcggtaccataaacaacgtggtagttgggtgagccggtgtcgtctacagaccagaagaagtagtaaactccttttctataaataacgtaaggagcttcacggtatgcgtaagtctgcaaagtccctcctttgggagttaatactaccgttgtctcttctttgacggacagcatgtcgtcgttgagctcggctcctgccatgtagccgttaccccaatagaggtagcttttgccggatacggggtcggtgaatacatccacatcaatctgctgtccccgtcctgtgggagaagaggtgatgataggtttgcccaaatcagtgaaaggtccggtgggggagtcggctacggcaactcctatctgcttgcctttgttggtcgtcgggttggcactataataaaagaagtatttatacttcccgtctatcttcttttcttcaatgcagggagcccatgcgtttccgtttgcccaagacacatttttgcccatctccagaatcacagtctcttctttccatgtctttaaattcttcgatgaaaagaccttaaaataacttccgccccatcctggaaatccgtcactggtggggtaaatataatagcgttttgtctgatgagaatacagtacttccgggtcggcatggaaccccggtagaatagggttaccggatttcttattttgtgccgttacttgtactgctccgatgagtaataagtggaatagaaagattttggtaaataaatgcttcatgatatttacagttagatttttgttatattataagtacgacaaagataggggatccacctaaataaaaaggttacatatctgtcaaaggagggtaattatcattcataatagagaagatgatctaaatttggactttaatgaacggtattcggatgtctttttgtatctaaagcattatttttgcgctgaatctaaaaaatagttggttaccatgagagcaaagctgattttaccttttctgattttatatttgttctgtcatttgctgtcggtgcagggacacgaagttgacactgtaaatcccggcagtgataaaaaagtagcatcttctcaagtgtatgaagtaacttccgaaggagcctggtgttggtttgctgatccgcgcgcattgcattatgagaatgaaaaaggtacaataaacaagacatatatcggctatattgatatacacggcaatattaaagcgatacagtatgactttaaaaagaaaagacaggacgaggtactgatccgttcttattttcaaccggatgatcacaataatccgacgtttctggtattgccggatgaacggattatgatcttttattcccgtcacacggatgagccttgtttctactatcgtatttcccgcattcccggagatattacgacattgggagaggaaaaggtgattaaaacaaaggacaataccacctatccatccccgtttattttatcggatgatccggaacatatctatctatgttggcgggggattggctggcaccctactatcgccaagctgtcgttgcccgatcagaatgatcgggtggcggtggaatggggaccgtatcagatagtacagtctaccggggcccgtccttatgccaagtatatgtcgaatgggaaagataaaatttattttgcttatacgaccggtcatccggataatgagaatcctaattttttgtactttaattatatagatgttcattctttgcagttgaaggatgttaaggggaatactctttcgactattgctgacggtacttttaaagtgaataagacgggtgactatgtgcgtcagtatccatctactctggtagataatccatccgcacgtgattgggtatggcaggttgctttggatgagaatgataatccggtcattgcaatggtgcgaatcagcagtgataagaattcccatgattactattatgcgaagtggaacggacacgaatggaagaagacattccttggcaacgccggtgggcattttcaccagacaccaaacttggagaaatgttacagtgccggtatgactatagatccgtcgaatgcgaatcatgtttattgctcgttgcctgtggaaggaaagcaagggaaggtttacgagatcgtgaaatttatcttgaacgaggccggggaggtggtctctacagaagcggttacgcaagactcgcagcagaataatgtccgtccttatataatacctgattcaaaaaatacgcctttgcggctcacatggatgtatggcaattattacgattggattgtcagttcacggtatccggaaggttattgcacagggattgcctgtgattttaaaggtttcccgggtgcgaagaaaaagaaaaatgttgtagcggagaaggattttaagttcaacccgaaggtggcttttgtattggaacaaacggtcactctggatgcggacaattatcaagggtgccttttacaattgggcgatcttcaatattatctgaacggacaaaccatgaaaccggaagttagatataacggaaaggtatatcctagcacaaatatacttggaacatctgattgctggaaaacaacttcgcgcaatacaggcggtgagtggtacactccacaaaagtacgggagtttcaagttagagctggagtataagaagggagtattatgtgtgtatattaacggattgctggatcaaaaaatagaaatacaatgagaaggaaagttttaagagattttgtgataggagttcttttattatttgttctcccgttggcagaactgtcagtcgccattgctcaggagagtgtgtttactgtacagcagcctgactttcaaaagagtccttatacgggaatgacacgtcaacactggatacaggcgggtgagtatctgctgaaaggagcattcggttatatccatacgttggatgaccagatgtactttccgaagcaactggacaaaacatatcccaataatgacggccaagttccggttgctaagctggaggggctggcacgaaccttatttattgcagcacccctgttgaaagataatccggaactggtaatgaatggaataagagtagcagattactatcggcaccaattagtcggtatctctaatccgaaaagtccgagttttattcctcatcgtaaaggaggacctagtcagacgttactggagttagggtctttggctatttcaatgaaagcggctcaggctgttttgtgggacccgctgacaaaagcgcaaaaggattcgcttgctgtaaccatgctgagctacggagaaggaccgaccatcggctctaactggatgttctttaatgtctttattttaagttttctgaaagatcagggctatgcagtggatgagagctatctggagtcgaatttgaagaaactgctggcacgttatcggggtgaaggctggtacaatgatgctccggcttatgattattacagtgcgtgggcttatcagacatacggtcccatttgggcagaaatgtttggcaagaagcaatttccccagttggcacagcagttcatggcaaaccagcatgatatggtagctaactatccatatatgtttagccgggatggtaagatgaatatgtggggacgaagcatctgctatcgttttgcagcgactgccccgttgtctctatgggaatatgataaaagtggcgatgtaaattatggctggataaggaggattgcttcttctactttgctgcaatttctggaaaatccgaaatttctggaagaaggggttccaacgatgggattttatggtccgtttgctcctgctgtgcagatttatagttgtcggggtagtgtatactggtgcggaaaagcttttttgagtttgctgttaccggaaaactcagacttctggtctgctaccgaaaataacggtccttgggataaagaactgaaaaaagggaatgtctataataagtttcagccgggaaccaatttgttgattacgaattatccgaatagcggaggcgctgagatgcgctcatggtgccatgaaactgttgcaaaggactggcagaagtttcgtagtacggagaattataacaaattggcttacaatacggaattcccgtggatggcggatggtaagaacggagaaatatccatgaattacggaacaaagaatcagaaaggcgagtgggaagtattacggctttatacgttccaaagttttaaagacggtatctatcgccgtgatgccgtacttgaaacagacagtacagtaagatatcaactggccgatattccgctaccgaacggaatcttgagagtggataaagtttcggtctccgaaccgacggaaatctgtttgggacattattcactgcctcgtttgaatggtgtatttaaagaaacatcccgaagggtcggcaagctggatattccggttattgataacggagagtatgaactggctatgataccattggctggatgggataaactatatacatcgtatccgaaagggttacatcctgtcagtgatgagtgtgctttgattatggcttctgataaattggctggtagcaagatttatatgacacttcaactttggaagaagaatgaagctaagaatggctttacaaagaaagagttgaatccggtccggtcgatagaaatttcggaagataagaaacaagtgacagtgcgtctggatacgaaagagataaaaacgattctatttgagtaattttaaaatatgagaaatgtacagtggaagtgtttttccactgtatttttttatgtatagtgatgagtcttaaatgcctatatggtgaatttcccttcaaaaagttctacttatcagtatatctgtaaagctagaactgtctaatcgttgtttattaaattttttattcataattttggtcgtatatacagttgtgaagtattatatttgtatttaacgaacaaaatatgatcatatgaaaaacacgcgaatcgttatcctttattataagctgagttttttgattttgtttttgcttttgaagtctgctttgttattggcgacagaggatgtcatctacaacctcaaatttaagcaactttctgctccatatttcttgccgacaaatgaagtacaaaaagtgtatcaagataaagatggatttatctggttcgctactcgtaatggactttgccagtataatggctatgagaccactctttataaatccaatctttactctccggatttattgactaccaatagcatcacttgtttggttgatgataataataataatctttggattggtacatcggaaggactgaacgtgatggataaaagaaccggagaaataaaaaagtataaagcaccatatctttctaacaatgtagtgtctgctctgtgtgtgactcgtgataatacagtttgggtggggacggataacggtttatgtcgttatgttgcagagaaagatacttttgtagtttgtggagatgactttggagatagtagactgcggtatgttaccataaaatcattattagaagattcagatggcgatctctggattggaacttgggcacaaggcttatttcgttattctccatccacagataaagtggaaatatatccgaaaatcaatgaccaatattcttctcatgtaatttatgaagatagtaataaagatatttgggtagggagttggggatatggtctttttaaattgcagaatcctaaagatatgcaacgtgtgtcttatcagcgttttctgcatgagaacggtgatgattccagtttgtctgataatatagtatatgatatagcagaagatatcaatactcacaccctgtgggttggtacacgtagtgggttgagtatcttaaaacttgatgaaccggacgcatttattaattataaatcgggaaaaacagattatcgtattccttctgacgaggttaactcgattatgcgtgatgctcagaggaatatgtggataggggctattgggggaggagttctgatggctgatacacgtcaatctacatttgctttatatacacttaactttggagatgaagatattccggtaacttccgttcgtaccttatttgctgattcagatcaaaacctatggattggagtaggaacttacggactagcctgtagagagtatgaaacaggaaagctaaagatgtattcgcacataccggaattttcggggttaaaagatttgccatcccttttcgcagttacccagcgtaagaagagtggtgaaatctggtttggtatgtataatggaggaatctacgtatatcggaaaggtgaaaaggtaaaacacttgactacaaagaatagcggtttccttacttctgattgtgtgtcggctttatatgaagattatgaagggaattgctgggttggcacgcgaggaggaataggggtcagattggctgacggtacagactatcgctttgaaacgatgaactttaatgatagtttgtcggcaggctggatatatgtaagagatatcataaaggatatggataacagtgtctggctggcaacttctaatttgggtgtgattcatataacgggggatgtccgtcaaccttccacattgaaatatgagaattatagttttcataatcgtaaactaatcacgaatacagtcttgtgtatacatcttgatcgttttggtcgattgtgggcagggactgagggaggaggattatacctttataatcgtaacaaaggagaatttgaggaaaaaacgcgtgcatatagtattccgggagacgttatcgttagcatagaagaagataaaagtggtaatttatggctgggaacgatttccggactagtgaaactttatgtagctgctgttggaaatgatttctcaacccatatctatacttctgccgatgggttgcaggataactttatagtcaattcatcgtgtagtcgaaatggagaattgttttttggaggacataaggggtacaacagtttttttcctgataaaatggaaataccttctcaggaaaccaatttcctgataacagatattaaaatattcaatcattctttcagtaaattgccggtcgaactgcaacaaaagatttcaccggtaatgcctacctataccagtaagattgaacttcctcataaatacaataattttagtattgaatttgccgcccttacctataagaatcccgaactaaacagatatgcttaccggctacagaactttgacagggattggcagtatacggatgcagaccgccgctttgcttattataacaatctgccgagcgggacatatacttttcagttgaaagcaaccaatgagaacggagaatggagtggctatgtgcgtgaattgacagtggtagtccttcctccgttctgggctacctggtgggcatatctgttatatataatatgggtgttggtcgtaggaattttgatttaccgtacaacaaagaaccgtatgttgcttcggaatgcattgcgcctgcgtgaaatagaaaaagcaaaagcagaagaattgaatcatgcgaaattgcagttctttactaatattacgcatgagctgttaactccgttgactattatttcggctacggtggatgagttgaagacacaggcacctagtcataatgatttatatacggtgatgaatagcaatatacagcgattaatacgattgttgcagcagattcttgaattccgtaaagcagagacaggaaatttgaaattgcgtgtttctccgggcgatatagcggattttgtgaaaagagagactgaaagttttcaaccgctggtgaagaaacgaaagatacatttctctgtactttgcgacccggaagctattgtcggctatttcgatacagataaattggataagatattatataatctgttgtctaacgctgctaaatacaataaggaaggcggatttatccaagtaactttgtcttatgatgaaaataaagattttgtgctcttgaaagtgaaggataacgggaaaggcatttcaaaagagaaacagaaaatgctgttcaaacgcttttacgaaggagattatcgaaagttcaatactatcggcaccggtatcggactttccctgacaaaagatttggtggagttgcacggaggaaccatttcagtagagagtgaagtcgatcagggaacagagttcatcgtgaggattcctattgaccgttcttattatgaagaagaacaaatagataatgaagcaatcttgccgatacagaagacggtgacttatgaagtcacgcaagtggaagctgccaatgaagtagaagaagtggcggagaaagccaattctatcttactggtcgaagacaatgaggagttgctgcaattgatgactaaacttctgaaccgtgattataatgtctttactgccgaaaatgggaaagagggaattacggtattggagaatgaggatattgacctgattgtatcggatgtgatgatgcccgaaatgaatggcatcgaattctgtaagtacgtaaaaggtcatttggaaatcagccatattccggtgattctattgactgccaagaataaggaagaagaccgtgcagaagcgtatgaagctggtgcggaggcttttattagcaagccttttaacttgacggtgttgcatgcccgtatccgtaacctgctgaagtataaggaacgcacggcacgcgacttcaagaatcaattggtgtttgaagtaaaggacttgaattatacaagtctggatgaagactttataaagcgtgccattgaatgcgtgaataatcatttggcagatgctgcatttgaccagacacaatttgccgaagaaatgattaccagtaaatcgactctatataagaaactgaaatctttggcaggtttgaatacttctgcttttattcgcaatgtgcgtttgaaagctgcctgccggatcatggaagaaaagggaaataatattcgtgtttcagaattggcatatatcgtaggttttaatgatccgaagtatttcagtgtgtgttttaagaaagagttcgggatgctgccgactgattatattgaacggtttattcaagatgtagagaagtagattaagtctggtccatcatagcctctgtcattcagaggagtataacgacgaagaatcttttttcctgtacacaaaaaatgagattctttctctcattggtcgtctgaatgacaaaaatacatttaatgcatttctgctttggttatgaatgaacttcttgtataagaaatgaatcagacatctaaaagagtactccccaataagtataggacttaatggttgtaagtacttgagttgcttgattcttgtacaacatttgagtcgaagatgtacaactatccaatgaatgatgtgctgactttcctccgtactactattggattatatctagcattcagccttttcagcttcgctcgcaaatgccttgccagaagtggatatcggctgaaggcgcttttttataccccgtctctgggatgttttgggaggggataagtgctttcagccctttcagttttgggattacaagttatagttactcaccacgtgggctgaattccgtaagctcgaggctgaatttcattcgccaccgaggtgaatgtcactcagccccgagatgaaggttggtggaatatcggcttatttaaattagtaaacagactaatagtccagaaacaaacagagggtctgtttgcgtcggacagaccctctgtttgtactgaatagagcctctgttatacgaaaatacagcctctgttttgtgagaaactactggcgttcgaacgaattatttttcaggctgaaagggctgaaagcacctaccctctcctggaacatcttagtagtggggcacagaagagtgccttcagccgatatccacttctggcaaggcgtttgcgagcgaagctgaaaaggctgaatgcaaggtgttcaccttttcttggaaaggtagagcttttgtgcctttttcgaacagggtctgagctattcgcatcagatatgaattgatcttgtcaacagattattatctgtctatatagtacggtttactcgagaagaaaaaaaataagagtaaagaattttgctttaaaacgattcttcttaataatgatgatagaaagatgggatattttcagaatttatggtaattagagaatttcccatctttcaaaaataaagcagagttaatatgtgtgtatttttatatatgtatacgcatgaatgtaaaaatattttcaataaactctaatgcttgttgttatttgacaattgccatatattcagaaagagaatatagaggagtatttccagaaaaagagaatgttgttcttaaataattggtacagtttccgctgttgttaaagcttgtatctgaatcaggaatccttttgtcacaagataaactatatattcgaagttcacattctacattggacatataataataactatgaatatagggaccatcattccaatttgtattcacgatgccattgactatatcttgacagcaatatccacggattgttttcttgtgcattaaatcataatagctgtaaaccattataagtctacatcgtttagtataaccaatagacccttcgattttgccagtacttagatctaatcctactgtgatgcttgtgtctctaaaatcaaaattgtgatcacatttaggttcgctactactttgaccgctatattcatctatgtcaatagatgtcaattgtaaagtaacgggcaatcctcccccatcctttatttctagccaaagtgtatcaccttgaatgaatgtgaaggaagtagggagttcaaagcttcttgttccgaccatttcttcttcgaaagtttcaaatgaatctatatacccatagaagtttgagcgtaacgtgaacaacataccaactggtttttctgatgcagttgggaaattccactctataaaaactgttcttccttttattgtacatctagcaatgccccatccgacagatgaatatcgagttgtcacattacattgttgagtgtaatgagaatcatttatactgtcttcactactgcaactaatgaataacagaaatgagcatactgaaatgaaaacgaaattcaaaatctgtttttccataattttctaatttaaagttgaatatatgattaataattcgcttataaaatgcctctatatcacctgtcaaagttgaaagacatgatttccaaaaatagtactttatttaatgcgacggatcatttattgaaaattataggatgagatataattcaatttggtgtaaaaatgagccagaccgttcatatataaattcaaatcatataaatctaaaagtcgtttattggataaagaatttcaatgctaaatttagctccggtttgtgctataaataatccctttcagtacataaattaattcgtctgcctatagtcggacgcaagtttgcctatagacgacattgcgtttgcctatagccggacgaaacgttgcccataggcggacgaattaattcatgcattcgcaggtcttattttttatagagaaagggattattgtatttgactgcaatgattgtaataattgggtcgcagattcataaccacatagaaaagagttaaatacagcattttatagggagaattatcattcataaaggaggaaaataagttaatcactataattctccctataaagatgattattactctttgttgacattagaatggtctatgtttgcattcgttgacatctaggctgataagtcggtgaaacaattgacaattctaaatatatactaatatgatgaaaaatgaaacattaacaaagaaaacaactagctcaaagtatggagtcttaaatgtcatactgttcggacgtaatcttgagactaatcattatttattaattcattaatatttttgctatgaaaaattgcattttctattctttagtgctaacacttctctttttgataggaagctgtaaagatagcgatgacaacaaaaccactggggcgacttatgatccgaatcagcccgttacagtggagagctttatgccggtagagggcaagctacgggaaaaggttatcgttaaaggttctaactttggtacagacaaatcaaaggtgaaagtttattttgtggacgaggcagcagaacgcttatctacagtaataggtatcgataacaataccctttattgtcttgcacccagacaattgccgggtggaaaccgtatcaaggtaattgttgatgggaaggaagtgactacagatggcacatttaagtatgaacaggcccagaatgtttctaccatctctggttcggcttcaaaagatgggaatgatgatggtgaccttgcatctgcaaagttcaagtacatgtggggaattgcagccgtaggaaataatacggtacttgcttatcaaagagatgatcctcgtgtccgtttgatttcggtggatgataacaaggtgactaccgttcatccgggttttaaaggtggaaagcctgctgttaccaaagacaaacaaagagtgtatagtattggttgggaagggactcatacagtatatgtctatatgaaagcaagtggttgggcacctacacgtatcggacagcttggttctacttttagtggtaaaattggtgctgttgcattggatgagacagaagaatggctctattttgttgattctaacaagaatttcggtcgcttcaatgtgaagacacaagaggtaacattaataaagcaactggaactctcaggatctcttggcacaaatcctggcccttatcttatttattattttgtagatagcaatttctacatgtctgaccagaatctgtcttcagtttacaagattactcctgatggagaatgtgaatggttctgtgggtcggctacccaaaagacagtgcaagatggtcttcgggaagaagctttgtttgcccaacccaacggaatgacagtggacgaagatggaaacttttatattgttgatggatttaaggggtactgcttgcgcaagttggatattcttgatggctatgtatctactgtagctggtcaggtagatgtagcaagtcagatagatggcacaccgctggaagctacctttaactatccttatgatatttgttacgatggtgaaggtggctattggatagctgaagcctggggaaaagctattaggaagtatgcagtagaataatcactaagaaaaacataaatatgaaacgaagtattttagtactattttgggtattcgtgtcagcaactatgttcgcccaaggcggaatagatgttgcgggtatcgtcttggacgagcaaggacaggaactcatcggagtgtctgttcagataaaaggaaaacagggtgtaggagttgttaccgattttgacggacggtttaagatgacaggtgttcctgccggaagtacactcgtattttcttatataggttatgaaactcgggaaattaaatatactgctacgaaactgaaagagaagattgctttgaaggaggcggtcaatgagtttgatgaggttgtggtagtggggcgtgatactcagagaaaggtttctgtagtaggcgctatcaccaatgtagacccggcagggattcaagctcctgcggtatcggtgagtaacatgttgggtggacgcgtgccgggcattattgccgtgacccgaagtggcgaacctggtaacaacttctcggagttctggattcgtggtatgagtacgtttggcgccagttctagtgcattggtgttgatagacggaatcgaaggaaatatcaacgatcttgatcctgctgatatcgaaagttttagtattctgaaagatgcatcggcaacagccgtttatggaactcgcggtgccaatggtgtagttgtagttactacgaagcgaggaaaagccggaaagttacatgtcaatttcaaaactaatgctacttattcttattcaccccgtatgccggaatatgccgatgcttatcaatatgcaacattagcgaatgaagcgcgctccgttcgtggagacgacccggtatattctgctactgaactagaattattcaaaacaggtcttgacccggatttatatccgaatgtgaattggcgtgatgtgattttgaaagatcatgtaattaacaatcaacaccatttaagtatttccggtggtggacaaagtgctcgctactatatgagtttgggtatccttaactctgaagctctatttaaacaggataagtctgcaagcaaacatgacgttaatgtaaactatcataaatataatttccgtacaaatattgatgctgaccttacaaaaacaactttgttgagtttgaatttggaagcagtaatcaagacacaaaacgcaccaggaacaggctcaagcaataaatacctgtgggaatcgcaagcgaacttacctcctactgtggttcctgtgaggtactctaatggtcagttgcctgcttatggcactaatctggaggataaatcaccatatgtacgcctgaattacatgggatatactaccaatgagacgtattctaccaaaataaatgtaggcttgtcgcaggatttgggtatgatcacagagggattgtcagtacgtggcttgttctcattctctatgaatggtgcacacatagtcgacagacatatgaaccccgaacaatattatgccgatcccaaagatggacgttatttggatggtagcttgaaaactgtgcgtactgtaaataaggaggatatgacagcaacacagggatcagcatccaatcgggaattatatttcgaagctgccgccaactataaacgtttgtttaatcaagatcaccgtgtgacggggttggcgcatttttaccgccaggaactgaccaatgtggattggggaaacggtgtgctggtcagcattcccaaacgttatcaggcactttccttccgcgctacctattcttataaagatacctatcttgtagaaggtaatcttggctataccggttcggaaaatttcaataaagaacgtcgctacggttggttcccctctatttccggggggtgggtgcctacgcaatatgattggtatagaaatctgctcccattcaataacttcctgaagttccgtgcttcttggggacgggtaggaaatgatcgtctgaaagatgagaatggtaatgatattcgattcccttatttaactactttaggtaacgtttccagtacatggggaaccggacttgccgaaaatcgtaccggatcaatgaatttaaaatgggaagtcagtacaaaaacgaactttggtatcgatgcccgtttctttgatgataaggtagacatgacagtggatttctttcatacgaagacaaccgatattttccagaggcgtgccaatataccggacgagggtggtttaagcaatgtacttccttatgctaatatcggaagcatgaagtcgtggggtatggatggtacactagcttatactcatacatttaataaggatatggctcttactgtacgtggtaactttactcacgctgaaaacgaagtgatctactgggaacagagtggggtgaattatccatatcagtctaattccggagtcccttacaaagtacagcgcggattaattgctttgggattatttaaagatgaggatgacattaaaagtagtcccaaacagacctttatggataattatcgtccgggcgatatcaagtataaggatgtgaacggtgacggtaagattgataaagatgacgtcgtacctctcaactactctgctgtaccgtttatacaatacggttttgcacttgattggaactacaaggcattccgtgttagtattttgtttgaaggagtctctaaagtacaatattttcaaggtggtcggggattctatcctttcttaaatgaatcaagaggcaacttactcgaaatggttgctgatccaagaaatcgttggattccaagagaatatgctgaggctaatggcattgatcctgcattggcagagaatccgaatgctaagtttccgcgactaacgtatggagaaaataaaaataataatcaggagtctaccttctggttagctgacggtaaatatctacgcctcaaaaatgtagatatctcttaccgctttacgaataattggttgaagagtcgtgtcggtgtggaatctgctactctcagtctgataggcgagaatctacatgtgtgggataaagtgaagctttttgatccatcgcaagcctctggtaatggagcggaatatcctttgcaaaggatgtacaccttacagttgaacttaactttctaaaagacgatcattatgaaaaagaaaacaaatattataaagactttatttctgtcgatggtttgtagtataaccatcggactgcaatcttgcggtgattatctggatgtcgaagaatatattgaccagatgacttttcttgactctgtattctctcgcaaagaactcctggatcagtatattaacggtgcagcgcaatatatacccaatgaaggcaaactttggtcaaattcttctacaccgttccaaattgcttctgatgagaatttcatgtcctggaatgatagccagcactacggcatgaagtttttgctggacgagattactccttatgacggatattacaataactatcccaaatattaccagggtattcgtatggcactcactgccttgtcgagaatcaatgaagtacccgatgtgacagacgttgaacgtcgtgagttgatgggacgatgctactttttggtaggatattattattatctgctgatgttgcagtacggacctgtgcccattgttccggaaacgccctttaatgtggatgtgccggtagccgaaatgtcactggaacgaggaacatacgatgaatgcgtattggaaatccgtaaatggatgtctctggccattcagttcttgccactggaagtagaaagttcaacggttgtgacgcttcctacccaatgggctgcttacgctactttgtcgagaattacattgtatgcagccagtccgtggtataacggcaataagttttatgctgactggcagcggacaagtgacggcgcaaactttatttcgcaggaaaatgataattcgaaatggggagtgtctgccgcttattcaaaatacattattgattcaaataaatttgagttgtattggactcccaaagaaatagatagcaaggatctgcccactaatgaagaatttatcaaagagatagatccggattattatgagccttatccaaagggagcagccggtatcgaccattaccgttcgttgacttatacattcagtggtgaaattcctgtgatgattaatcctgaatttatctattcctgtcaaatgccgacaggtgatgccccattggtggctgctgcacctttcaaattaggtggatggggtggcttgaatctcgtacaagacttgattgatgcttaccaaatggtggacggacaagatatcaatgaatccagtcaggactatccttatccggatgccagcgttaattttgaaagaattggcggcgccaaccaaactttctctggctttacacttctagcgagcactgctagaatgtataacaatcgcgaacctcgtttttatgcaacgataggcttttgccattcattctggccaggcacttcttcttcggagaatcagtacaagaatattgaggttacttattattccgacggatatgcttccgctaatccggatcatcctgaagattataatcgtacaggctatacttgtgtcaaatatagacatttggaagatgagatgaaaaagggtacggtcaaagctaaatatttcccggttttccggtatgcggaaacattgctgaattatgtggaggctattaatgagttgaaagaaccttatacgatggagatgcctaacggcagtcaagtgacggtggaacataatacagctgatattgtgaagtatttcaatctgattcgtcatcgtgccggtctgcccggaattactgaggctgttgctgccgacaggaataaggtccgtgaactgattaagcatgaacgcagaatagagtttgcttgcgaaggacgtcgttatcacgacttgcgccgttggggagatgctatggaggcatacaatcgtcctatctccggttgcaacgtcaaagcaagaagcaatgaacgtcagaaattctacacaacaactattttgaacgataaattgacacggcgttcattctcgtacaaacactatttctatcctatacctaagagtgtgttggataaaaacaagaacctcgtgcaaaatccggaatggagataaacctatataatcaaaagaaatatgaaactaattagaactatttatacgttggggctacttgcaggattatttgcatcctgtagtaaagagagccctttggatggtgaacaatactacaaacaagtttatattgtaggtgcctatgaagtggtacagcaatttgatgtggcgtatggcgatggtccgcaaaatgcgtatgttgccattgctacgggaggtagccagaatatcgaccggaatgtggaagtcgtcttgactcacaatgacgctaccatcgaatggtacaataataagtatatgttggatgccccattaaaatatcagaagttgggtgatcaattttgcagttttccgtcaatgagcacgaccattaaagcgggcgatgtatatagtcggttgccatttactgtcgaaacttccggattggattgtgataaactttatgcgttgactttcaaaattgagtcagtatccgattacgtgaaacagcctaaggatacagttctcataatgaatctcaatttaacgaatgacttttcagggacttatcagatggtagccatcagatatacgttgactgacaatgatgaagaactgactccttcttccgttaatatgcagcgtacgttgaaggcagtgaataaagatcaggctcgtttctttaatgttacgcagaattcagatctttcaccaacgggaaacataacaactgaagactatttcaactcaattgataacaacggtgtgacgtttacacgccaaccggacggtacttttacagtggctggctggaagaatcttccggtttctaacggaaccgttagttttgaggatggcacatttacattttgttacgattacgagtccggtggaaagaggtatcgcttgaggggtacaatgacgaagtaatcgataggtattttttatataggtagtaaatgcaggggatgagatgattgaacttgtctcctgcgtttgattatatgacttcagatgtgttctattcggtataaaatcgtgcaaagatgctcattattgagtcatttcaatgaatatgatctaaagttcgacctaattgcacgatttctagtcctttattttttattgaagtcttatttttgctgatgtaaatatgaatcattttatttattagggataaatagttcaataggtttggatataccaaagaaaaacaaattagtatgaagataaagaagattgtaaatttaatgatgggcttgtcattttcactatgcatatttgcccaggacgactggcaacttgtttggagtgatgaatttaatgcagatggtcctttgaactcttctgtatggaactttgagcaaggatatgcgcgtaatgaagaagctcaatggtaccaatccgacaatgcagtttgcaagaatgggctgttgataatagaagcccggaaagagcagaaccgtaaaaatcctctttatgtatccggaagtaatgattggcggaagaagagagaatttattgactatacctcttcttcagtaactactgccggaaagaaagagtttctgtatgggcgttttgagataaaggctcgtattcctgtggcaaaaggagcatggcctgctatctggacattgggaagtaatatggaatggccttcatgtggtgagatagatatcatggaatattatcagattaaaggaacaccacatatcttagccaatgctgcttggggaacagaccgtcaatggcatgcaaaatgggacagtcaggctactccttattcgcatttcactgacaaagatcccgattgggcatctaagttccatatctggcgcatggactgggatgaagaggctatcaaactatatttggacgatgaactgctaaatgaaattcctttgagcagcacaaggaatggaagtatcggtaaaggtaccaatccttttacaaaaccacaatacctgttactgaatctcgccattggcggaattaacggtggcccgattgatgaggccgccctgccgatgaagtatgaaatagattatgtaagagtctatcagaaagaaaagggaatcgcttccggaaaggtctggagagatacggatggcaatgtaatcaatgcgcacggtggcggaatacttttccatgaaggaaaatattattggtttggagaacaccgtcctgcatccggttttgtcacagagaagggaatcaactgctattcatcaacagacctgtataactggaaatctgaaggtattgccttagctgtctctgaggaagaagggcatgacattgagaaaggatgcatcatggaacgccccaaggtgatctataatgcgaaaaccgggaaatttgtcatgtggcttcatttagaactgaaaggacaaggttatggacctgcgcgtgcagccgttgcagtgagtgattctcctgccggtccctatcgtttcattcgctccggcagggtcaatccgggagcttaccccttgaacatgacccgaaaagaacggaaaatgaagtggaatccggaagagtataaggaatggtggacaccgaagtggtatgaagctattgcaaaaggtatgttcgtaaagcgtgatctgaaagacggacaaatgtcccgtgatatgactttatttgtggacgatgacggaaaggcttatcatatctattcctcagaagataacctgacattgcagattgcagaactggccgatgattatctcagtcatacaggaaaatatatccgtattttccctggtggacacaatgaggctcctgctatattcaagaaagagggaacttattggatgataacttccggctgcacgggatgggatcctaataaagcccgtttgctaaccgctgattctatgttgggcgaatggaagcaactgccgaacccttgtgttggtgaagatgcggataagacatttggaggacaaagtacttatatattgcctttgccggagaaagggcaatttttctttatggcggatatgtggcgtccgaagagcctggcggattcacgctacatctggctgcctgttcagtttgatgataaaggagtcccctttataaaatggatggataggtggaattttgattaatatcgtatatatagaagccggcggatatacttttcatatttattgctttcagcaataaatattctctatgagaaaggggaaaattccggaagattatacattttgcgaagaatggtctttttatatcccttttttgacggatatttgaactcttttctttatggtataggttatctttgtgagcgaatgatttcactgcgaggtgatatgtcggcagagaataatgagaaacatcaaaaataatgaaatatatatggtaagaatgttattactggtagtggtttgtatagggttactgccaatacaaatgcgagctcagaagaatagttatattattcccggggaagtgtggaaggatacggacggtaaccctatcaatgcgcatggcgggggacttctttaccacgacggtacttactactggtatggagaatataaaaagggcaaaacgattttgcctgattgggctacatgggagtgttatcgtacagatgtgacgggagtaggctgctattcttccaaagatttactgaactggaagtttgagggcattgtgcttccggcagtcaaagaggacccgaaccatgacctgcatccgtcgaaggttttggaacgtccgaaagtgatttataataaaaagacaggtaagttcgtgatgtgggcacatgtagagagtgccgattacagcaaagcgtgtgcgggtgtagctgtctctgattttccaaacggactattcacttacttgggaagtttccggccgaataatgcgatgagccgtgaccagacagtttttgtcgatgatgacggacgtgcctaccaattctattcttcagaaaataacgaaaccatgtatatcagtctcctgacagacgattacctgaaaccaagcggacgctttacacgcaatttcatcaaagaatcccgtgaagctccggcagtgtttaagcataagggcaaatattatatgttaagttccggctgcaccggctgggacccgaatgtggcggaaatcgcagtggcggattccatcatgggtacatggaaaacgataggtaatccttgtacgggtccggatgcggacaagactttttatgcgcagagtacatacgtacaaccggttatcggaaagaagaatgcatatattgccatgtttgaccgctggaaaaagaaagacctcgaagattcacgctatgtatggcttcctgtattgataaaagacggagctattaccatcccatggcatgaaaagtgggatttgactgtctttgacaaacagaagaaatctgataaacagaagaaatagatcatgaaacggatactgctacttacttttttactactatctgtttctgccttgtgcttttcgcaaaaactggtggaagttgccaaaggatatagttgtacatctgtcaatacaacgatattccgcaataattcattggtaacgtatggggatgagcaatatatcagctattatgatgccgacggctatcttgtgttgggcaaacggaaactaaattcgaagcaatggacattgcatcgtactcaatatcgtggaaatgtaaaagatgcccacaatatcatcagtataatggtggacggagaagggtatctgcacgtttcttttgaccaccatggacataagttgaattactgccgcagtatcgcccccggttctttggaactgggcgataaaatgccgatgaccggagtggacgaaggagatgttacttatccggaattttaccctctgacagacggggatttgttgtttgtctaccgttccggttcttccggacgtggaaatctggtgatgaaccgttattcattgaaagaccataaatgggcccgtgtacaggatgtcctgattgatggtgaagacaaacgaaatgcttactggcagctatatgtagacgagaaaggtacgattcatctctcatgggtatggcgtgaaacctggcaggtggagaccaaccatgatctttgctacgcgcgttcttttgataacggagtgacttggtataagtcggatggtgaacaatataaacttccgattacagcttcgaatgcagagtatgcttgtcgtattccacaaaactcggaattgataaaccagacaagtatgagtgcagacgctggtggcaatccttatattgccacttattggaggagttcggacagtgaagtccctcaatatcgcattgtctggaatgacgggaagatatggcataatcgtcaggtgacagaccgcaagactccgtttacactgaagggaggaggcactaagatgattcctgttgcccgtccgcgtattgtggtagaggatggagaaatcttctatattttccgtgacgaagagcggggcagccgtgtctcaatggcgcatactgctgatgttgccaacggtaagtggatagtcaccgacctgacggatttttccgtagatgcctgggaaccgtcccatgacacggaattgtggaagaagcagcggaaactcaatctctttgtacagcacacttgtcaaggcgacggtgaacgcacggcggagattgaacctcaaatgatatatgtactggaagcgaatacgaatacaaatacaaaaaaataaagatatgaagaaattgtatgcaactcttttttccgcactggtggtaggctgtgcggtgtgtgccggttgcacaaccaagaaagtttcatcttcggcagaagtggttgacattattcataaagtcaatggctactggcagacaaaccatccggaacacgggcgttctttctgggacaatgccgcttatcataccggaaacatggaggcttacttcctgaccaacaaaccggaatacttggaatactcaaaaggatgggcggaacataatgagtggaaaggcgctaaatcggatcataaagccaactggaagtacagttatggcgaaagcaatgattatgtactgttcggcgattatcagatctgttttcagacgtatgccgatttatataatctagaaccggatacacataagatagcccgtgcccgcgaggtgatggagtatcagatgagtacacccaaccatgattattggtggtgggcggatggcttatatatggtaatgcctgtgatgaccaaactatataatatcactaaaaatccactttacctggagaaattgcatgaatacctcgcttatgcagacagtatcatgtatgatgaagaagccggactttactatcgcgatggaaaatacgtataccccaagcacaaaagtgtgaatggtaaaaaggatttctgggcacgtggtgatggctgggtactggcggggctggcgaaagtcttgaaagaccttccggaaacagataagtatcgtcaggaatatatagaccgtttccgtacattggcaaaatctgttgcggcctgtcagcaacctgaagggtattggacgcgtagtatgctcgatgcgcagcatgcaccgggccccgaaacaagtggtacggcattctttacgtacggtctgcaatgggggatcaataacggtttccttgactccgcccattatcaacctgtagttgagaaggcatggaaatatttgtcaacagttgctttacagcccgacggaaagatcggttatgtgcaacccatcggcgagaaagccataccggggcaagtcgtagatgctaattctacttcaaacttcggagtcggtgctttcctgctggcagcttgtgaaagggtacgttatctggaatcacttattcagcattaaactcatataaggttgtagtgcctgaaatattcttcctgtcagctcactgatattcattggtatatgtgcgccgggcaaacgctcggtgctatacatacatttgccattacacagatagtaatagccattatttactgacaattgtttatctgatacttccagttgcatttcgtcctcaggaaaagcggaggcatacagttgcagcacttctttggcattgatgattcgcgccatccccaacggatattgcgtctgttctttctccggaggaagcaactgagtcatgtacctgcatccagtaaattgcttgatatggtgcaacagactgtgctcggcatctttggtttctgcaaaaaactcgctgataattaattgcttatctcttctgtagacaatagccaatccattgatttgattctctgatctggcagtaaccagaactccgtcactgaggataaggtccgccatgactacttgaaaatcctcaaaggagtgctggatgcagcaagtgcgtccggaaagtttgctgtttagatattcgtaaacttctttctgacatccgacttcagaggtgactgttatttctttagacggaataaattccggtacggtaatctctttaaccgaatattggaatacggaagcatatcccatccgggtgtaatagtcgaataaccaaggttcggcgggaatcaatgtactgaaatacgttccgttacgaagcatctttgcaaaggcttgggagagtaattcgcgcatcactccgtttccgcgaaaatccggatgagtgcaggctcctgaaatgtaagaggtctgtacggtatctccgcagaaagtcatcggataaggaatcatctgaagagcggaaacaatctcatctccactttcgatagcaatgtttatttcatttttatagcgcagcctgaagtacatttcaacgaactcttcattgtcgtcgaaacataactgccataatgccttaaccttttcttttgtcgtcataccttatatattattaccatctgaccatatccataggatggtctttcagacaagccatatacttttcgagaatagttaccggttgataagacagctttgctttgcgtaagccttcaatacctaaatcttcttcccggttgatatagatatactgttcgggaatgcgattggcaaactcgtaattaatcatggcgtaagcaccgtcaatgctggtatctgccttttctacatgtaccccgaatgtttcatggttgataggcatcccgaaagtaaatgccacaattttcccgttgacgtggagaatgcctccggtcagaccgagtgcttcgaaattatgtaatgcataaatgagggcacgacgttcatttcccgttccttcctgctggtcgcagttgttcactttgcaccattcggcttccaggtccagacattcttgaatacggtcgggcgtaatcggtgtatattcgtaatcgggatacgtattacggaaccggttgatatgatttctctttgcctgaaatttctttccttttaaggtagccagatcactccttaaatatatatagtcggcataggcacggtcttccgtgaaaatgaaccgttcgggtaaaatcgcttcgaggtcggcgcgcatattgctgcaaactcccaacatacagaaattatgcttctccttatccgcatcttcgattaatttccgtaatacagctttcagatcgccgtttcctacaggcatcatatatgccagttgttcgccggcccaaaatttgaataccagaaaatcgtcgatgactgcaaattgagtatcgtacaagaatctccagctacagaggttggaaaatgaaagatcgcagtttcggcggtcacttttcatggtgaatgcagttattgtgtctctatcagctagtgtaatgtctttaaatggaatcataaaatgctttttgcgtttaactctttatataacggaaaatgaaagaattttgtttttacaaaacacctaataatcgcaggatagtcggtgtcagtaatgcggtgaatattccattcagtgtcaatcccaggctggcatacgccccgtatttgctgctgatgtccatggcagtggaagtgccgacagcgtgggcggctgttcccatcgaaagcccttgggctatcggactgcctacgtgcatgattttcattgtcttaaatccgcagatggctcccagtaaacctaccgctactacaacggctgccgtcagtgacgggatacctccgatagccttggtcacttccatggcaatcggagtcgttacggatttaggtgccaatgaaagaatgacttcttgtgaagctcccataaacttggcgattaataccacagagatcactccgacgatgcaccctgccagttgagacaagaggataggcagcaactgtttcttaatcatttccagctgaagatataaagggactcccaaagctaccacagccgggcgtaaccagaattcgatgagatgccctccctgattgtaagtctcgtaagagatattggccattttaaggaagataatcagaacggcaatggtgagtaagatcgggttcagcaataccagccccgttttcttctgaagcaatttggcaaagaagaaaacgccgaaagtgacagccagcagaaagaaattattttctaaaaagctcatttgtctttatccattaagttagttttgttttttaaatgtagcttgtcggacaagtgaaagtctgataagcgtaggctactcgccagtttaatctgacgtgccagtctgaatttacggacaatctggtgtacccatcccgttacgaccagcacgagagccgtgctaacgattgttgcgatgacgataggccagaattctgccgcaataacgtcgaagtacaacatcaatgctactccgggaggtacgaaaaagaagcccagattagctaccagaaagtcggacaatccctgcacccactgcagtttgatccagcctaatttcaaaaaaagggtgagcagcagcataccgataatgctggaggggagcttgatccctgttaaataaacgattaattcacccaaagccaaacagccaaataaaatggcacactgacgtatcatacactaattacctattgatttgtttgaaaacactgcaaaggtagaaaaaatagaagtacagtgttaaatattataatattttagacttggagaataaaattagccggaattgtaatgtggatattgcaaaattgagtacttttgcagcgcaaattacaaatcgtaacaaggtttataatattattcaaatatatctatgcttaatttaatcaaccaaatcgtggctcgtgcgaaagcagaccgccaacgtattgttcttccggaaggaactgaagaacgcacattaaaagctgccaatcagattttgacagatgaagttgctgaccttattttactgggtaaacccgctgaaattaacgaacttgcagtgaaatggggactgggtaacatcagcaaagctactattattgatcctgaaacttctccgaaacacgaagagtatgcacaattgctgtgcgagcttcgcaagaagaaaggcatgactattgaagaagcccgtcaattgacgaatgatcctttgttttatggttgtttaatgattaagagcggtgatgctgacggtcagttggcaggtgcccgcaacacaacaggcaatgtactgcgtccggctttacagattatcaagactgctccgggcatcacttgtgtatccggtgctatgttactcttgactcatgctcccgagtatggtaagaatggtattctggtgatgggtgacgttgccgtaactccggttccggaccctaaccaactggcacagattgctgtttgtacggcacagactgccaaagccgttgccggtattgaaaatccgaaagtggctatgctgagcttttctaccaaaggttccgctaaacatgaagtagtggataaagtagtggaagctaccaagatcgctaaggaaatggctcctacacttgatctggacggagaaatgcaggctgatgctgctcttgttcctgaagtaggcgcaagcaaagctccgggttcacccgtagcgggagaggctaacgtgctgatcgttccgagtctggaagtaggaaatatttcttataaactggtacaacgtctgggacatgccgacgctatcggcccgatccttcagggtatcgcccgtccggtgaatgacttgtctcgtggttgctctatcgaagatgtatatcgcatgattgctattacggctaatcaggctattgcagcaaaaaacaataaataagtatcaagttttaagtattaaagacaatatgaaaattctagtattgaactgtggaagttcatccatcaaatataaattgttcgatatgaccaccaaagaagtgattgcacaaggtggtatcgaaaaaatcggtctgaaaggctctttccttaaattgactttgccgaatggcgaaaagaaagtactcgaaaaagacattccggaacatacgattggtgtggagttcattctgaatacattgattagcccggaatacggagctatcaaatcactggacgaaatcaatgcggtaggtcaccgtatggtacacggaggcgaacgtttcagtgaatctgtattgctgaacaaagaagtactcgaagcttttgctgcctgcaacgacctggctccgcttcacaatcctgccaacttgaaaggtgtgaatgcagtttccgctattcttcccaacattccgcaggtaggcgtatttgatacagctttccatcagacgatgccggattatgcttatatgtatgctattccctacgaaatgtatgagaaatatggcgtacgtcgttatggcttccacggaacctctcaccgttatgtttcaaaacgtgtatgtgagttccttggcgttaatccggtaggacaaaaaatcatcacttgccatattggtaacggtggttctatcgctgctatcaaggatggcaaatgtatagatactaccatgggactgactccgttggaaggtttgatgatgggtacccgtagcggtgacattgatgccggtgcagtaacattcatcatggaaaaagaaggcttgaatacgacaggcatttctaacctgctgaacaagaagagcggcgtactgggtatttccggcgtatcaagcgatatgcgcgaactgctggccgcttgtgctaacggaaacgaaagagccatccttgctgaaaagatgtactactaccgtattaagaaatatatcggtgcttatgctgcggcattgggcggtgtagatatcatcctgtttacaggtggtgtaggcgaaaatcagtttgaatgccgtgaatctgtttgtaaagacatggaattcatgggtattaaactggacaataatgtgaatgcaaaagttcgtggtgaggaagctattatttctactgcagattctaaagtgaaagtagtagtgattccgacagatgaagagttgttgattgcatcggatacaatggatattctgaaaaagtaagaagaactgagataataaaaaaaggcggcttatcatgaagtcgcctttttttgttaactcttttataagtctcgttttttttaccttactttgtgcttcaaatcaatattcgttttattggatttacgcaaaatcgttattttataaattcattgatatgcgctattctgtcataattcccgtttacaatcgtcccgatgaggtggatgaattgctgcaaagtctcactgtacagtgttttaaagattttgaagtagttattgttgaagatggttcgtccatcccttgtaaggaagtggcagatcggtatacagatcggttggacatcaagtatttctctaaacccaattccggaccggggcagacccgtaactacggagcggagcgaagcgaaggagaatattttatcatactggactctgatgtcattttgcccgaaggatattttgacgcgatagagaaggagcttcaggcttctcctgccgacgcgttcggtggtcccgaccgtgcgcacgattcttttacggatattcagaaagctatcaactactcgatgacttccttttttacaacaggcggtatccgtggcggaaaaaagaagatggacaagttttatcctcgtagcttcaatatggggattcgtcgcgaagtgtatgaagctttggggggattctctaaaatgcgcttcggggaagatatcgacttcagtatccgtatttttaaaggtggctatacttgtcgtcttttccccgatgcgtgggtatatcacaaacgtcggacagacttgaagaagttctttaagcaagtccataactccggcattgcccgcattaacctttataagaaatatcccgattcgttgaaattggtgcattggctaccggcagtgttcacgctgggagtctctttgcttttattactgactcttttggggttggggctcgttttgttagctttttatctactatattccaaaacggttcccgggtgtgcgacaggtgagatggcacttctgtttttaggatttgccgccatgttggcagcacctcttcccttactgctctattccttggtggtttgcgtggattcgacaatcagaaatcgcagtttatggattggaatgctgtcgattactgcttcctttatacaactaattggttatggaacgggattctggcgtgcatggtggcagcgttgtataagaggaaaggacgaattcgaggcgtttcaaaagaatttttataagtaagtgatttgatcatggaaagcaaacacaaactatccatcaaccagtgggcgctggaagaccgtcccagagagaagatgatggagaaaggagcagccgcattgagtgatgccgaactactcgccatattaatcggctccggaaatacggaagaaagtgctgtcgaactgatgaggcgtttacttctctcttgtgataacaatctgaactccttggcaaagtgggaagtctgcgactattcccgttttaaaggaatgggaccggcaaagagcatcactgtaatggctgccctggaactcggcaagcgacggaaactgcaaaatatccaagaacgcccccgcatctcttgttcaagagatatttatgacatcttccagcctgtcatgtgcgaccttgaacaggaagaattctgggtgttattattgaatcaggcgacgagactgatcgataaggtacgtatcagcaccggcggaatagacggaacgtatacggatgtacgtaccattcttcgggaagcattgctgcagagagccacgcaaatagccgtagtgcataaccatccttcgggaaatatccaacccagccaaccggaccggacgctgacggaacacatccgccgggcagccgacacaatgaacattcgcctgatagaccacgttattgtttgtgaggataagttttacagttttgccgacgaagggctgctctgaataaatttattcttatctttgcaatacatattaataaggaaagccctatggaaaaatttaaaatagaagaaaagatcgtagccatgctaaagacggtgtacgatcctgagattccggtgaatgtatacgatcttggactgatttataaaatagacgtctccgacaatggggaagcagtgcttgatatgactctgactgctcccaactgtccggcagccgatttcatcatggaagatatccgccagaaagtagaatcggtggaaggagtgacaaccgccactatcaaccttgtgttcgaaccggaatgggataaagatatgatgagtgaggaagcaaaactggaactcggattcctgtaaattcatagctcaaaatataaaactgataactctaaactcaaaactcatgaagaacgtttatttcctttccgatgcgcatcttggttcccgtgccatagaacatggacgtacacaggaacggcgcttggtgaacttcctcgacagtatcaagcataaagcttctgccgtttacctgttgggagatatgttcgatttttggtatgaattccggttagtggttcccaaaggatacacccgctttttaggaaagctctccgaactcacggatatgggagtggaggtacatttctttaccggcaaccatgatatctggtgtggggattatctttctaaagaatgcggagtgattattcatcgtgaagcattgactaccgaaatatacggaaaagagttttatctggctcacggtgacggactgggtgacccggacaagaagtttaagttgctgcgctggatgtttcacagtacaacacttcagacactgttttctgccatccatccccgttggagtgtggaattgggcttgacgtgggcaaaacatagccgcgaaaagcgggtggacggcaaagaaccggattacatgggggagaataaggaacatctggtactttatacaaaagaatatctgaagagtcatcctaatatcaacttcttcatttatggccatcgtcacattgaactggatttaatgttgagtgctacttcccgtgtgctgattcttggagactggattaactatttctcctatgcggtattcgatggggagaatctatttttggaagagtatatagaaggagaaacacaagtttgattcttattccattaaaaagtggaaattccgattgatataaggtttcttgaagatagatagaaaccggaaaaagtcaagaccacgtcttctgatttattctattcttatgaaatgaatctgaagacgtggtcttgatgtgtttagttgcccaacttgaatactacagaggcgtatcctcccagtttcaaggtgtaactgtcgctgtctgtattttgttgagcttcgccattcacaaacaatactttctcaatcttgtctgtcagcggaagtagcatggccgttccgccgaaattatggatgacaagcagtttctcgttgtccttggtcatataccaggcggcaatcggcttatagtctttctcctgtgattcgttgtagacggaatgtttggtcatatttccttctgccagtgccggataggtgttgcgcaatcgggtgagggagaaatatatgttcagaagtgaatgggtatcggcttgttggtccgctaccgttttcacatttttcgaaacggtggcatccgtcttgtctgtgtagttggtagtgtagctatctccccatagcatcgggctgcgcacatattcgtctccgttaccctttgttccgtaaagtcccagttcttcaccgtaatagatgtaaggatgtccggcggaagtgagtaagacggcggcggccagtttgcatttgtcggcggatttacccaacttggacgatgtacggtcttcgtcatggttactcagtttcgttgcttcgatgtaatcgcttcgatagttggcgtatttctgttggtaagaaaggatgtctttggcaaaataacatccggtactattattgattccccattccagacgataccagaaggaaaattcaaaaagggcgggcagacctttataataaggagctactttatcgtattccgataacacttcgcctaccatatagaagtcgtccgtatgtcctttttgtttgtaataggcgttcatatcttcatagaacattttcaggaaacgaggattttcttcgctggtctcactgtggtagatgtgcttcacggcgtcgaggcggagcccgtccacaccacgggcgatccatcctttggcggcgtctgctattgcctgatatgccggtgattcgcctgcctggtctacagggccgtagttaaggtcggcaaaccagtcggtgcagaaatgagaatggaaataggtgatctgctggctgtcgaacatgatgttggcagggttgccggcgttggtcagtttgaaatccttgttcagcgtgagtttctcggacgaggaagaggcgccgtattttgttccggatggccaggaagaagcattgctggtacggatcagaagcccccaagtggactcaaagtcgacggtgagttcatagatgttgtttcctttgtcataaaactttttgcagatgtcttctccgtagtataagtatttggcgttgtcggtacctgtgtccggattatcctcgtctgctttggtgcctgtggaaacgacaaggatgggggaagatgcgttgctccagtccagtgtaaatttcagcagtcctttcacggcagcggtctcgtcagaaacctgaaaccattctgcggcattgtatccggctgctccttcttgggtgatcatggcgattttgcctgctgcgatatctgttttcgggtcttcagagaaagaataataattgcgatacgggctttcggatgatgaactagcttcggtgaaccacgggtgggcagtgccggtgtggttcattacgtagtccagataaatcttgatgcctcggttgtgggcttctgtaaccagacggtcgaagtcgctttctgtgccgagctgcggattgactttggtgtagtctgtgacgtcatatccgtgataagacatacaggggtggatgggagagagccagagggctttcacgcctagttggttgagatagtccagcttttgggtgacgccattcaggtctccatatccgtctccgtcgctgtcggcgaaggaatagaccagtaactggtaggagatatctgcccgtttggtctcgtcccatgtgtcgggagaggcggtaagtgcggtccattgcccttcgatgggcggttcgggttccggagcagactcagtgatatttttgtcatcgctgcaagcggtcatgaatgccatgagcattgacaaccacaaaagagataataagtggagatgtttattcataatgatgatgtattaaagacaataaatgtagtctcttaaaaaacagtggccgccccgattttattgtattcgcgacggccattccctgtttctctgatttcttgtagtattattcgatacggcctgttccgttgccgaagttcagataaaccttttgtccggttttaccttgtaccgcagcttggtcaccaccgttgccccggtaagctatttgtccgtcgaagatgataaattctgttttccaccagtcgccggcagagacagctttcggatttacgcagattcgtactgcgccatctttcaagaatgccggagaaacaaattcaccatcagccgttccgggcacggtaaataagtcctgttctaccagttgtgcgtcccaaccgttgtatgaggtatcgcccatcagatatacattcggcttttcaaattctatcgctttgtcatcgccgataacggagacatatactaagtaccagccggctataccgacttttatgttgccgccctcgtccgacaatccggcaaggtctttggattcctgtgagatagcatctacaaagccgaagtcattgccccagttggcttgcggtgcaaacttcacctgatcgttagcagcgaaatagaagattccccagaaagttcctttcgttccgttgaccggaacaagtgctttccaagcattcggatcaccggcaggagttccccagttgtatgcgctgccggtcatataaagttcggtgggcgcactgttgtctttcactgtaaaacggtagttgaaggcatcgaacgagattttgatcttaccgtccagtgctgtattaatggctcccgcatttgtccagctaacaaaattatcaccggagtcatcaccgtccacactacttcccaaggctttggtccagtctatgtcgtttccgttaatagctgaagccgggaaaatcttgaagttcgaagtactttctatttctgcttccagtatatacaggttttcatcgagagcgtccttcttcatctgttgggcactgttgccgtcccagcctgtgaaatcaccgactatataatagccgtcgggatcaacagccggagttgtggcaggctgcaaggtgatgcttacttcatttcccaccagttgaataccttcaccggaaggagttacggcagaagcattaatagagattttcaattcacgtaccacgcttgcacggcttttgtaggcttcctgcgtcacactgtccagttgtgccaaggctactttaaagacatgatcttccgtcatggaaaatggaatggtgtgattctcattcagtgtcaaagagttgacagcaatcttactgccttcttcggctgtggtcgagcttaactttgcaatttctacggaatcggctgtggccgcatccatgacgatgctggcgtctttgcctgctgtgaaagttgcagtcaactgtcccgctgactcttcctggggattggactggggatcagcccagtccttgaaatcttcgttacaggcagaaaacccgattgctgccagaaacatccctatgtatattaaatgttttttcatgatgaatcgttctttttaaagttaattacttcttttctcctgtacctgccgtgaagttcagatggatcacattgccggctgaaccttgtacggaataaccgtctcccttttctgtccaactgtcaataaggttgaaatcacgatagaagatttcaccgtcatggagtgtaaactcagttctccaccagtcgaggtctgtcttgaagcacatacgtacttctccgcttgcagtcatggcaggagatacgaagttaccgtctttggtggcgggaaccgcaaacttccattcgtcgttgaatgcccacgaaccaccggttgtgttaccgaacaaatacacttcagctgggtagaaagtaatggtaaactgataatcatcccctttgacagccgctttgacgtagaagagataccatccggcgttttctacgacgaagttgtcactgccgctgactcctgctccggctttgtcggtaaccgtcacgcggttgtcgttaataccgatatactcgttttcctttgttccgaacttgaactcggagttggcatcgaagtaaatcattgaatagaactgaccgtccataccgtagacacctgccatcggtttccatactttccagtcggtatccagcatagaacctacaatgaacattgtcttgggaggtgtcaatgagctggtgctcttggaaatcagaacgttgggtaactcaatcacattggaaaaacatactccttttccactgcttgtgatgttggccttcaggcggatatatacagctaccggttcggtagggagttctgcctgctctccgttcacggccgtccacaagtcgagaagcgcattgttgagttcggaagcatccacattgatctttgctgtcggggaggtgctttccaacactgtatagttggctttgctctcatctgtcgcttctatgaaatcctgttcaaatgaggcttgtaccgtgtaggtggtagctgccggaaaaccgtagtccggttgcgaacaagtgagttctacagtttgggcattcttcaggtcatatacattgttggctgcatacgcgggcgtattgagcgtgaatgtatcgggttcgttcaggatcggattgctgtcattgtctgtttcgcaggctgtaaatagaggcagtgcgaaggtgacagcgagtaatatgttggatatttttttcataatggcattcttttatataaggatgaactcttggttatttatagccttcattttgtgacatattcctgttattgttgatatccgatacagggataggatatttgttgtagtatgaagcgacagatgttccgttcattgctccacctttccagtcccaaagatatttattggttgtgaacataccgaaacgaaccaagtctgaacgacggcgaccttccagatagaattcacgtgcccattcgtcgataagttcctgttcggttacggtctgtacctttcttgtacagttggcgcgtttgcgaagttcattgatgtctcctgtggcgtctcctccctgacggaaaatggcttccgcacgtgtcaggtatgcttctgccaaacggaacaaaggaatatctgtgtcaggataagtagcatggctgacgggttttccgtcagagcggtaattttgccattttacaatcgacaagccatcggtgaatccgctgatcgcatctgtctgaattttgcgtctgccgcctcctacaccagagtatagcaaggcacggtcgtcaccggcagctttgatcatgtcttctgttctgatgccgtgttctgcatcgaaagcatcgatctgctcatctgtatctaagcctttggtcggaatttcaacatcggcgggcagcatcggcacatcttcgagattggagaagaacttttgtaccattgctgcacgggcaaagatacaggaccaaccgttcgttgttcccatacggggcataccggctacacgagtaccacaaaccagataagttgaaccgccatagttacgtgtcttcactccatcctgacggataggcagaatgatttcctgcatggcattttcattctcgtcgttatcggccataaacagttcgctgtaatttgtacatagcttatatgctgagccaatcactttgctggcatattcttccgcttttgcataatcggtttgtccggtgtatacgcctgcgttcaggtacaaacgtgcgcggagcaaccagttggcggctttgtctgcacgtccgaagggagcctggcgaggttcatacatatcagcttcaatttcgttcagttcattctgaatgtaggtatagagttccgtccccttcttctcgacaggcaagtcattgctaaagtgttccttgaacggagctttaccaaacaagtcgaggaagtaccaataatggagggcacgcaggaaacgtatttccgcacgttgacgcagtgtttctgcatctgtcatgccttcggtctggtcgaggaagaagttatattgtgtgatgtcatatcccaaacggacgtaaacccactctgtgcgctggctggaaggactccagctaatgcttgtaagctgggggatgtcctgattctcctgccatgcccaaagacattcgtcggtaggcagttcgttgcagttgaaagtggtacgatagaaaccggattcgccttcgtcctgtccgtcgaggtcaggagagccgtcgatacccttttgtccggttacacccaacatggcatatcctttcacaaatactccctgctggtcgaaactacctcctgtctgagggtcgatgggactaatatccagatcgttgatacatgaagttactcccgaagagagaactgcgatcagtgcggctgaaaatagctgtttgatatattttgttttcatgataaattgatttaatgaatgttagaattgcagacttaaacctaataagaaagtcatagctctgggatatggattggcgtcgataccgctttttacttccggatcaaggcctttgtatttactgataatgaacggattctgtactgtagcatatacacgcccgccaacacctttgtaggtttgagtcttccacagattctggaaagaataacctaacgtgatgttatcacaacgtaagaatgatgcgttatgtataaaatagtcgctcatgtagtaatcaccttgtccgctgaaaccgagtgcgacggcttcggcactggtgttgctatatgcattattggagaacagtcccgaagtgctgacgttggctttgttgctcaggaagtcatagtacacgtagttgttcagactggcacgtaaggagaagctgaagtcaaagttcttatactgcattttggaggtcagtcccatcaaaacatcgcctgccggttttttgtagatatatttgtctccgctgtctattgttccgtttccgttacggtcaacaaacatattttcaataggtttgccattttcgtcgtatacctgctggtaaacgtagaaagagttggctgcgtaacctactttatgcgcctgtaccttggtattgttacctctggaaatcttatcgcctgcttctacgtaataatcgctgtcgtcgccacctgtcaacttggtgatttcattgtggttccatgtaatgttatagctgaggtcccaggtgaagtccttagtcacaatcggtttggcgttgatggaaaattccataccgtagttttccagtgaaccgatattctgtgtcatctgggcattgaagttagttcctacggggatcttaacgctgttcagcaggtcatccgttttacggaagtatccgtcgatgccgcctgtgattcttccattcaggaatccgaagtccagtccggcattccatgtggtcgttttttcccatttcagattttcattgaaagccttcgggcgggaagtagagtaataggtatcgccaaaaggatactgggcatactcgttattgactacatacagaggaagataagcaaaatcatcacctatgttttgctgaccggtaataccccagcctaaacgcaatttcagatcagacagcacatttacatctttcaggaagttttcttctttaatcttccatcccagtgccaatgacgggaatgtaccccagcggttgtctttggagaaacgtgacgagccatcccaacgcatggtaaaggtaaacaagtaacggttcagcagggagtaattcagacggccgaagtaagagaccagtgtatttctggttgcataagctgtttgttcgcgcaatttggcgtcatggggttcttgcgtataggaatcccagccctggccttcttcaaatccgttgcgatggaagtgttgttcttcaccaccgaccatgatgtcaaagtcgtttgcacccaaagacttgatatactgtacgtatatgttgtacgaaaggttgtatttatattgggtaacgtcgccattccaaccataataattattgccgaatgagtatggagaaacaatcgtagtctgtgtaccttccgcatattcgccacctatgcttgcgtgcagacggaggtcaggcaggaaatggaatttatagtcaacgtctacatttccaacaaagtcgttgctgttcgccttgtcatttttgagttccagtgcagccagcggattttggggagagttcggattggacgtgtatttccagtccggattgctgaaacctgtggtagaattaatattctgccagtagccgcctgtaaactggtaagggtcttcgttagaataaaccggacgggtaggatcgatagccaatgccccgccaatagcggcacctgtgtcggcatagcggtttttaccgttcatgaatttggcattgatgttgaacttcagatgatcttcaaagaaggaaggagccaggttcacggaagcagtgaagcgtcggaagttggatgttttcacaataccattgtcgtctgtataacctaaagatacacggtaaggcaggttcttgaatcctccgttgatagaaacatgatggtcggtgctgacagcagtacggaatatctgatcctgccagtctgtattggcggttcctaaatctgccggtaatttgtcaccccataactgattggcgtaagcgcgatattcatctccgctcaatacatcatagcgcttttgagttttggagaaggatacagaaccgttatagcttacgctgggagcttgtccgttctttcctttcttggtggtgataataataacaccgttggatgcacgcgaaccgtaaatggcagttgcagaggcatctttcagtacagtaagggtttcgatatccgcagggttaaccattgataaaccgtttgccatccctttgataccttcgttgtcaatagccagaccgtcaataacgatcagcgggtcattgcttgcattcaatgaagaaccgccacgaatacggatttgagcgccaccgcccggtgtaccgtcattggagatcacgctgacaccggctattttaccggataacatatcctgagcattcgtcgtaatacctttactaagttcatcgggcttgatagccattaccgaaccggtcatatcgttctttttcacctgaccgtaaccgatgactactacttcgtccagtatttccgtatcgtctttcagtattacattcatttgtgtggttgccggaagttcctttggctggtatccgatgaatgaaacaacaattatgtcaccttgcttggcagacaactggaagttgccgtcgaaatcggtaatcgttccggtggtagtgcctttcaccacaacattggcacctataaccggttcacccgttgtgtctttcactattcctttgacagtaatttgctgagcaaatgcgtcaatggacaagaatattccagctataagcataagcaggaccttgaacataaagtttccttttttcatgtttttgtctttaaagttaattgtaatttctcttatcattctctcttaaaaatacctattgaaaaccttctcttcgtcattgttcttagtgctcgaaaacactctcttttttaccaaaatgtatattctctatctttgttatttcttttccttattataatcttttcaaacctttagcttctgatttgtcttttacctctttgatgctgatagcgtatccgcctccgttagctgcgtgcaggttcagcttgctcttattcgtcagaatacctttcttgatggtataagcctgcgggttctctttccagtcggcatctttggcatccgcgtagacggtagcgatgtattgtttgcccggagtcaggaagtcgaatacgagtttggaggtatgaccgttttcaccggctgtgcagcctacgtaccagtcgtccgtaccttttgccttacgggcaattgtgatgtattctcccggttctgcttctagatagttcgtttcgtcccagtcgagagctacgtctttgatgaactggaaagcgtccataaaacgttcgtagttttccggaatgtcggcagccatctgcaaaggactgtacatggtaacgtatagtgccaactggcgtgcaatggtagaacgtacctgagaattatttgccggattcatcttgttgcaatgcgtttcgaagatgccgggagtgtaatccatcggaccgccaaccaggcgtgtgaaaggcagaatcgttgtatgatatactttgttgcctccgaatgattcatattctgtaccgcgggcggattcattaccgatcagattcggatatgtacggcagataccggtagggcgggttgcttcgtgtgcattcaccatgattttgtaatcggcggctttcttcactgcatacaggtagtgattgttcatccattgtccgtagtgatgttcgccgcgggggatgatgttgcctacataaccgctctttacggagttgtatccattgtctgccataaactggtaggctttgtccatgtggcgttcgtagttgcgtacagaagcggaagtttcgtgatgcatcatcattttgattcctttgctggctgcatagcggtggatttccttcacatcgaagtcgggataaggagtcacgaaatcaaacacatagtctttgctgttgccgaaccagtcttcccagccttcgttccagccttcaaccagtactgcatcgaatccgtgagcggctgcaaagtcaatgtaacgtttcacgttggctgtgttggcagaatgtttgccgttcggttttgttttggagtaatccgtttcaccgagttttacgctggtcagttcgtcggtgtaagcccatgagccttttccggtgatcatgtcccaccatacgccgatatatttcacgggttttacccaagaagcggcatccgctatcttgcatggttcgttcaggttgagagtgatacgtgaagcgaggatattgcgggcgtcatcgctcacgataatcgtacgccaaggtgtgttgcagggagtctgcatataccctttgtctcctttggcatccggtgtcaaccaggattcgaataccatattcttgtcgtccagattgaggtgcatacatgagtaatcaaccaaagcggcttcatgaagattgatgtataagccatcatccgttttcatcatcagtgcagtttgtacgcctgtctgtgagaaaggagtctgagaagagttcggagtgatcgcttctttcatcagccctctgatttctgataagcgggaaatggtgtagtcatattcctgcgtatcatagtcacccggtatccagaaagcgatatgatcgccgttcatgccaaactgagaatgctcttccttgatcacgaagtaattgagtgacttctgctgaggaaattcataacggaatcccagaccgtcattgaacagacggaaacggataacgatagaacggtcattcatgggttgatacagggtgactgccagttcgttataatgattgcggatttctttttcttctccccaaaccggttgccaggtttcatcaaaagtagccgtttgggtatcctttacttcgaagccgtcgtacaggttggtctttgagtcaagttttgtcaggtctctgcggtccacccagtcgaagtcggttctggtattatcttctttcttcagttccagtccgagagtgctgggtttgattaccactttgttcttatacgtcagttcatacgttggggcaccttttgagtctacttggaaggtcattaccagattgttgtccggtgaggttaatttctgttgggcattcgcaatgaatgagatgcaaaggaatgcgatgagcgataaaatctttctctttttcattctatttatggtattaaattataagctaactaatatttttactccgctctgttccggatattgcaaatatagcaaccatcttgagactttgggttgtctagaataaaaatacaagtttatattaatgttaatgttttgttttacagtagtttatttcttttctgtattctgataaatataagtcgaagtgaacttattaaaaggataaaaggtatattccacgacttggaagtgttaattcatttcttaattcaacctttttctctgtcaataaatcgaaagcagatgaggcaggaagtatttcttggtaaggaaccaggtcaatggtctgttcccggtcgtttccattcaggaaaacaacgactgatttatcaccgtatttgcgttcgtaaacgtagacacctttattcggtgcgaaatgtttgagctgacctttggcaatgacttcgtttccttttctccattggagcagtttttgcataaaggagaatgcttcattttgctgtggagtgcggttggctgcgtcaaagcagttttttgtatcgttcggccagcctccggggaagtcgcagcggagcaggccgtctccattcgccttgtcggctgccatcaggatttcagttccataatatatctgcggtattccgcgggttgtcagtaagaatgtcagggcttgcttgtatcggtccagattctttgtatctgcttccgaacggtagaagcgggaagtatcgtgattgtcgaggaaggtcagcaggctcattggatggctgtagacgatgtcctgcgacagatattcgtagagtctgaaaagtcctccgttccattcggtagtctcttcgtcgaaagccttgttcatctcttccattagcgggaagtccatgacagtcgggagattgctgttcttcggataaacgagtctgctgtctttctgccagtaggagatgagtacattgttgcccagccatgtttcacctacaatgttgaacttgggatattcttcattgactgctttgcaccagcgtgccatcatatcgaagtcggcataagggtgtgtatcctgacggatgccgttgataccggcgtattcaatccaccagatactgctctgtatcagataagtagctacatgacggtttctttggttgaagtccggcatggtcagtgtgaaccaaccgtcgatagcgattttcttttcgtaatcggaagcatacgggtccatttgagtggcagtcttgaagctggtctgcacgtagttgccttcaaagttaaaccagtctttggagggcatatctttaaacagatagttgtccgaaccgcaatggttgaagatcatgtccattacgactttcagccctttggcattagcttcctgagtaagtttgcggaactcttcgttactgccgaagcggcggtctacctgataataatcggtaatggcataaccgtgatacgatccttctttcatgtcattttcctgaatcgggttgagccatatactggtgactccgaggtctgctatgtaatccagatgattctctattcctttcaaatcgccgccatgacgtgcgaaaggctcattacggtctacatttccttccagcattccgggaatgatgtcgttggaggggttgccattggcaaaacggtccggcataataagataaagcacgtcgctcgaatcaaaaccttctactgccgaagcattcggccggcgctgtttaagctcgtaagggatttttgtctgctttttgccttgtttcaggatgatgtcaaagttctgtggagcagccttcgaaaggtctaaatacagaaccagataattaggattctcctgcttcaccacttcttgcagcgtgatattatcggcagaaagactgacgtctgcggatgatatgcggtcaccatataatagtatctgcaattcgggattcttcattcctgcccaccaaaaggtcggggctactttctttatagtgcttgctgcgaatacctggtgaagaccgggtaataataatagtaagataatgaataataaattccttttcatggtaactagatttttaaaatttgttcgggggaaccgatgatgcaaatgtaggtgaatcgggtatgccgtatggcagttagaaagaaaatataaatgcttgttttgaataggctgttgataataagctttttatcgttattgcctctgtcgaaaaatacaagtgaaaatgaaaattgttatgacgatatttttcgtttttattactataatcattatatttgtcacatcttaaaaaagcaccttatgagaaatctaacctattatcttttgtttcttctttttgtttatcctctttccttgtccgcaaagcatacggatataaataaggcggcccttaaaaaactggatgacattataagtaagaaggaaacttatcagatacggagagaaaaagacatcgctgatttaaaagtacaacttgcccattccaccgatcctgcccggaattatgagttgtatgcctccctctttggggcttacctgcattatcaggcagattcggcgcttcattatattaaccgtcagatggagatattgccccaattaaatcgtccggaactggaatatgagattgtcattaaccgtgctacggtaatgggtgtaatgggcatgtacatcgaagctatggaacaattggagaagattgatcctaaaaaactgaatgaatggactttgctttcttattaccagacatatcgcgcctgctacggctggcttgctgattatacgacaaacaaaaccgaaaaagaaaaatacctgaaaaagaccgatttgtacagagattccattatcgccgccatgcctccggaagaaaataaaacgattgttatggcggaacgatgtatcgtgaccggaaaggccgatacggctatcggcatgctgaacgatgcactgaaagatatggaagacgaacgtcagaaagtatatatctattataccctttccgaagcatatagcatgaagaaagacgttgagaaagaagtttattatctgatactgactgctattgcagacttggaatcttccgtcagggagtatgcttccttgcagaaactcgcgcatctgatgtatgaactaggggatattgaccgtgcttacaaatatctgagttgttcgatggaagatgctgtagcatgtaatgcccgtttgcgatttatggaagtgacggagtttttcccgattattgataaggcttataaactgaaagaagagagagaacgggccgtttcccgtgccatgttgattagtgtcagtctgttgtcgctgtttctcctcattgctattttctatctgtatcgttggatgaagaaaatatccgtcatgcgtaggaatctaagtttggccaacaaacaaatgtctgcggtcaacaaagaattggaacagaccggaaagataaaggaagtatatattgcccgttatttggacagatgcgtcaattatctagataaactggaaacttatcgccgctctctggccaaacttgctatgtcgtcacgtatcgatgacttgtttaaagcaatcaagtccgaacagtttatccgggacgagcggaatgaattttataacgaatttgataagtcattccttaaactgttcccacactttattacttctttcaataatctgctggtagaagaagcaagagtttatccaaaatcagacgaactgctgacaaccgaactccggatctttgcccttattcgtttaggagtagtggatagtaacaagattgctcattttctgggttattctttggcaactatctataattaccggagcagaatgcgcaataaagctgccggagataaagatcggttcgaacaggatgtaatgaatttgtaagtacactctagtctctcttcatgtctccaatagacataggtatgatatgactatttgattgtatatgaatgtgtagtgtactgaataagttgacact

SEQ ID NO: 4553 - DNA, 44336 bp, Unknown
  gut microbiota DNA sequence
aggatacgttaatgttcgtaaacttgggtaagattttatagatattgtttggagaggacttagaattcaccttcatacaattaatgtaattcccgactaaacaggtgaataattacttaatttcgtccggccaaggacaaggtttatccgtagctttgactgtaggacgttgggcatcaacttttctcaaataggttcctaattctttagaaagccgtttcacaatatccggatgttgtgcgctgagatcattactttcgcctatatcatcggggatattgaatagttcttttttacctgtaccatagtaatagattaatttccagtcacccttgcgtacggcacagttaaagttgattcccggaccgtcgttaccccagttgttgggcatattccagaagaggctgcgtcctttggaaggattcctggtctgtttcagtaaaggcatgaagctgatgccgtcgataggctgaactgtcttgtattttttgatgcccgccatttcgaggatagtaggatagaagtcttctatcagcaggtaatcattgcatttgctgccaggggctacgacaccgggccagctgacgatcatcggttcacggatgccgccttcataggtggagcctttaccactgttgagaggatgattctgggtgtgcagtttgccgtcacgccaatacgattcggcggcaagtcctccgttgtcgctcatgaagataataatagtgttgtcggcttctccgcttttttccagccagtccatcagatcgcccagactcttgtccatgccttcgatcagtgtggcgtatgcggcttcatggtcggtcatgccttttttcttgtatttgtcgtagaaacgtttgtccttgtccaaggggacgtggatggcgtattgggacatatacaggtagaaaggctggttgtacttcttagctttgttcagagctttgatggcttccagagttaatgcttcggtgacgaaggtctccgtaccccagtacttttcaagtccgggaacggccatgagtgatattggctttccgtctttgttgtgaccgtaattctcttctcccagatagctggcgagtcctccggcagcatgtccggctatgtttacttcgaagccccagtggtgcgggtcttctcccggagtgtctatggcaccgaaatgtgcttttccgcaatgaatcgtatgatagccgctgtctttcagtagttgtacgaaggaggttcctacgaatgtgttgttggtgccgggcacttggcttactccgttgtagttccagtccggcacatccagtactttatccttgcggtctgtctttgtgttcttttgcagcgtccagttggttacccggtggcgtgccgcgttcgttccggtgatgaggctgcatcgggtgggggaactgatactgctggcatacgcttgtgtgaacatcatgccttgtttggcaagtcgttccatgttgggtgtttcgtacagcttattgtaatctgtcttttgtgtccagaaggggagtgaagtgtcttgccatcccatgtcgtctaccatgaaaaggatgatgttggggcgtttgtccacacgctgtgtctgggcagacttctgtgtttgcaggccggtggcagccagtggcacgagtgcgagggggaaaagtatttttttgttcatggattaattatttagtgttatttcattatttcaattctgccggcctttttgatcggtatgctccgtaattcctgtttcccgtgggagtctgcccatattcttaatgtaccggtgcagtggacatccaatatcagcttctcggtagtacgtttgagtatctgcacggtagcaggcgaaaggtatttttcttgtatgccgatcactgcccagcctttacggatggggcaaagatggaacagactatctataaatccggataactttatttttctttcagatgcgttcaatacttcggcgctctgtttttcccagttgaatgcgagaatgctgtcgcaagaagaatctgcggatttgccggtgctttcccgtaacaggtaatcttcccgtttgacgaaactttctacttcccgataagcgggagaagtgttcagattgtagcaaatgactgagagcgcttcgtctcctgtaggggcaaatacacggtaggctttaccgctttgcaggggattggtcagtatggattccggagtcgggatggcgggagccgccggacggaatatctttccggtttcatcaatcagggggcggatattatcggcaataaattcgcttggagagtcggacaggtaaacaggtccgccggagatcgctttcgaacgtgccatcagactgccgcaaacggtatcgcaggaatgaaacatatcgtggtcgggccagacggtctgccccagtatgagtgtattggtatatgactggaacagatgtgatttagccatattctcgtcatatttcttatagtcgatgctggcacgggttacgctgctgtacaaggtatggtcaatgttcagcacattttgtgccatgcagttcatcagtcccatttgcattcgatgtgtctgatgttccagggcaaggttgcagtctttagcctgtcggataacctgcgttccgcccatatagagcgggagggtgaaggattgattgtctatcttcaagaagtcaaatccatactccttcatggtacggacataatattcgtaccatgtttctatcttttctgtactggtgccgggcagtaaactgccgttgtaggagtgtagaacttgccggatttccggcggaaagtcattctcggcagagattcccatccaatagccggaaaggctgtaccatagccctatccatcggattttatctgcttgtttgcgcttcatgatgcggctccatccgttcggaaaacgttttttgtcggggacgagactggtcagttgccggttcttgttcgctatgtgtccgtcgtcaattaagacataacgtaccggtatgccggatgcttcgatggcatcgatatcgttcagtattttcgtttcatcaatgtcataatgataatgttcccaagtacaccatcccagatagtcgaaagcattgaaatactgtttgtccgctcttttgcggagggcagatacggctttgtctgcgattaacgaatcgtaggcgtcactgaatacatggtagacggatgaagatttccggaaaatcaggagggggagtcggccggtcagtgcatcttctcctagtgtggagacatacaatgtgagcgtgccgtcctgattaacctgaaaccagctgaggctgttgctacccgcaatggctttggcgaacagatattctccgtctgcaagttcaaggagcagtgcgtcgcccgatgcggacggcagggcattggaaggaatgcttgcataatcgctccgtgtgaggtcttcgagatggttgaacatccaagggagcaaccgattggtgttattcggccattgatagtcgccggggcgggaatcacggctgaagaatatgccacgaacatacaaaggaagtgcaaccttatacgaaagagtgctttggtgttccggcacttgttgttcgtataaaatgggggtggatggagtatgggtgttcaggtcgatgatttcttccatccgataagctgcaacatctttgtatgtcttccctttatggtagataaacgggttctgtgcagacagcgatacttccgcaaagatgcccgtcaatagccataaacagatgtggattattcttttcatacctcttgtgttattttacggaataggcgctgaagtttataatatccggcagtgcgacagattcggatacggtcagtcttaatgctgtggcttctaccggttcaaacttttcgattcgtttgtgccccacggattctcctttgcagactgtttgccatttaccgttcactttggcttctatctgatattgccggatgcgttctccgtttttgatgttttcctggatgatgcagtaattgacagactgctcctttccaagtttcagtgtcaggcttttcttttgtcccgaaatgcgggctatcggggaggagaaccgccgattgatttcatctcccatttctttcaggcgctgtgcgtctccggcagggattaatccggtcgggtcaggagttaatccgagaatgagggtggcgtttcttcctactgacttttcatatttatccatcagcgtgtttagcggatagatgttgttctcgtcatccggttcccagaaccattcgtggcggccgtttgctccccgtagcggagtgtctgccatcgccggtacccagtatctaccgttcttatcgccatgttttaacagttcgagttggtcgatactgctttcaatgcgtttatggtgtgagcaagggacgggaaaggtagaccagcagggatattccactgtacctgtctccgaacctccccaacggaagtcggcacggtcgatgttatgatagaaaaggcagtttggctgatacttgttgacaatcggttccacgtcggggccatcggcacggggatcatcggctccgccgtcaaaccatatcatatataaatctccgtagcgggtgcagagttctgtcaccattttctcgcacaggcgcttgtaccatgcctggcggttgcgggcgaacgctccttctccttcggccttgaagttatggatgcccagcagggagttccatcggataccgatatagatgcccggttgcagaccatatttgcggcaggagttgacgaagtcacggacaatgtctcctttcccgtctctccatttcacggctttcaggcaataagggttgacgtcgctttgccagagtccgaaacctgtttcgtgggtagcagtcagtacggcaaatttgcatccggcagctttggcagcttgtacccattggtcagtattcagttcggtcgggttgaagatgttgtaatcttcgatgggattgatacggttgttgccttgtccgtagcggatgccgtcaaacacgtgcaggtcataatggaagacagctcccatttccgcctcatgccatttgagttgatggggcttggggacggggagttcctgttgttgtgcgaagctgcaaactgagtataggataaaaagagagagatagcaaagtttcttcatggtgtttatttagttacggtttcaagataatgggcaaatgaatcgttggtatggagtagccatgccttgagttgtttgttgaattgccggaccagacggggggattgtccggcaatattatccatttgataggggtctttggttcggtcgaaaagaactgtttcgtctattttttcattggttgcgtggactgcgaatgtatgggttgacgtacgtagcccgcggtatccggtggcatgattgtcaaactgtacataataataaggttgtaccacttcttttttactcttgcccagaatatggcgggataagtcgaaagtctgtaccgtttcgggtatttccttccggaatcccatcagggaaaggagagaaggatataagtcggcgaaggcgatcatcaaatggtcgtctttgcgtggctttatctttgccggccacgagataatcatggggatgcgcatggcttcttcgtagaagatatcttttccggcattgttgtgagctcccatgcagatgccatgatcggaagtaaatacaatgatggtattctcaaacagtccgttgcttttgagggtttcgatgatacgtcctacctgctcgtctacccctgtgatacaggcgtaataattgcgtatgttatttctgaaatagtttcccatttcggttcctttggcgggtatgtcggggcggtgggcacagagggcttccacatctatatccttatatagggctttgtatttgtcgggaaccagttcgtaaccggtatgcggaggattcatcgatacgaccagtgcgaaaggttgtttattctctttttgtgtctgaatgtattcgatggctttgtccgcttcgtatgcagggccccattggttgacgtagtagaaactgtcacgtggagcagtcgtgtcccagtacatcggtttcagatgataatcgtatgtcccgtaggctgtccagtattcaaatccgtggcggcgttcgggcggacaccattcgttccacgctactttgccacgattgttgtaagtgtctacataaggcttgtaaggagaatccagatgccattttcctatgtatcccgtacggtagttcatgtcttttagtacatcactccaacagcgggcctcctgtggaagctccactccgtaaggtgctgtttgtgaattgcagttgcctgttactttattatgcagggggtacatgcccgtcatcagcatggcacgggcgggtgatgaaacaggataactgctgactgcattagtgaataagactccttcggaagccagatgatccaggcaaggagtctttacaggttctttgcccagacaacctagtgcgtctccccgatactggtctgccatgatgaagacaagattcggagacgtctgggcggcaagcggaagaaccggaacgacgagtgtagctccgatgaaccatttatgataatatgtactctttggtatgtgcattatcataaaaatttctcctttgtgtctgacaggttaagataaactaaggtcattgtatattatttaaaaggtgtacatcaggttgttgtatggctgcaaatgtacgcaaacaatgtggttccgaatatgcctgtttctttcattcaacatacatgtttaattcataagtccatttctttattcgtttttttgtatgttctgacttaatttcgtttatttgccctaaattgtctaatagaatgaagcacttaaatctaatcctgattatcctgattctgagttgttgcccgctgcatcctgcctatgctttttttgataaagatattcggctgctgacaatgagggatggattggcggataacacgattccttgtatctataaggatgaagacggatttatgtggtttgggacggatgacggattaagccgttatgacggaaaaacgattcagaatttcaagcctgtggatacgtatgcttcggttgctgccattgtgcgactgtcagatgactttttaggaattgtatccgatggatacctttattatttcaaccgcaagcaggaaacttttcttccgatacatactgaatcagatactgccataggtgtatttaatgtcctgcccgtcgacgattcttctttttggggaatatcgggaaacagactgatactctgtcaatgggagatacaacaaggaaaggaagaagaaaaaacggctgttcgggtacgcatacaaaagacctttcagttattggaagaaaaaggagaagtcttttcttctctgtgctatgatgaaaaagccgggaacggaatatggctgacaactaaccggggtaatctgatcctgtttcatccggatattccggaggcatatcagaagataccgctgacagacggaaaaccattacaagtcacttccatcttgaacagagacggagttgtctggatttctaccatcgccaaaggcattgtccgttatcacacgaagtcggggaatatggaccggatttcgtacggcgggacaggaaaagagaatctcctttctcatacagatgtttatcagactatatttatcggcaataaccgctatctggcagtgacatggggtggctatacactgttgatgccggatgaaaagaatccggaagagctgacgtcagaggtgtataacaatacgcatacgcagatttaccggaacctcgaaacacgtatgatttctgcctgttacgatcctaacggccttctttggattggtactaatggtggaggagtgatgtattctgatttgaggtcacagttttatgaccgttactatcaggacaggcataacgaaatatgcggcatcctcatggatgatagtcatcgggtatggttggcgacttatcacaaaggaatcatgcgaagtgacataccgtacgcacaagggaaaaaactgagtttctctaaagtcgatacaggcagcgggaaatcggaagaaacgatgttgtgtgccttgaaagatgtagaaggcaatctgtggtttggaaatataaacggtacattgactgtttatcatgtccggaccggtcgtttcgtgactcattcactgttggtggacggtgttgccaacagggcttcggtgtgggctttgtatatggatgataagaacaggctctatgtaggtacgggagacgggcttttattgtataaccgtcagacaggtatatgcgccaaattatcagcagcacactatttaaatgagaaaagacaacctttcattcgtgcgattgctcagacaaaagatggaacgatatggctggggaccagcaatatgggagtttgcagagtagttgaatccgcttccggaggtatctccgtagaaaatggatatgagcagaagatgaacatggaatatcgttcggtacgttcgctgctggcatcctcggatgggaatttatatataggttatacggatggctttgccatcctgtctccacaacaaaacagaatcagtgcccgttataccacgaatgacggactgtgcagtaacttcatcggctgcatagcggaagacagcgaagggcgtatctggttgggaagtaactccggcatatcgcggtatggtcgtcgtcagcatctcttttacaattactacatagcaggtagtaaccgttctgccgtattcagtgacaagactttgtttttcggaaataatcagagcctgacttatttcaatccggaggatataaatgcctatccgaccaacgaacgggtgttgataaccggtttggaagtggataaccatcctgtcgggaccggagaaaagattaataatcagatcatcctcaatcaggtcatctcttttacggatcacattgtactggataatgataacaaagatttctccttgactttcaataacctgtcctactcggacgaacaacaaaaatataattaccggcttttgccttatcaggggaattggttgatttctgatgagggagagaaagcctcgtacaccaacctcccagccggtgagtatgtatttgaagtgaagaatatacatccgaacggtcagacaggggcggtgacttctctgaagatcgtaattcttcctcattggagtcagacttttgctttccggcttttcgtttccctgttattgctgggaggagtggcttatggagtacggttgatcagaatacggcagaaacggatggaacacgaaatgcagatgaaacatgaacttttgacggtcagtatggagcgtgagaaagaacgtcagatacgtgtggaacgcgagaacttctttacgggcgttgcccacgaactgcgtactccgctgactttaatccttgccccgttacaggaattgatgaaacagtgcaatccattggatgacttttataagaaattgcaggtcatgtataagaatgcggcctcactgcacaccttggtcgatcagctgctttatgtacaaaagataggggccgggatggtcagactccagttatccgagactgatctactgcagctggtctgcaatgtgtcagaaccgttccggcagatggccgaaatcaaaggtttgcaatttgatgttgatttgcccgaagggaagttcctgtattgggtagatgagggaaagatcgcttcggccgtgcaaaaccttctttcaaatgcgtttaagtatacccctgcgggagggcgtgtcctgctttctgtctcttatctgatgaaaagtgggcagggttattgccggatcaccgtttcggatacaggtgcagggattccggaatggttgcagaaacatgcttttgaatcgttcgtaacgggggataatgtacctgagatgtcaacgaaggcaggaataggattgcatattgtgaagaacacgatggacttgcatcatggattggtaacgctgaagagtgtgccggacgaaggaagtacctttgccctttatattcccgaaggcaaagcgcattttgcaaaagattcttatgaacttattgacagccatcaggaaaagacaaagcaaaatgaagagctgaaaccggaactgtttcttccgataccggaaaacaaaacacaggaaacagcggctaaaaaaagtctgctgatcatcgaagataatgaagatgtccgcgaatatatccggagcttattcatttccagatatgcagtcagtgaagcttgcaatggtgaggaaggggtgcggatagccaaagaacagttgcccgatcttatcatctcggatgtgatgatgcccgtaaaggacggctttacttgttgcagggaaattcgtatgcagcaggaaaccgcgcatattcctatcttgatactgactgccagagcagaagatgctgacatcctgcaaggctgtaatagcggagcggatgattatatgatgaaaccctttaatccggagatattaaagaccaaagtggataacctgattttgcagcgtgagcgattgaagcggatttatacgaaagccctgatgctgaaacaggaatcggaagagggggagaaagaagatgccttcttgcaacaactgattcatatcatagaagctaacctttccaatgcggactttaatgtaaaaatgttggcggagcaactgaatatgagtcagcctaccttgtaccggaaggtgaaacagcgcagtgatttgtctgtaatagatatgattcgcagtatacgtataagcaaggcggcgacattgattctggagaatcgctattctattcaggaaatttcggaaatggttggttattccgatacccgtactttgcgcaagcacttcatggagcagttcggcgtatctccttctaaatatatgggtagtactgattgataacctacaagtcgatattatatagtttcagcttattatataatgtcttccggtcgatattcagtaattgtgccgctttgctcttgttatttccggtttggcgcaatgcctccagaatgtgttctttctctgtttcttcgttgcgtagcgccatgcttgcggaacaaacggtacttgtttccagtaattcggtccctaattcaagaagagtgatgaaacttccttgtgccagtaaagtcgctctttttacgatattcttcatttggcgtaagttgcccggccagtgataattgagtaaggcttgtgaggctttcgagtcaaaaccgatcagatgcttgtccagttccttgtttgcctgatcgaggaagaagttggcaaacaacaggatatcctctttccgttctttcaggtcgggcatccgcagggtaaattcattgatacgatggaaaaggtcttcacggaaagtccctttctcgatagcttgttccagattctcgttggtggcggataccagacggatatcaaccgaaacttcttgcgtggaaccgaccggacgaatctttctctcttgcaaggcacgaagaagctgtatctgtacctcgtaactgagattacctatttcatccaggaagatagtgcctccattggcggcaacgaacgctccggtcttgtccgtcagtgctcctgtaaaagagcccttcacatggccgaaaaactcggatgcagctaattctttgggaatcgaaccgcagtctaccgcgataaacggcttgtcattccgtttgctcagttgatggatgcggtgcgccacatactctttccccgttccgctggaaccgttgatcagtacggacatattggtgggagctaccagacctacataattatagagttgcttggcggcatcactttctccttccagataagcatgatgggtttcggtggcgtttccggacgaaatggaagaacctttctttgcagaagttttggctgcggtatgcgtagtcggcgcttctttcgcttgcaaagcttctgacatctttttgagtagttcctccggattcaccggtttggcaacataatcgcgtgctcccagtttcatcgcttgtactgccgattggatatcggcataaccggtcatgatgatcaaaggaatatcgattcctttttcgttcatccatttcagaagatcgattccgtcgtgatccggtaagcgtaaatcggacaggattaagtctgccccttgtccttcaatgtgcttctgggcacgggcaatgttactgactgacgacacctcaaacccttttttacttagccaggttttcagcatcattccgaaagtgatatcgtcttctattatcaatatggatttcatcatactctcttttgcctcttttaatgctacaaaggtaagaggatttgggcgaaagtagtatatttgcaaacttaaattaaataaaagtgttatgaaaaagattgcatacttactattaaccatatcgttttgcggacttacggcctgcaaaaccggaacaaaaaaaggaggaaatatggacaacgaaacgttggtaaagattgaaacaaccttgggagacatcaaggttaagttgtataatgagacgccgaaacatcgtgataatttcattaagctggcagaagacggcgtttatgaaggaacgctattccaccgtgttatcaaagactttatgattcaggcaggtgacccggattcaaagaatgcaccgaaaggaaagatgctgggtgcaggagatgtgggttacacccttccggccgaatttgtttatccgaagtattttcacaaaaaaggcgctttgtctgctgcccgtcagggagacaatgtaaatccgaagaaagaatcatccggttgccagttctacattgtgacaggcaaggtgtacaacgactctacattgctgggcatggaaagccagatgaatgagaataagatcaatgttattttcaatacgttggctcagaagcacatgaaagaaatctataagatgcggaaggaaaacgatgaaaacggtttgtatgaattgcaggagaagctttttgcagaggcggaagcggaagctgccaagcaaccggaatttcactttacgccggaacagatcgaagcttatacgactgtaggaggtactcctcatctggacggtgagtatacggttttcggtgaagtaatcgaaggcatggacatcgtggataagattcagcaggtgaaaaccgaccgtagcgaccgccccgaagaggacgtgaagattgtaaaagtagaagtactggattaagtagaatgaagattaacaggcatattttggacaatgggttacgtctggtacattcgcaggacgaaagtacgcagatggtagctcttaatgtattatataatgtgggagcccgcgacgaacatcccgagcatacaggctttgctcatttgttcgaacacctgatgttcggaggttcggtgaacattcccgattatgatatgccgctgcaactggcaggcggcgagaataatgcctggaccaataatgacataaccaattactacctcactgtaccccggcagaatgtagagaccggcttttggctggaatccgaccgtatgctgagccttgatttcagtgaacggagtctggaagtacagcgtggagtagtaatggaagaattcaagcagcgttgcctgaaccagccttacggagacgtcggtcatcttttgcgtcctctggcatatcgggcgcatacttatcagtggcctaccatcggaaaagatttgtcgcacatagccaatgcgacgctggaagaggtgaaagcattcttcttccgtttttatgcgccgaacaatgcagtgctcgccgtaacgggaaatatctcttttgaagaagcagtcgcattgacggaaaaatggttcggtcccatccctcgcagggaggttcctcaacgtaatctgccgcaggaaccggagcagacagaagaacgacggttgacagtagagcgtaacgtaccccttgattcactattcatggcgtatcatatgtgcagtcatgatcatccggattattacgcttttgatatattgtcggatttgttgagcaacggacgttccagtcgtctgaatcaacgcctggtacagcaaaaacaactgttttcgagtatcgacgcttatatttccggtagtgtggatgccggattgttccatatctcgggcaaacccgcggcaggtgtttcgctggaacaggcggaagcggccgtacgtgaagaactggaacgtttgcagcaagaacctgttgacgaacaggaactggaaaaagtgaagaataaattcgaatcgacgcagatattcggcaatatcaattatttgaatgtcgctaccaatcttgcttggtttgaactgttgggcagggcggaagatatggaaaaggaggtagagcgttatcgcgctgttactgccggacaattgcaaaaggtagctcagtctgctttcaggaaggagaatggagtgatactttattataagaaacaaatatcctgacttctccttaccggcgggatatttattggaggcaacggcaggatgcggagttgccggaatatgcgattaactacggaaaaataaatgagaaatatctatagtatatataaggagcattacaaagcactgatttctctcggattgcccattgtaatcgggcaaataggagttattgtgctggggtttgccgatacgttgatgatcggtcatcatagtacgatagaactgggtgctgcttccttcgtcaataatgtattcaatctggtgattattttcagtacaggcttctcgtacgggctgactcctatcgtgggaggtttgtatggaactcatcagtatgcttcggcggggcaggcgttgcgtaacagcctgctggcaaatttgttggtggcattcttgcttaccatcggtatgactgtcctttattttaatgtgggaaatctgggacagccggaagaacttattcccctgataaaaccttattatctggttctgctggcttcgctcgtctttgtgatgctgttcaatggcttcaagcagtttacggatggaattacggatactaagaccgctatgtggatattgctcggcggaaatgtgctgaatattatcggcaattatatcctgatatacggaaagctgggcttgccggaaatgggcttgctgggggcaggtatcagtacgctgttctcgcgtatcatgatggtagtcgtatttatcatagtctttatgcggagtccgcgttttcttcgttttaagctcggcttctatcgtctgggatggtcgaaggctatattcggacgattgaattcgctgggttggccgattgcttttcagatgggaatggagacagcttcgttcagtctgagtgcggtgatgattggctggctgggtaccattgcgctggcttctcatcaggtcatgctggctatttctcagtttacgtttatgatgtattacgggatgggagcagctgtggctgtccgtgtgagtaactttaacgggcagggcgatatactcaatgtacgtcgttcggcttatgccggttttcatttgatgatggcgttgggtgttgtgctttcttccatcgtattcctctgccgcaattatctgggaggttggtttaccgatagtaccgaagtggcggctatggtaacttcgcttatccttccgttccttgtatatcagtttggagatggattgcagataacctttgccaatgccttgcgtggaatctcagatgtaaaactgatgatgctgattgccttcattgcttatttccttatttcgcttccggtcggctatttttgcggattcgtgttggagtgggggatcataggtgtctggatggcatttccttttgggttgaccagtgccggtctgatgttatggtggcgtttccatcacaagacgaaactaccgccttccattcaaaattcataatttaaaatattaattgcctatggcttcctttcgctccaccaaactgaaaataaccatcggctatatattgctgctggcgattcttcttttttctctggtgtttgtgcatcaggagatggagacgctgtcggctgcggacgatcagcagaatctgcggacagacagtctgctgagtcttctccatgagaaagatcagaatacccttcagatgctgcgggtgctgagcgaggcgaatgatagcttgctttccgcctcggagattgaagaaatcatatcagaacagcaggactcggtgattactcagcaacgggtacaacaccgggttattaccaaacgcgattctctgatcactaccccgaagaagaaaggcttcttcaaacgattgggggaagtgttcgcgccttctaagaaagatactgccgtgctggtcaatacttctctggaaattgccactgatacgatattggaacctgtcaagtcggcggactcccttcagcataagattcgcatggctaccgaagagaaacggttgcagcggaggcgaacgatccggcgtaccagtacgaggtatcagcggatgaatacacagctgaccgcaagaatggatagtctgataaaaggatacgaggaggaaatgtctgcgcgtgcccgtcaggatgcggaacttcagcaagaggtgcggatgcgttcggctaatatcattgccggaattgccattggtgccgtattcttatccgcctttttcctgatcttaattatgcgggatattactcgtagcaaccgttatcggcgtcagctcgaagaagcgaataagcgggcggaagacttgcttgttgcccgtgagaaactgatgcttgccattacccatgactttaaggcgccattaggctcgataatgggatatacggaactcttgtcccgcctgaccgaagatgaacggcagcgattctatctggacaacatgaaaagttcttcagagcatttactgaagttagtaagcgatttgcttgatttccaccgtcttgacctcaataaagcggaagtgaaccggattgtttttaatcctgctcagctgtttgaagaaatccgtgtttgctttgaacctctgacggcggctaaaggcttggtcttgcaatgtcatatcgctccggaattgtcggagaaatatatcagtgatcctttacgtattcagcagatagtgaataatctcttgtccaatgcggtgaaattcactcagcagggcaagatcacattaactgttggttataacgcttcgaagctgacaatagcggttgaggataccggcaaagggatggcatcggaagaccgggaacgcatcttccaggaatttacccgcctacccggtgcgcagggagaagaaggattcggactgggattgtccattgtgcataagttggttcttctgcttgaaggtacgatcgatgtacaaagcacgttaggaaaaggaagttgctttactgtcgtgttgccactctttccggtgggtaagtcaatagtggaaaataaaccttttggaagcagaatcaagaaagcgtcgaaagatacggatgcttctccggaagaaacagatgtttctccggaagagacagatgctgtaccggtcatgaaggtgatccgtgtgcttctgattgatgatgataagattcagctgaacctgactgctgccatgctgaaacagcacaacatcgatgctgtttgctgcgagcagttggaagaactgatagagcaactgcgctcctcgacgtttgatgtgctgctgaccgatatacagatgcctgctatcaacggttttgatctggtcaaattattgcgtgcctctaacattccgcaagcccgcaatattcctgtcattgctgtcacggcacgcagcgaaatggatgagaaggctttgcatgaacacggctttgccggatgcctgcacaaaccttttacggtgaaagaattgctggtaactctgaatgaaggacaaatgtcagctgatgaggcgcatataacacatgatatgcaattgattgcagatgcgctgcctgaagatactttattcaacttttctgcactgactgccttctcggaagatgatccggaagcggcgtgttctattatccggacttttatcgaagagaccggtaagaatgccgaccggatgcaacaggcattaactgacagggaggtggatggaatagccgctatggctcataaactccttccgcttttcaccttgatcggagcttctgagtctgttgcttcattaagatggctggagtcttgccggggggaagaattctccgaagaaatagaaaagactacgttggagactttggaggcggtgcgtaaagttgttcgtgctgctgaggagtatagtttcggtttacattaaatctctcccggcagctcctttggaacagcctatatagtgccatgcttgtgccaccttgttggcacagttgtgccaaaggcatgtcacagtcgtgccactgcggtggcacaagcgtgccaacgtagtggcacgggcataagctcgtagcatagtgagaaggtgctgccttgacaaatatctcaccttccgaatgaacggaatgaacgggatgaaattgcgctaaatgcaaccataacctccggctttttcacattttagcttttggacaaaccttttttcaaagtaatttgtttactttgtatcacttttacactgacacatcctgcatgaaacgaaaatggataagacgggtgggctggatattgcttactcctataatactttttgtaatactgatggtattactttatatacctcctgttcagaatcttttgcgacgggaggttactgcgtatgcttctaaagcaaccggaatgcagattcaggtggaacggatagaccttcgttttccgcttaatctgctggtacgaggggtggaagtcatacagcagccggataccttattgtctttggaaagcctgaatgtccgcgtacaggcatggccgttgctcaaaggaaaagtagaagttgacgaggttaccttaagtcaggtggcggtcaattctgccaatctgatagaagggatgcagataaaaggcgttttggggcgcttctttctgcaaagtcatggagtcgatttatcgaacgaaacggcagttgtcaatcggacagagttatccgatactcatatacaacttctgatgactgataccacgaccactcccaaagatacgacggcatctgctcctgtgaactggaaggtgaaccttcatcaactgaagttgaagaatgtatcattcggtatgaaactgcctgccgactccatgaagatggcggcatacataggcgaagcgaccattgatgacgccaaagcggatttaaagaaccagttttatggattgaagcaattccttttgtcgggtgcctccgccagttatgacaccggagaggcccaaccgtcggaaggttttgacgcctctcatatggcagtccggaatatccgcatcggattggactctctgctctacgaaggcagaaatatgaacgctgtgattcgtgaaataacgatggaagagcgttcgggactgagtattacttcactgacagggcggctcttttcgaatgattctatcatccgcattcctgaactgaaactgcaaaccccacattcagaaatagacctgtccgcccagacttattgggaactcgtaaatatcccgacgacaggacgtttatccgccagctttaacgcacatataggcaaagaggacgtgatgctttttgccggcggactgcctcaaacgtttaaagaagcatatccgttccgtccgttagtgattcgtgccggtacggatggaaatctgaaagagatgcagatttcgcgcttcacggtagacttgccgggagctttctcgctaaaggggggagggatccttgaaaacctgacggacagtctgactcgttcgggaactattgggctggatatggttacccggaatctgaacttcctgacaggattgactggagtcacacccgatggctctttagtaattcccgacagtatgagtctcaagatgaagatggagatgaacggcccgcagtataaagcaaaactcgatctgaaagaaggcaagggcagcatgaatgtaaatgccgcattaaacagttcgacagaagtttatacggccgatctgaaaataaacgatctgcaactgcatcattttctcccgaaagactcgatttatgaactatctctttcggcagatgccaagggcaggggactggatgtcatgtccttccattctttagccaatctgaatctttctttggaccagcttcattacgcccgctatcatctttcgaatgttcatctgacgggaaatcttaaaggtgctttggcaacggctcagcttacgagtgacaatgaacttttgaaaatgacggcggatgcagaatataatttagctcatagctatccggacggtaaagtgacagttgacgttactcagcttgatttgtacgaactgggacttatgcccaagccgatgaaacatccgttggcattcaatttaagcggagaggcacggcagaaccgtgttttcactcatttcaccgccggtgatatgaaactgaatctgagtgcccgtgccggtgtatatcctctgattcgtcagtctacccattttgtagatgtgttgatgaagcaggtggatgaaaaactcttggatcatgctgctttgcgtgaagcattaccgtcggctattttctctttttcggcaggaaaggagaatccgttggcatactatatggcaatgaagaatatatcgttccatgatgcttccatgaaattcggcactgctcccgattggggaatcaacggcaaagcagccatccatgctttgaaagtggataccttgcaactggatacggtctttttcaccgtcaaacaggatactacccgtatgaatctccgtgccggagtaatcaacggaccgaagaatccccagttttccttctccactattctgacaggcgagattcgcgaccgcgatgccgagctgctggcagaatataagaacgaaaaggggaaaaccggtgtgttgcttggagtcaatgcccgtccgctggttggaggacgtggaaaaggggatggactggcttttacactgattccggaagaaccgattattgcgttccgtaaattccacttcaacgaagatcataactggatttatctgcataagaatatgcgcgtgtatgccaatgtggatatgtgggatgatgaaggtatgggcttccgtgtgcattcggtacagggagatacggtttctttgcagaatatcgatgtcgaaatccggagaatccgcttggatgaaataacgagcgtactgccttacttccccgaaatcaccggattgttctcggcagaagcacactatatacagaccgaaaaggaccttcagctctctgcggaagcatccattgatgaactgacttatgaacgccagcgcattggtgatattactttgggggctacatggctgccgggcgaacagggaaaacaatacctcaacgcttatctgaatcatgataaggtagaagtgctgatagcagatggcaagctgctccctacctcgacgggaaaggatagcctggaagtaaatacgacgttggaacacttcccgcttcgtattgccaacgcctttattcccgacgagctggttacgcttgccggtgatatggacggtgacctgaatataacaggcagtaccgagcagccattgataaacggtgaactgatactggacagcgtatctgtcctgtcacgccagtatggtgctaacttcctgtttgataaccgccctgtgcagttgaagaacaatcgtctgatatttgataagttcgccatttacaccacgggaaagaatccgtttacgatcgacggttatgtcgatttccgtgatatgtcccgaccgatggcgagtctgaatctgctggcggaaaactataccttgttgaatgcgaagcgtactcgcgaaagccttgtctacggaaaagtctttgcggacttgcgggcaaccataaaaggcccgttggacgggttgaatatgcgtggaaacctgaatctgctgggcaatacggatgtctcgtatgtactgaccgattcaccgctgaccgtgcaggatcgtctgggaagtctggtgacatttacttcattcagtgataccaccacagttgtccgtcaggaagtgcctaccgtatctttaggtggattggatatgctgatgatggttcatatcgacccttcagtcagggtgaaagtggacttggacgccagtgacaatcgtatcgaactggaaggaggtggcgatctttcgatgaaatacactccgcagggagacctgacattgaccggacgttacacactgagcggtggactgatgaagtattctctgcctatcattgcagtcaaggaatttgccatcgataacggcagctatgtagattggaccggaaacccgatggaccccatgctgaacttcaaggcaactgaccgtatccgtgcttccgtatccgaaggagagaacggaggaacgagaatggttaactttgacgtttccattgtcgtaaagaaccggttggacaacctgtcttttgctttcgacgtagcggccccggaagatgcgaccatacagaatgaactgacagcaatgggagcggaagaacgtggaaaacaggcactttatatcatgttgatgaaaacctatctcggcaccggaccgatcggcggtggaggcggcggacttggcaagctgaatatgggttctgccctgaactccgtactgagcagtcagataaattcactgatgggtaacctgaagaatgccagcgtctctgtgggtgtcgaagatcatgacgcctcggataccggcggcaagcgtacggattacagtttccgttattcgcagcgcctcttcaataaccgcttccagattgtaatcggcggtaaggtatcgacgggcgaaaatgcgacgaatgatgccgaatccttcattgacaacatctctttggaatatcgtctggaccgtacgggaacccgttatgtccgtttgttctacgataagaactatgagagtgtactcgaaggggagattacggaaaccggagtcggtctggtacttcgcaagaaactggataagctcagtgaactgttcatctttaagaaaaagaagtaagaatgaaagatatacgtattaacatattagcaggctgtcttataggtatagtgttgttttcggcgtgttcggtgacgaaacatctgcccgaagatgaaatactctataccggaggaaaaacggtgattgtcaataaatcatcgacacgggttggtgaaactgctttgacggaaatcaatgcagcgcttgccaaaactcccagtactactctgttgggaggttttctgcctattccttttaaaatgtggatgtataacgacttcgtgaaatacaagaaaggattcggtaagtggatgtttaaccgctttgccgccaatccgcccgtatttatttctactgtcaatcccgaagtacgtgtcaaggtagccactaacctgctccgtgattacggatatttcaatggaaaggtgacttacgagactttggtcgataagaaagatagtctgaaagcaagtctgctctatacggtagatatgaagaacccttatttcattgatacagtgtattatcagcgtttcactccccagactctgaagatcatggaacgcggacgtcgtatgtcttacatcacccccggcgaacagtttaatgtggtggatttggatgaagaacgttcccgtatcagtacccttttgcgtaatcggggatatttctacttccgtccggactatatgacctatcaggcagatacaaccttggttcccggcggacatatcagtcttcgtctgattcctcttccgggattaccggctgccgctcaacgttcttactatgtaggagatgcttcggtctatctcttcggaaagaatggcgaggcacctaatgacagtatcttgtacaagaatctgaatattcactattatgataaactgcaggtccgtccgaatatgctctatcgatggatgaactatcagcagtttgtacggagcaaacagatgagggcttccaaccgtacccgtctttatagccagtaccggcaggagcaggtgcaggagaaattgagtcagctcggtatattcagctatatggatatgcaatatgctccccgagatacgacagcggcttgtgatacactggatgtcactatgcaggctacatttgccaaaccgttggatgcagaactggaactgaatgtagtaacgaagagtaatgaccagaccggtcccggtgcatctttcggtgtcactcgtaacaatgtattcggaggtggtgaaagctggaacgtaaaactgaaaggctcttatgagtggcagaccggaggcggtgagaagagctcactgatgaacagttgggaaatggggctttctacctctctgacttttccgagagtcgtgttcccgcatctgggtaaacgggagtttgacttcccggccacgacgacctttcgtctgtatatcaaccaactgaaccgggcaaagtattataaactgctgtcctttggcggcaatgctacatacgatttccagccctcccgtaccagccggcatagtattactccttttaaactgacatttaatgtcttgcagcatcagtctgaggattttaaagagatagctgaagctaatcctgcattgtatgtcagtcttaggaaccagtttattccggcgatggaatatacgtatacgtatgacaatgcttcgggtcgtaggataaagaaccctatctggtggcagtctaccgtcacttcggcgggtaatatcacttcccttatttaccgtgcttttggcaagccgttcaatgaggaggataagagtttgctgggggctccgtttgcacagtttgtgaagttgaatacggagttgcgtcatttgtggaacatagataagaataatgcgatagccagccgcatggcagtaggtgcactgtttacttatggcaatgctacgatagctccctatagtgaacaattttatgtaggtggtgccaatagtatccgtgcttttacagtgcgcagtgtcggtccgggcggttatcatccggaagagggaaaatattcctacctggatcagacaggaaccttccgctttgaggcgaatgtggaatatcgtttccgtattttcaagagcttttggggagctacctttctggatgcaggaaatgtgtggttgttgcgcaaagacagaaagcttttggctgatggaaaagaagcacgtcccaattcacaactgcgtctgaagactttccctaaacaaatagctttgggaacgggtgtcggtatccgttatgacatggatattctcgtattccgtctcgacttcggtattcctctgcatctgccttatgatacggaacgtagcggctattataatgtaaccggagctttcttcaagaatctgggaatacattttgctatcggttacccgttctaatgaatgatttttgtacgattttagtgaataatgattgatatttgtcctgttggattcaactatttttgtaaatttgcaacgaaatctgatgccattgacatcactaaccttttaatattacacaatttatgaaaccaactttattcttattggctgctggtatgggtagccgttatggaggcttgaagcaattggacggactgggtcctaacggcgaaactattatggattactctatctatgatgctatcaactcaggatttggtaagcttgtatttgtaatccgcaaagattttgaacaggatttccgcgaaaagattatttctaaatacgaaggccacattccttgcgaactggtattccagtctattgatgatcttccggaagggttcacttgtccggcagaccgtacaaaaccatggggtacaaatcatgcggtaatgatgggagctgatgtgattagtgaaccgtttgcggtaatcaactgcgatgacttctatggtcgtgactcgttccaggtaatgggcaaattcctgtctgctcttcccgaaaattccaagaatgtttattcaatggtaggtttccgtgtgggaaatacgttgagcgagagcggtacggtatctcgtggtatctgcagtacagatgctaacaacttgctgacttccgtagtggaacgtacgaagattcaacgtctggacggcgaagtaaaatacatcgatgataacggtgaatggacagctactcctgatacgactccggtaagtatgaacttctggggctttactcccgactactttgcttacagtgaagagttcttcaagactttcctgagcgatccgaagaacatggagaacctgaagagcgaattctttatcccgctgatggtggataaattgattaacgacggaactgcaactgtagaagttctggatactaccagcaaatggtttggtgtaacttatccggaagaccgtcagagcgtagtggataagattcaggcattggtagatgccggtgaataccctgctaaattgttctaaagaaaagcttttgataaagactaggaagcagtcattcatgagaatgactgctttttttgtctttcataacggataatactgccctttatccaataattattcattatctttgcaatccaaaatcttataaatcagagacagacgtgatttcagtagaaggattatcagtagaatttaatgcgacaccgctctttgcggatgtcagctatgttatcaataaaaaagaccgcatcgctttggtcggcaagaatggtgcgggcaaatcgactatgttgaaaatattggcaggtctgcaaaacccgacccgtggagtggtagccgtccctaaagatgtaacaatcggctatctgtcgcaagtcatgatcctttcggatgtccgcacggtgatggaggaagcagaactcgctttcgagcatattttcgaacttcaggcaaaccttgaacggatgaatcagcagcttgccgaccgcaccgactatgaatccgaagaataccaccagttaatagaccgcttcacacacgaaaacgaccgcttcctgatgatgggaggaaccaattttcaggcggaaatagaacgtaccctgttgggattgggctttagcagggaagactttaaccgttcgacttccgaattctccggcggctggcgtatgcgtatcgaactagcgaagctcttgctccgtcgtccggatgtgctgctccttgatgagccgactaaccatctggatatcgagagtatacaatggctggagaactttctgtctacccgtgccaatgctgttgtgctggtcagccacgaccgtgctttccttaataatgtaactacccgtacgatcgagattacctgcggtcagatttatgactataaagtgaagtacgatgagtttgtcgtattacgtaaagaacgtcgtgagcagcagctccgtgcctatgagaatcagcagaagcagatacaggatacggaagactttatcgaacgtttccgctataaggcaaccaaagccgtacaggtgcagagtcgtatcaaacaactggaaaagatagaccgtatcgaggtcgatgaggaagacaactcttccctccgtctgaaatttcctcctgccagccgcagcgggaattatccggttatctgtgaagacgtacgcagggcatacggacagcacgttgttttccatgatgtgaatctgacgatcaacagaggagaaaaagtcgcatttgtcggaaagaacggagaaggtaaatctacgttagtgaaatgtatcatgggcgagattgattttgatggtaaactgacgatcgggcataacgtgcagatcggttactttgcacagaatcaggcgcagatgctggatgaaaacatgacggtatttgatacgatcgaccgtgtggcgacaggagatatccggttgaagatacgtgacattttgggtgcattcatgtttggcggagaggcttcggataaaaaagtgaaagtactttccggtggagagcgtactcgtctggctatgattaagttgctgctggaaccggtgaacttcctgattttggacgaacctaccaatcatctggatatgcgttccaaagatgtactgaaagaagctatccgcgaatttgacggaacagtgatacttgtcagccacgaccgtgattttttggacggacttgcgactaaagtatatgagttcggtggtggaacagtgaaagaacatcttggcggtatttacgatttcctgcaaaagaagaagatcgacagcctgaatgaacttcagaaaggagtttctctctctacttctcctaccacatctgccaaaggaaacgaagcggatacagagcaaccttcggagaacagactctcgtatgaagcgcagaaggaactcaataagaagataaagaagttggaacgccaggtggcggactgtgaggcttcgattgaagaaacggaatcggcaatcgccattctggaagcaaagatggcaaccccggaaggagcatcggatatgcaactgtatgaacggcatcagaagctgaaacagcaattggataccaccgttgaagagtgggaacgggtttcgatggaactggaagaagtgaaaaactaatttattatataatatgaaagtaaccaagtatttaccaattcttgccgtatgccttatgacaacaggatgtaatagcaagaaagaggccgtactaacgtccggtatcgaccttgctaatctggataccacggcaatgccgggtacaagtttttatcagtatgcctgcggtggatggattgaaagtcatccgctgacagacgagtattcacgcttcggctctttcgatatgcttcacgagaaaagccgcgaacagttgaaagaactgattgccgaactggctgcaaagaaagacaacgctccgggcagtgctgcccagaaagtgggtgatctttataacatcgctatggatagcgtgaagctgaacaaagaaggagcagctccgatcaaagaagaaatggcggctatcgatgcgctcaaagataaagaagagatttacacctacattgccgaaagtcagaagaaaggaatacgtccttactttactatgtttgttagtgcggatgatatgaacagctctatgaacatggttcagacctatcagggcggtctcggaatgggacagcgtgactactatctggagaatgacgagcagacaaagagtatccgcgataaatataaggaacacctcgttaaaatgttccagttggctggctatgacgaagctaccgcacagaaagcaatggtggctgtgatgaacatcgaaacacgtcttgccaaggctgcccgttcacaagtagaattgcgtgatcctcatgccaactataataagatggacatggaaacgctgaaaaagaacttccctacttttaactgggatgcttacttcactacttcgggactgaatgacttgaaagaagtgaatgtcggtcagcctgcagccatgaaggaagttgccgatgttattaatacagtgcctcttgaagatcagaagttctatcttcaatggaatctgatcgatgccgcagcctctttcctcagtgatgatttcgtggcacaaaacttcgacttctatagcagaacaatgtccggcaagaaagaaatgcagcctcgttggaaacgtgcagtaagcactgtagacggctctttgggtgaagtagtaggacagatgtatgtcgaaaaatacttccctgccgctgccaaagaacgtatggttggattggtgaagaacctgcagacttctctgggcgaacgtatcaaagcgctggaatggatgagcgaaccgacaaaggtgaaagcattagagaaactggctactttccatgtaaagatcggttacccggataaatggaaagattactctgctctggagatcaaagacgactcttattgggcaaatatcgagcgtgccagccaatgggatttcaatgacatgatcgcgaaagccggtaagccggtcgacaaggacgaatggttgatgacacctcagacggtgaacgcttactataacccgacaaccaacgaaatctgtttcccagccgctatcctgcaggctccgttcttcgatatgaacgctgacgatgcgatgaactatggtgctatcggtgtggtaatcggccatgaaatgactcacggattcgacgatcagggccgtcaatacgacaaggatggtaacttgaaagactggtggacagaagaagatgctaaaaagttcgaagaacgtgctcaggtaatggttaacttctttgacagcatagaggtggctcccggtgtacatggtaacggtgagctgactttgggagagaacattgccgaccacggtggcttgcaggtttctttcgcagctttcaagaaagcaatggaaacagcaccgctggaagttgttgacggattcactcccgaacaacgtttcttcctcgcttatgctaatgtatgggcaggacacatccgtccggaagagattctccgactgaccaaactcgatcctcactctttaggaaaatggcgtgtggacggagcattgcctcatatccagaactggtacgaagcattcaatatcacagaacatgatcctatgttcgtagcgaaggacaaacgagtgtctatctggtaatagattttgattagaagctctatatgcgaaggagcgttgactttccaacaggaacagtcaacgcttttttttattaattcacaccttatttattacgtacgataaacaatatttcgtaactttgcgcatcaaatacttaataagcaattcaatgtcagagtctaaaagaataaaaactgcattggtatctgtataccataaggaaggtttggatgaaattattaccaaactttacgaagaaggagtagagtttctctcaacaggtggaactcgtcagtttattgaatcactaggatatccttgtaaggcagtggaagatttgaccacttatccttcaatcctcggtggtagagtgaagacattacatccgaagattttcggaggtatcctttgccgtcgtgacctggaacaggatattcaacagattgaaaagtatgaaatccccgaaatagatttggttattgtcgacctgtatccgtttgaagctaccgtagcttccggcgcatccgaagcagacatcattgaaaaaatcgatataggtggaatctctttgattcgtgctgctgccaagaactataacgatgtcatcatcgtggcttctcaggcacaatataagccattgctggatatgctgatggaacacggtgctacttcttcactcgaagaacgtcgctggatggcaaaagaagcgtttgccgtttcttctcactacgactcagctatcttcaattatttcgatgccggcgaaggttctgctttccgttgttcggtaaacaaccagaagcaactccgttacggtgaaaaccctcatcagaaaggttatttctacggaaatctggacgccatgttcgatcagattcacggtaaggaaatctcttataacaacttgctggacatcaatgctgccgtcgatctgatcgacgaatacgaagatttgactttcgctatcctgaaacataataatgcttgtggcctggcttctcgtccaactgtactggaagcatggacagatgcgttggccggtgatcccgtttccgctttcggaggcgtgttgattactaacggagtgattgataaagcagcagctgaagagattaacaagatattcttcgaagtgattatcgcgccggactatgacgtagacgcgctcgagattctgggacagaaaaagaaccgtatcatcctggttcgcaaagaagccaaactgcctaagaaacagttccgtgctttgttgaacggtgtattggtgcaggacaaagatatgaatattgaaacggttgccgatctgagaactgtgacagacaaagctcctactccggaagaagtggaagatctgttgtttgccaacaagatcgttaagaacagtaaatcaaacgctatcgtgctggcaaaaggcaaacagcttcttgcaagcggtgtgggacagacttcacgggtagacgccttgaaacaagcgattgaaaaagccaaatcattcggattcgatctgaacggtgcggtaatggcttcagatgctttcttccccttcccggattgcgtggaaatagcagacaaagaaggtattacggcagtcatccagccgggcggctcggtgaaagacgatcttacttttgcttactgcaacgagcacggtatggcgatggtgaccaccggtatccgtcattttaaacattaaaaacaggcattaagtattaggtattaagtattaaccttgcggataaggcagtctactttatacctgatactttatacctaatacttaatacttaatactttatattaatgggattattctcttttacacaagaaatagcgatggacttggggacagccaataccatcatcatcacaaacgggaaaattgtggtggatgagccttcggttgtggccttggatcgccgtacagataagatgatcgccgttggggaaaaggcgaagttgatgcacgaaaagacccacgaaaatatacgtactattcgtccgttgagggatggagtgatcgccgacttctatgcttgtgagcaaatgatgcgcggtttgattaaacaggtaaatactcgtaatcacttgttttcgccgtcacttcgtatggtgatcggtgtgccgtcgggaagtacggaagtagaactccgtgccgttcgtgactcggccgagcatgccggtgggcgtgacgtctatctgatattcgaaccgatggctgcggcgatcggtatcggtattgatgtagaagcgcccgaaggaaacatgatcgtggatataggtggtgggtctacggaaattgccgttatctctttgggaggtatcgtttccaacaactctatccgtatcgccggtgatgatctgactgcggatatccaggagtacatgagccgtcagcataatgtgaaagtcagcgaacgtatggcagaacgtattaagatcaacgtaggtgctgcactgaccgagcttggcgatgacgctccggaagattacatcgttcatggaccgaaccgtattacagctcttccgatggaagtgcccgtatgttatcaggaagtggctcactgtctggagaaatccatctccaaggttgaaacagccatcctgagtgcattggaaaatacgccgcccgaactgtatgcggatattgtacacaacggtatttatcttgccggtggtggtgcattgcttcgcggactggacaagcgtttgacagataaaattaacatacctttccacattgctgaagatcctttgcacgcagtagccaaaggtacgggtgtggcattaaagaatgtagaccgtttctctttcttgatgagataaataatacggatcattattcatgcggaatttaataaacttccttttgaaatacaattactggttcctcttcatcgtattagaggtagccagttttgttttgttatttcggttcaacaactaccagcagagtactttctttacatctgccaatgtcgttgtgggggcagtttatgaagtttcgggaggaataagctcttatttccatctcaaatcggtcaacgcagacttgctggatcgtaatatggcgctcgaacagcagatcactaatctggaaaaggcgttgcgggagcatcaggttgattcggccactgtaaacagcatcagggagatacctctgacagattatcggttgttcaaggcacacgtcattaagaacagtctgaatcaggcggataattatataacgctcgatcagggttcttcttccggcatccgtcccgaaatgggagtggtggacggaaacggaatagtgggcattgtctatgaaacctcctcttcgtattcactcgtgatttcggtattgaacagcaagtcaaatattagttgcaagattgtcggaagtgactactttggttatctgaagtgggagcatggagattcccgttatgcgtatctgaaagatttgcctcgtcatgcagagtttaatctgggtgatacggtggtgacaagcggcttctctaccgtattccctgaaggaattatggtaggaacagtcgatgatatgtccgattcgcacgacggattgtcttatttgttgaaaatcaagttggctaccgatttcggcaaggtgagtgatgtgcgggtgatagcccggaacggtcagcaggaacagaaagaactggaaaataaggctgtgaaataatgataattacctatatacatagaatcggatggtttatcgggctggtacttcttcaggtactgatcctgaataacgtacatattgccggatatgctactccctttctctacatttactttatactgaaattcgcttccggaacttcccggaatgagttgatgttgtgggctttcttcttcggactaaccattgatatctttgccgatactccggggatgaatgctgcggcaaccgtgctgctggctttccttcgtccgtccttgctgcgcctgtttactccgcgtgacaatctggacagtatcatcccttctttcaagagcatgggcatcactcctttcctgaaatataccacggcaagtgtttttgtccatagcctggcattactcagcattgagttcttctcatttaccagcatctggctgttgttattgcgggtgatttcgtgcacccttctgactttaacctgcattcttgctgtagaaggaataaggagataggaatggcaaaagactatagattagaaaagcggaaatttgttatcggggggattgctttaactattgtgttgatttatctgatacgcctctttgtattgcagataacgacagacgactacaagaagaatgccgacagcaatgctttcctgaataaaattcaatatccctcacggggtgctatttacgaccgtaacggcaaactgctggtattcaaccagccggcctatgacatcactcttgtcccgaaagaggtcgaaaatctggatacactcgatttatgtgagtcgttgggcattactcgtgctcagttccttaagatcatgagtgatatgagagaccgccgccgcaatccgggatattcccgatataccaaccagctgttcatgtcacaactctctgcggaggagtgcggtgtcttccaggagaaactgttcaagtttcccggtttttatattcagcggcgtacgatccggcaatattcatacaatgctgccgcccatgctttgggggatatcggtgaggtatccgttaaagatatggaggcggatgaagagggatactacatccgcggagattatgtaggaaaactgggagttgaaagatcgtacgagaaatacctgcgtggagaaaagggagtagagattctgttgcgcgatgcgcatggacgtatccagggacgttatatggacggagagtatgaccgtccttccattccgggcaagaatctgactctgagtctcgacatcgatttgcagatattaggcgaacggttattgaaaaataagattggaagtatcgtagctatcgaaccggaaaccggagaaatcctttgtctggtttcttctccgaattatgatccgcatctgatgattggtcgtcaacgtggcaagaaccatctgatgctgcaacgcgataaacagaaaccgttgctcaatcgtgcgttgatgggagtctatcctccggggtcaactttcaagacggcacagggactgaccttcctgcaagaaggaatcattaccgagcaaagtccttctttcccctgttctcgtggtttccattatgggcgtctgacagtgggatgtcatgctcacggctcacctttgccattgattccggctattgcgacttcttgcaattcctatttctgttgggggctgttccgtatgttcggcgatcgcaagtacggttcaccgcagaatgccatcacagtttggaaagatcacatggtttctcagggattcggctataagttaggagttgatttgcccggagagaaacggggcttgataccgaacgcgcaattttatgacaaggcttatcgtggacactggaacggactgacggtcatcagtatctccatcggacaaggtgaaattctgtctacccctcttcagatagctaacttaggggcaacgattgccaatcgcggacattttacaacaccacatattgtgaaggaaattcaggatgcgcagttggatagcatttatcgacatccacgcaacacaaccatagagcgaagacattatgaatctgtggtagaaggaatgcgtgctgctgccaccggaggtacttgccgtatgctgtccgtgatggtgccggaacttgaagcctgcggaaagacaggaacagcgcagaatcgcggacatgaccattcggtgtttatgggctttgctccgatgaaccagcctaagatcgccattgccgtatatgtagagaatggaggttggggagcgacttatggagtgccgatcggtgcattgatgatggaacaatatatgaaagggaagttgtcgcccgagaatgagttaagagcagaagaaatcagtaacagaatcattttatatggtaacgaggaacgatagtttgtggaaaacactggattgggtaacgattggtatctatctgcttttgattgtcggcggatggttcagcgtttgcggtgccagctatgactatggcgatcgtgacttctttgatttctctacccgtgccggaaagcagtttgtatggattatctgctcctttggtttgggatttgttttgctgatgctggaagaccggatgtatgatatgttcgcgtacattatatatgtagggatgattgtgctgcttattgttaccatctttatcgcaccggatacgaaaggatcgcgttcttggctggtgatgggaccggtcagcctgcaacccgccgagtttgccaagtttgctacggcactggcgctggcgaaatatatgaactcatactcattcagcataaagaaagaaaagtgtgccttcgtcttgggctttatcattcttcttccgatgctcctgattatcggacagcgggagacggggtcagcattagtctatcttgccttctttttggtgctttatcgggagggaatgcccggtgtagtgctttttgccggtctgtgtgcagtgatttactttgttgtcggcatccgttttgacgaggtctttattgccgatactcccacaccgttgggcgaatttatcgtgttgttattgattctgttgtttgccggaggaatggtatgggtgtaccccaaaaagtgggaacccacacggaacattatcggaggaagcctgatcattctgcttatcgcatatttaatatcggaatacggaatacactttagtctggtatgggtgcaatgggggctttgtgttcttgtgataggttatctgctctatctggcattgagagagcgtcaacgttcctatttcctgattgctctgtttgccattggctctatcggcttcctgtattccagtaactacgtatttgataatatcttggaatcccatcagcaaatccgcatcaaggttgtactcggtatggaagaagacctgacgggagcgggatataatgtcaatcagtcaaagatagccatcggttccggtggattgactggaaaaggctttctgaatggcacacagacgaaactgaaatatgtgcccgaacaagatactgactttatcttctgtacagtgggagaggagcagggatttgtcggttcggctgctgtcctgttggctttccttatattgattctgagactgattgctttatccgagcggcagacttccatttttgcacgtgtctatggttattccgttgtcagtatcttccttttccatctttttattaatgtcgggatggtgcttgggctgactccggtcattggtattcctttaccgttcttcagttacggaggttcttccttgtggggattcaccattttattgtttatcttcctgaggctggatgccggaagaggcagaaggctttaatctattctccttgtttttcaatccggataccgacgtcattgagtccggttaatttctcatcctgcattccgtgcacaatcttaactgtgtagtttccgggatgcagcgggcggacagatttgacaaaaactgctgtttgatagatacttccccacccattgcctgtccattttcctgtggaatcagccaggttgaccgctatcgtgtcagtgcgccatactgtggagtcgagcagattctcatgaatgaataagtaaaggttgcggtaagggtattcacttctgttgcgaacttccgcaaataatctgagtgtaccaggaatactgtccgtaacaggacactgaaaagagagtgtatcactctttccccatccctcattgggcagggactggtaggagtgatacacggtattttcattacaggctgccatgaggcaggcaccgaataaacaaaataagctattcctgagcaggcttttcattattttgcggtttctcttgattcgaatttctttcaggtctgggaatacgttcctggttgggttgtcttccttgttcctgcgggcgttcctgattttgaggacgttcctgtttgggttgccgttctctattctgcggacgctcttgattctgcggacggttcggattctgtggacgttcctgattctgtcctctttccggacgtctgttctcattattccgtccttgattctgtcctctgttccggttattattgttattgtttctcggacgattttctctgtctcctctttctcctctgttgccgttctctgacggttggggacgattctcgttctcccccctctgaggttgctgcggacgatttccaccttcggcctgtgcctgcgggcggttgtcattatttccttttctcttcttcttgttccggttaccgttgtttccgtccttattatttcggttacggtcgaagcgggtgaggctttcctgttccagcaagtcaatcggctttttggattcttgcttcacttcagcttcgagcagactatccggtttcattcctttcttgttcatggcaatcacctcaaaggcacgttttccactgattgttaccaggttggcggggaagttcttgtccgtagagtaagaaacatgattactcagaatatcagctttgaagaagtagaaagtgccgtcctttgtttccagttcgatttctctggaaggaaggcgtttctgagcttccacatagcagtccacctcatagttgagacaacactttaacttggcgcactgtccggcaagcttttgaggattcagtgaaatgtcctgaaagcgggcggcacttgtagataccgacacaaagctcgtcatccatgtagcgcagcaaagctcccgtccgcaaggaccgatacctccgatacgtcccgcttcctgtcgtgcaccgatctgtttcatttcaatgcggacacggaaagcttcggcaagtaccttaatcagttggcggaagtccacacgttcgtcagcaatgtagtagaaaatagccttattgccgtcgccctgatattccacatcaccgattttcatatccaggttcaggttcagtgcgatctggcgggcacggatcatggtcgcatgttccttcgctttcgcttcgttgaatttctccatatccaccggcttcgctttccggtagattctttttatttcaacatcagtcttgaagttggccttcttcatttgcagtgggacgagtcttcccgtcagggtcacgacaccgatgtcatgccccggagcagcttctacggcaacgatgtctcccttttccagtttgattttgttgctgttgcggtaatagccctttcgggtgtttttaaattgtacttccaccatatcacactcttccgcgttgcctggtatgtctgccagccaatcataagtgttcagtttcttatcttgtcgggagcatcctttgcagcaaagaccgccgctcccattatgaagcttatattccatagtttatatatttattattgcttcaacagtacgatcatcttcagtgagaagtcgaagaataccatcttggcatttacattttgttctatatgtagttgcgcttcgcttagttcatccatgatgcccattacgttcctttcgttgacgaaaggagcaaagcgagaggcgaaattctgttcgttgattgtcatgtatgtcagatcacgctgatggagattgaatataaagttttcgcggatcatgcgctgacagtattccagaaagttcttctggcgttcacgtcccatgccggcaacctgttcgctccaaagcttcatttccctgattttccgttgataggacaatcgcatcaggctgacaaataagtcgaagaagagctgattctcttcattcagatgaatagtttccagtgctttgataaagttcccgtttgccagatgggcaatggaaaggctgtcggcaggttggataccgtatttggactgcaatacgcggtcgatggccggctcgtctatttttcgcacgttcatgcgttgagtacggctcagaatggtaggcagaatcatttccggagcttccgatacgagcaggaagatggttttctcaggtggctcttcgagcaatttcaataatttgttggcacataccggatgcatcttttcgggcaaccagagaatcgtgatcttgaatcctccttcgctcgatttgaggctgagtttcttcagaatttcatcgctttctttcgcgtagatgatggcctgtgcattctcggcatccatttctctcagccagtgattcaggttgaagtacggattcttcagaacgaatggtctccagtcggcgatatagtcatcgcacacttcccgtttccctttagaacttttcacgatggggaatacgaaatgtacgtccggatgtaccagtttattgaatttcacacacgacggacatactccgcaggcatccgtctcaccccggttggtgcaactgatgtagcgggcataagcgatagccagcggcatcttaccgactccttcggggccacagatcagttgggcatgcggtatgcgcccttcactcacttcctgaatgagtcgttgcttgatttcttcttgtccgattacgtctctgaaaaacatatcaataaatgattttagccacttctttgatactgtccactgctccgatggagtagaagtggatgcttggcactccatgtgccattaactctttgcattgggcgacacaccattcgataccaacctgttcggcttccttgtcgttcttgcatttcaaagcctccttgaccaaatcttccggcaagtctactttgaatgtcttgggcaccatgctgagttgagataacttcttgaatggcttgatgcccggaatgataggtacattgatacctgctgccttcgcttgctctacaaattcgaagtatttcttattgtcgtagaataactgtgtcacagcatattccgcacctgcttctactttctttttcagccagaagagatcggattcgatgttgggagcctcctcgtgcttctccggatagcaagccacaccgtaggagaacgggctgttggttactttcatctccgaaccgtctacaaagattcccttattgaagttattgatttgctcctgcaactcgatagcatgatggtatccgtcgccctcgggagtgaatactgattcatgtttggccttatctccccgaagtaccagcagatcggtgatattgaggaattgcaggtcgagcagtacatattcggtttcttcacgggtgaagccgctgcacagtatgtgcggaaccaccgttatattatacttgttctggatagcggcagctacggcaacagtccccgggcgtcttctcagccggtttcgctggaaaagtccgttgcccagatccttatatacgtattcgctgcgatgcgtggtgatattgatatatttcggatcaaactcccgaagggtatcgacagtctgatacagcttttcgatgcctgtacctttcagtggaggaaggatttcgaaagagaaagctgttttttcgctgttatgtattaaatcaattactctcattctttttcgttgatgttcgttgtctacttgaattaaaagtgcatattgggacaaaaatacgaaaaaagaaagatttcttcttgatttgtttgaaaatagtttggtttttatcgcactattacataaaagtggggatggataaaataaaacggacccttatttagagtgttccaggaaattctccagagcggcgatcttgtcattccgcagatattgcatatccatgaccggaatgtagctgtaagggataaactgtaacaatctcactgctgcgaatttcttgtcagccgacatgaggacatccagccgaagatttccgcctgttcctttctcaatattgatattgttagaaaaattgcctgattcgatcatttctttcaatggttcaaggtatttcagattgaaagaatagttcttctctttgaccacgcttttagtcagcagatatctcatttccctggaacggaatttaagttggtatatgccaagcagacagagtaatatattgccgataagatacaatatgctatctaaagaaatgccgtccataatgaggaggatcgcttcaggtaagtgaaataatcctattaataaaacaataactccgatgattgttttttttacgttgaatcgttgtctgatatcctgattggatgaactatcagttcttgataattgatttgccatagtcttttctttttatactctttatacctgttttctatgcactttatgattaagtgtggttgcaaaggtaggaggaatcaactgaaatgcggtgttccaatcaggacgaaaattgttcaaaaggagtttaaaggagtataaacttcgggggcgttttcgcatatatttgtgaaaaaaggcaatcttgaagagagaatgttttgatattctctttttaagactgcctttcgctcattctctgacgagtcggaaattacttgtcgagaaatgattttttcattctggcaatgtcagtcaggtaatcctgaagatcttgttcatgctcttcttcttcagcaaggatatgcttggcaatgtcgcaggtagtgaaatcttttccattggtaaagtcagcaatttcctgataacgcagtattgcgcaacgctcagaagctacattatcttttagcagacttacagaatcaaatccttggggagcatcatatttgcatcttgccagttcgaaccatttcttcgggtccaatacgggtactccttctagttcgataatgcggtcggcaagcagttgcgcatgtctgcgttcttcttctgcatgttcttcgaactcgccttgtacgtctgcacgcatagcgccttctactaccaatgcgcctacccaatactggtagtatgccagccattcttcagacaatgctgcattcaactgtgaaatcaagctttctacatccagctttccttgtaagatttttacgctttctctagccataatttaaaagtttaggttactatattcaagtcgggtatgtaacagacagatgacctttttgtttgagattgcggagtgatttaacagtgattttatatatagacgaaacatgtaagcattgaaaagaagtttttcctgtaatacatatgtgtgcaagatggaaaaaatactaatgtcattttcgatcagattagaattatctatatttgtcacgtacggaaggaatgccggattcttaattatttccactgtgtattgggcgaagatggttgctttttatatagaaaacaataaaagtctgatgaatgtatctgtagcgcgagtcaaagatttctgctttgtattcggtagccgaatatgttgcttcattccgaatcaagcataaccggattgctaaaacaaatgacagaagaatcaattgcaaactcaaacagcttacgctgctttctccacagtaattcaacgcgacttttgctctcatgctctaacaatttgtctgcatccctttattcatcttagtttcaggtatggcagcaagtgtggtagcagttatgagagcaagtgtttgctctcactc

SEQ ID NO: 4554 - DNA, 102265 bp, Unknown
  gut microbiota DNA sequence
tgtgcagcactcacctcatcggcggtctcaacaccccggccacgggcactcatcaccatgcggaacgttcccaaaccatccacactgacgctttcggacgattgaagatgctgcgccatcaccgtcaccagattgtcaagcgtatttttcacatcacccggagaaagggaagaatatgcggcaatctctttggaaagctgtgcggaattgatatttcctgtacgaactacatggggataaaacagtttcttcccacttttcttatcttccagattagactggaaaggtttatataatactggcataattgtaatagtttttagttattaatctttttgttagtttctgtcgttaagcttattgacactgcaaatataagggcttattctcagctatacaagcgatttcggaaatgtgcgttaataagttagttaatataagaaataagcatataacatattgatatacatatatttatcaaattcatattatttattcagcacactcagcaaataatgtcccggcagtttaatcttcccaccgcttccacgaatgacgctaaagcctttccatatatcaccaccgatttcaccgtaattacttttcagcaatatagcgtactgttcagcaggaggaacacgaaagagacggagattctccagcagaccggaaaaattgcggggacatccgtccgggggaacctgcatccggtcgatatcttcctgcgtcagattccgtttcctcgtggcagatcgctgatcgcattcttctctcatcccgcctccggctccttcagctactttctctccttcactcccttcttcttcatcccctccttttgcgaaaggagggttagggaggatgttttctttcttttctttttcttttctttttatgagagctgtttttgttgcagtatcccgggatgccgttgcaatattcggggatactgcaacattttcccctgttgcggcaacagtatctggctgctcatccgttgttttctcttccggcagcagacaataatccggacagatatggtgacgactgcgacgtttggtgatgaagagatactgccgctggacatcctcagaagtcagaatgctgtaacgctcataaagcgcagagtcaaaaagcccgtattcaagaaacagacggatgacacggcggacggtatcgttgtccgtactgaaaagctgatcggaaagttcgtcacagaaatcggtgtcggcacggacatagtagccctcgcccgaatagagataagacataatatagattaaaacggtgaaagcggaatcgccctcacgcttcatgacacgacgaacgatacggtcgtgcatgaagtcggtgctcaggggaaagtagtccagtccctgtttgattcttcccatagttgtattgtttttataaatagtttatcagtcagttttttcattttgttaatcattcagttccgcttccacttcacaaagtttctgctttttccgcttgatacttgcccttacagtctgcagggcggacagaatcagtttctgacgaagatcggggtctttcgtagaggtgataacgggataaggttcacggtcgtcacgtgccagcgtgcgcttctcggtcttcctgtatttccggctggcggatttgcggcattccttgcagtagttgtttggaaggccggttttcttatctacgtaaaaggcttctgaaggaagcgtgtgtttgcaacagccgcaaacgtaaagtgtttgtttttgtaatgtttccattccggttattctttttgatatacttgatatgttttcagataaaaggtaaggcagcctgcgcacaggaggttcacatcctacacaatgatcattggcaacttgcccgtcagatgttaacagccatcacgtcagctgttaatacccaatatgacaactgttaactcctgacaaatcaactattaacagctgacagctctcttttcggaggggggagaatgcggtttttgaaagtatttcgcatctttttcttgttttctcatggtttatctaatttttatttctaattttgaaatcaaatattcatttcgaataccacaaaggtatagaaagtcgcatacataaaacaaatgattttaaatattaacgctgaattattttacaaaagactgtatatgaggcgataaggcaagaataaatattaacatataaaaaagtaagcaaaaacatgaatgagaaacaagcggatacactgctgaatgtaccggaaatcgtaaagcgggcgaaaatagcgttgaatctgaaacgggacagtgaacttgcatcatatttaggagtagccagagcgacactttccaattggtgcgcgcgaaacagcatagactttcccttactgctgaacaagctgcatcatgtagactataactggttgctgaccggaaaaggaagtccgctgcacgacccaaagtcttttgacaacggaaagatacggggagaagtagagactattcacaattcaaaaaccacagaagccatagacgaccggagtgtgacactctatgacatcacagccgccgccaatttaagaaccctgctttccgacaagcgccaatatgcgctgggcaaaatactgattccaagcatacccgcgtgcgacggagccatctttgtcaacggagacagtatgtatcccattctcaaatcgggagatatcgtagggttcaaggggatcaacaatttcagcaacgtcatttacggagaaatgtacatcgtggcgttccacctcgacggagaccagtatctgacggtgaaatacgtcaaccgctcagagaaggaagggtacgtcaaactcgtcagctacaatccgcaccacgagccgatggacttacctgtagacaccattcaggatatggcgatagtgaagttctccatcagaaagaatatgatgatgtaaaaacggcacaggctaaacaagccttttccacagatttcctgtcacatttcttcctgaaatctgtggaaagcattatctttgcacgttgcaaaccgtatctttgcacattgcaagcagtaaaatcataaaatcactctatatcaatggaaaagaaattcaagagaaccaccgtcacatcggcactgccgtatgcgaacggacctgtacacatcggtcacctggccggcgtatatgtaccggcagatatctatgtgcgctatctgcgactgaagaaagaagatgtattgtttatcggaggttcggacgaacacggagtacctatcacgattcgtgcaaagaaagaaggagtcactccgcaggatgtagtagaccgttaccactatctgatcaagaaatcgttcgaagaattcggcgtttcgttcgatgtatacagccgcaccacttcgaagacgcatcatgagctggcttcagatttctttaagacgctatacaacaaaggagagtttatcgaaaaaacatccgaacaatattacgacgaagaagcgaaaacattcctcgccgaccgctacatcaccggtgagtgtcctcactgccattcggaaggtgcctatggcgaccaatgcgagaaatgcggaacctccctgtcgcccaccgatctgatcaacccgaaaagcgccatcagcggcagcaaacctgtgatgaaggagaccaagcactggtatcttcccctcgacaaacacgaaggatggttgcgccaatggattctggaagaccacaaggaatggcgccccaacgtatacggacagtgcaagagctggctcgacatgggattgcagccgcgtgccgtcagccgtgacctcgactggggtatccctgtgcccgtagaaggtgcggaaggaaaggtgctgtacgtgtggttcgatgctcctatcggatacatttccaataccaaggaattgcttcccgacagttgggagacatggtggaaagaccccgaaacgcgtctgctccacttcatcggaaaggacaatatcgtattccactgcatcgtattccccgccatgctgaaagcggaaggaagctatatcctgccggacaacgtgccgagcaacgaattcctgaatctggaaggagacaagatttcgacttcccgcaactgggcggtatggctgcacgaatatctggaagacttccccggcaaacaggacgtactccgctacgtactgaccgccaatgctccggaaacgaaggacaacgacttcacatggaaagacttccaggcacgcaacaacaatgagctggtagccgtatacggcaacttcgtgaaccgtgcaatggtgttgactcagaaatacttcgacagcaaagtacccgcctgcgcagaactgacggattacgacaaagaaaccctgaaagaatttgccgacgtaaaggcagaagtagaaaagctgctcgacgtattcaaattccgcgacgcgcagaaagaggcgatgaacctggcacgcatcggcaacaaataccttgccgacaccgaaccctggaaactggcaaagaccgacatggaacgtgtaggcaccatcctgaacatctctctgcaactggttgccaaccttgccatcgctttcgaaccgttcctgcctttcagctcggagaaactccgcaagatgctgaacatggaaagcttcgaatggtcggaactgggaaggaacgatctgctcccggtaggacatcagctgaacaagccggaactgctgttcgaaaaaatagaagacagcgtaatcgaggcacaggtacagaagttgctcgacacgaagaaggccaacgaagaagccaactataaggcaaacccgattcgtccgaacatcgaatttgatgatttcacgaaactcgacatccgcgtaggtaccatccttgaatgtcagaaagtgccgaaagccgacaagctgctgcaattcaagattgacgacggactggaaacacgtaccatcgtatcgggcatcgcaaagcactaccagccggaagaactggtaggcaagcaggtttgctttatcgccaatctcgcaccgcgcaagctgaaaggtatcgtcagcgaaggcatgattctgagtgccgaaaacaacgacggtagtctggcagttatcatgcctcagaaagaggtgaagccgggcagcgaagtaaaataagtgataagctaatggatattacactcacattaatacagagtaagatatatgaagtccgagggcagaaagtaatgctggattttgatttggccgaaatgtaccaagttgagacacgtatcttaaatcaatcggtaaagcggaatcagagccgctttcccgaagactttatgtttcaactaacaaatgaggaatgggaagatatgtcatcacaatttgtgatgacatcccgtgccaaacgtccgaaatctgctcttccactagcatttaccgaacacggtgttgtaatgctctccagtatactccgaagtgatattgccatacagaccagtgttctgattgtacgtgcatttgttgccatacggcaactaattgccaaatttcctgtagatagagtcggccagttagaaaatcagatggaagaactgaaaaattatatcgaagaggccttcaccgattataatgatattaatgaggatacccgcacacaattggagctgatcaatcaaacactggccgaactgcaagcgcaaaaagcaacagcggataagccacgtaatccaataggattcagaaagtgaaatatggtataataatatgagtgaagaacagtcactgaaacaaaaaacagcaaaagggctattttggggagggctcagcagcagcgtacagcagctactaggacttcttttcggagtagtgttaggaagattactggaccctgcagattacggtatgatcggtatgctggctatctttccggccattgcttccgccctgcaggaaagcggatttgtcgcagcactcgccaatcgcgagaaagtcagcgataaagactataacgctgtattctggttcagtatctcttttagtgctgttctttatattttgctctattcttcagctccgctgattgctaaattttatgatactccggagttaacgtcgcttgcccgtttctctttcctcagtttctttatagccagtttcgggatagctccacgagctcttcttttccgtaatctcaaagtgaaggagaataccatcatttctctttcaagcctgtttctatccggtattgtggggattattcttgccgcaaacggatttgcctattggggtctggctatacagacaatgacctttgtcgtcataggcacggcactcaactggtactttgcccactggaagcccagcttccgcattgacttctctcccatcagggagatgttcggattcagcagtaaaatgctgattacgcaagtctttattatcatcaaccaaaacctgttctccgtcctgctgggtaaattctacactaaacaggaagtcggagacttcagccaggccaacaactggaacaataagggacacgccctcatcaccggaatgatcaacggagtcacccagcccgtactggcaagtgtggctaatgacccgcagcgtcaggcggccgtgtttcataaaatgctgcgtttcacggcttttatttctttccctgccatgttcgggctcagcctcatttccagagagttcattctgattgccatcacggacaagtggctcgcttccgcacggatcatgcaattactttgtatatggggagcctttatcccgatcaataatctgttctccttattgctggtcagccgcgggcggtcttccatctttatgttcaacagtatcgcactgagcgtgttgcagctgatcactgcctgtatcagttatccatacggcatcaccaccatgatttatctgtttgtcgctatcaatatcgggtggctgtttgtctggtactgctttgcccggagagagattccgctgacgctgttcagcatactgaaagatatcgctccttattttctgctggcagcttcgctgacaatcgcagcccattacataacgtcgggcatcactaatctgtatttgtcacttaccatcaaagtgtttttcgtggcttctctatatgcacttgttttgtggaaaatgcaatcagtcattttcaaggaatgtattcagttcattaaaaagaaaaagatatcatgacgacacctaccaattacatagcgacctggttctacaaggaatccaaagaagatgccagtttctatccgcaggcaggcaaacggggagattccgccctcgtccattccatttatatgcagatacaagtgccgttctttaccactttcaggcattatcatccggatgacaagttgcttttcttcagcaatctggatcagtttcccgattatctggaacgattattcaaggagttacggattgagactgttaccctgccttatctctgcatccctcccaaaggatggtacggggcatggagaaatcaattctacctgtatgatatcctgcgctatatggagaaaaggatgcaagcggacgatacgttgctcatctgcgatgcggactgtctctgtatgcgtccgttggagcaactgttcagcgacacacggaaatacggttccgccctgtacgatgcatccgaccgaccggacctcagcgtgaacggaatcacactaaaggagatgacagatatctataatgactgttacgtagaaaaagagaagagagaaaaagagaaggaggcaacgaagaaaacagaagcggaaaaggaagaagcagagcagcaagatacgaaaaacggagtcacaagaacagagcttgtccattattacgggggagaatttatctcgctgcgtggtgatgtagtagcacgaatcaacgaagcgtatcctgctttatggaattataatctggaacgttttgccgccaatcagcccaaactgaacgaagaagcccacttcctgagcgtagtggctacgaggctcaacatccacaacaatatcgccaatcaatacgtcaaacgcctctggacctaccccaaatacaatacggtagaaaaaggagacgagcaactagcggtatggcatcttccttacgagaaaaaaagaggattgtatctgctgtacaaacactttgtgaaccaccccactttcgatgacgaagaggccttccgcaagaaagcctccgcctacaccggtgtgccgaccgttactttcgggaaacgtatccgcgatttcatcaccattcttcttctaaaaataaaagacaaatgcatatactgatacttccaatgtactatcctgagaaggactcctccccgcaccggggatatatgttcttcgagcaggctatgcaactggctaaatcaggctgccggacaggacttgccttcacggagcaaaggcctctgaagaacttcacatggaaacggttccgcaaagagagtcattttcagatatcggcagaagataacggcagtttcgtcaccatgcgcatgcacgcatggaacccgaaactaagcacccgcgcgggaggaatcatctggtctctgctgaccgtcttgttagtacggaagtatatccgcacttacggtcgccccgacctgattcatgcgcacttcggcacatgggcagggtatgccgcacgactggtttataaatggtataagattccctatgtcatcacagagcacgcctcttccatcaacggcaatcagacgacaccgtcgcaggcagtgatactaaagaaggcatacagcgaggcacgcaagatcatctgtgtcggcacgaaactgaaacggagcctgtgcgcatacgtcagtgacccggataaagtgaccgtcataccgaactttgtagatacgaacacctttgcattcagccctcaccggacggagaaagagaaacatttcactttcatcagcatcggaaacctgaataagcgcaaaggattctgggatttgctgactgcttttcactgggcattcaaggatatgccgcacgtctctttactcattgccggagacggggaagaaatgcagtcactcaaagagcagattcagtctctccacctggaagagcaggtaaaactgaccggccgcctgtcacgggaagaattgtccgggttgctggctacttgcgatgcttttgtactggcctcctttgcggagacattcggcatcgtattcatcgaagcaatggcaacaggcttgcccgccatcggcaccgtatgcggaggaccggaggacatcatcactcccgaaagcggcttcctcatccgaccgggaaatgtggatgcgctcgccgctaagatgaaaacattgtacgacacctacgagtcgttcgacaaagagaaaatccgccagtccatcgtcagccgtttcgactttcagttggcggggcagaagttacggcaagtttattcagaagcattagaaatgtccaagcccccaaaagcatcggaatcatgaaagttacagtcatagattgttcagtatcaggccatcgggaaacgtattataaacagtttgctcagacatgggcgggcatggggcacgaaacgtcgctcatcgctcccgacgggaaaggtgtacaggagaccgttgcctttcagcctgtctcagcgcttccgctgctgccgctccctgccggaaaaccgttgcagaaaaagctggttgtactgcgcaatgcagtgattcggctgcgaaatctgtacaggctgcgccggagtcttcaacggctgaaacctgatctggtcttcttcgcctgcctcgacgatatgctgcctacattggctcccttatggctgttcaatcttttgctgccctatcagtggagcggcctgctggttcagtccgccctgccgccttaccaccgagggatgcccgatacacgccctttcctgcgaagcaagaactgcgtaggagtaggcatactgaacgaatattcagcgaaagacctggaaacatttcagcgccacattctgctgtttcccgactttgccgatctttcggctcccgccacaaactacccgttgctgcgcaaactgaaggagaaagccagaggaaggaaggtgatatccctgctcggttccatcaatttccgcaaggggataaagttactgttagagagtatccctttattgccaaaggatgaatatttcttcctcattgcggggaaatcatctctcaccgcacaacaggaaaacgacctgcgggcgttcggggagtcaaggaataactgtctgttctcattggagaagattcccgatgaaagctgtttcaatgccctgatagcggagagcgaccttatttttgccgcatacaagcagttcaccggcagcagcaacctcctgaccaaagctgccgccttccgcaaaccggtcatagtcagccgcggcctctgcatggggcggagggtagagcagtacggaacaggtcaaaccaccggagaagacaacgccggagaatgcagcgcagctatccgctcgctgtgtaccgaaacaaggatggatactcagactttcgcccggtacgcccacgaacacgaagtggagaaactaatcacatgttttaatcaaatcagcaagcatatacaatgaaagtactttttacattcggaggaatcccccactacctgaatgccatgctcaacaggctacaggcaaaaggagtagaaataaccgttgtcagtccaaagaaagggaatacgaccataggcaaaggggtgaaaatggtagaaggaggaatctacaagcatctgactacaccggagaagaagatgttctacggaaaaagcgctttccccgcccttcccgaaatcattgcggaagaaaaaccggatatagtggtaataggatggccctacttcctgcaagtattcttccagcccgcactgagaaaggctatgaagtcctgcaacgccaagctggtgattcgtgaaatccccttccagactcctccctacggaaagatcaaggaatatttcaaagccaatccgatgcacgacgaaggtatgcgcctgctcagcaaggggaccggattctatctgcgccaatggataacggcaaggatacggaagtactgctacgcccaagctgccggaacgctgaactactcgacagccgcctacgacatcctcccctcttacggagtaaagaaggagcagatacacgtcacttacaactcgaccgatacggaagcgcttctcaaagaaaaagaatccgtactggcttccccctccatccttcccccgtgcgaccgtcgactgctgcacatcggacggctcgtaaaatggaaacgggtagatttattaatagaggctttccggaaggtagctgccgactatccggaagcggaactggtgatcgtaggagacggaccggaactggacaacctcagacaacaggcaaacgacctgcaactggcagacagcatccgctttatcggagccgtctatgacccgaagacactgggcgcctatatgaacgaatcgagtatctatgtgcttgccggcatgggagggctttcgatcaatgatgccatgacgtatggtatgcccgtcctttgtgccgtatgcgacagtacggaacgcgacctggtcatggaaggcaagaacggctatttcttcaaggacggagacgccgatagcctggcaggtagaatcagagagatgttcgaatctcccgaacgctgcaaggagatgggaaaagaatcggaacggatgatccgggaaaagatcaatatggagacggtcagcgaacgctacctgaaggcttttcaagagattcttcgtctcactcatcttcgcgattccggtaattagccggtgaagtccccaaatgcatctttacgtacttcccgaaaaaggactggttggggaagttgaactcttccgctatttccttgacggacttgtccgaacgtttcagccggtacttgatatgttctatcgtcgtttcattgatcaagtccagcggagtcctgccacacgcttgcttgatgactttcgaaaaatgcttcggagtgtagcagagcgcatccgcataataactcacagaacggtgcatacccttgtctttcgataatagctccacgaatttccgcagggtataatccgcctgtttgatgccttctttcggactgtcccccttgtcgggagcatcgatttccttgtgaagctgtcccagcatctcacaaaaaagggcggagaagagatgctgcatcacttccctgtgataataatgaggttcatcattgatcttcgccacaatcaaatcccgataaaacctgaaaacaggatcatccccgccttcgctgatagacttcaccggattgttgtggatatgagcagcggtattccacgttttcttctccattttaataatgcgttgcagaaaacgggtagagaatcccgccagccttatcttatatttaggactcagcatcgtacgactgatcagtgtattgggaagaccgagcagcaagtcgcccgcctgcaactgatacgtccggtagttgatatccagctggatacacccttctgcacagacagcaataaggaaacagttcagccggactgtatcattactatacggaatcccgtccagactgttgactatcgcaaaatcatcgtctatataatcaaggatatgctgactcttcttaaagtcttctatatctactgtcataatgttctctttttccatagcctctccttttttacttttttgcaaagttggtaaataatagggaaaacagaatgtcccaaactcctttataattgtttgatatgtcgtttatacgcaaatagttagccacaacaaatacaaataacgaaaacaggacattcatagagaaaaatcggtcaccattgacttgttcttttctcctacttttgttctgattttaataaaagacaaaaagagtaagtatgattacagtgaacaaaaaatggatacggctgataggaattgtcggttgtacagtgtggatggcatcgtgcaaacaggcaccggatgcaggagtgaaatcttcttatgcagtcatgcagatagaaccaacggacaaagaactttcttcctcctattcggcaaccatacgcgggcgacaggatattgacatctatccgcaagtgtcgggaacaatcgagaaactctgcgtgaccgaaggtcagaaagtacgtcggggacagttgcttttcatcattgaccaagtaccttacagagccgcgctcaaaaccgccaccgccaatgtggaagcggcccgcgccgctacgagcaccgccgaactgacttacaagagcaacaaggaactgtatgcgcagaaagtcgtttcagaatttagcctgaagactgccgaaaactcttatctcaccgccaaggcacaactggcacaggctgaagctcaggaaataagcgcacgcaacaacctctcttataccgaagtgaaaagtcccagtgacggagttgtaggcgcattgccctatcgtgcaggcgcattggtaagcgccaacattccttatccgctcactacggtcagtgacaattcggatatgtacgtctatttctcgatgaccgaaaaccaactgctcgcccttacccgacagtacggcgacatggacgaagcgttaaagaatatgccggaagtggaactgattctgaacgacaactcagtctatcagaagaaaggtaccatcgaatccatcagtggagtgatcgaccgtcagacagggaccgtagtggcacgcgtggtgtttcccaacgaatcacggctgcttcatagcggagcatcgggcacggtagtagtgccaagcatctacaagaactgcatcgctatcccccagacagccaccgtgcggatgcaggacaagacgattgtatataaggtagtggatggcaaagcagtctccaccctgatcaccgtagccggaatcaacgacggacgcgaatatgtagtgctggacggcctgaaagccggtgacgaaattgtatcggaaggcgccggactggtgcgcgaaggcacacaggttaaataagaaggagactgattatgaaaggaaatatatttatcaaacggccggtgatggctatctccatctccgtgctgattctcgccatagggcttatctcgctcttcaccctgccggtggagcaatatcccgacatcgcgcctcccacggtctatgtatccgccagctatacgggcgccgatgccgaagctgtgatgaacagcgtcatcatgccgctggaagagagcatcaacggggtggaagacatgatgtatatcacgtccagcgcctccaatgcaggtctggctatcatacaggtttacttcaagcaaggcaccgaccccgacatggcggctgtcaacgtacagaaccgtgtagccaaagcacagggactgctgcccgccgaagtaacgaaagtcggcgtaagcacgatgaaacgccagaccagcttcctgcaaatcggcgcgctggtctgcaccgacggtcgctacgaccagaccttccttgccaattatctggacatcaacgtcatcccgcagatcaaacgtatcgagggagtaggagacgtcatggagctgggcgatacctacagtatgcgtatctggctgaaaccggaacggatggcacaatacggactggtgccttcggacatcaccggcgtgctgggcgagcagaacattgaagcccctaccggctcactgggcgagagttcgcagaacgtcttccagttcacgatgaaatatcgcggaagactgaagagcgtggaagagtttcagaacaccgttgtccgctctcgtgaagacggctcgatactccgtctgaaagatgtggcggatgtggaactgggcactatgacttatagtttccgcagtgagatggacagccagcctgccgtgctctatatgatcttccagacggcaggttccaatgcgaccgctgtcaataaagaaatcaccgcccagatggagcggatggagaaaaacctgccggaaggaacggagttcgtcaccatgatgagttcgaacgacttcctcttcgcttccatacacaacgtggtggaaacactgattatcgccatcattctggttatcctcgtggtatacttcttcttgcaggacttgaagagtacgctcatcccgtctatctccatcatcgtgtcactggtaggtacgtttgcctgtctggtagctgcgggattcagtctgaacatcctgaccctgtttgccctggtgcttgccatcggtacggtggtggatgatgccattgtagtagtagaagcggtgcagtccaagtttgatgccggatacaagtcgccctaccttgccaccaaagatgcgatgggcgacgtgacgatggctatcgtctcctgtacctgtgtcttcatggccgtatttatccccgtcaccttcatgggaggtacttcgggcgtgttctatacgcaattcggtatcacgatggcaactgccgtaggtatctccatgatctcggctctgaccctgtgtccagccctgtgcgccatcatgatgcgtccgtcggacggaaccaagagcgccaagagtatcaacggacgggtacgcgcagcttacaacgcttcgttcaatgccgtgctgggcaagtataagaaaggggtgatgtacttcatccgccatcgctggatggtatggacttcactggctgctaccatcgtcctgctggtttatctgatgagcacgaccaagacgggactcgtgccgcaggaagaccagggtgttatcatggtgaatgtcagtatctcaccgggaagcacgctcgaagagacaacgaaagtaatggaccggctggaaaacattctgaaagatacgcccgaaatagaacactacgcccgcgtagcaggatacggtctgatctccggtcagggaacttcttacggtacgatcattgtccgcctgaaagactggagcgaacgaaaaggaaaggaacacggttcggatgccgtagcttcccgcctcaacgcacaattccagtccatcaaggaagcgcagatattcagtttccagcccgccatgattccgggatacggtatgggtaactccctcgaactgaaccttcaggatatgacaggcggtgatcttgctacgttctatgacgcgtccacacagttcctcaatgccttgaaccagcgcccggaagtggctatggcttatacatcctacgccatcaacttcccgcagctctcggtagaagtggatgccgccaaatgtaagcgtgcaggaatttcgccaagcgcggtactcgatgcggtaggcagttattgcggtggagcatatatctccaactacaaccaatacggtaaggtatatcgtgtaatgatgcaggcatcgcccgaatatcgtctggacgagcaggcattgaacaatatgtttgtgcgcaacggtacggaaatggctccggtgagccagttcgttacactgaagcaggtactgggaccggaaacggccaaccgtttcaatctctacagcaccatcacagccaatgtgaatcctgccgacggttactcttcgggtgaagtgcagaaagtaattgaagaagtggccgcagaatcgcttccgataggctacggatacgaatatggcggtatggcacgcgaagaagcaagcagcggtggtgcgcagacggttttcatctacgccatctgtatcttcctgatctatctgattctggcttgtctctacgaaagtttcctcgtaccgtttgccgttatcttctccgtaccgttcggattgatgggctcgttcctgttcgccaagatactcggactggagaataacatctatttgcagacgggtgtgatcatgctgatcggcttgctggccaagacggctattctgattacggagtacgccatcgaacgccgccgcaaagggatgggcatcgtagaatcggcctactctgccgcacaagtccgcctgcgtcctatcctgatgacggtgctgacaatgatcttcggtatgcttccgctgatgttctcttccggtgcgggtgctaatggcaacagttcgctgggtacgggtgtcgtaggcggtatggctgtcggaacggtggcattgctctttgtcgttccggtcttctacatcatctttgagtacttgcaggagaaaatccgcaaaccgatggaagaagaagcagatgtacaagtgcttttagaaaaagagaaaagtgaagctgaacgtgaacgttaataaataaaagaaagaatgaagaaaaatatcatcctgttagttgccatgagtctgacgctgagcggttgtggcatctataccaaatacaagcccgccacttccgtccccgacgatctttacggcggggaagtggtgacggaagacactgccggtctggggaatatggactggcgggaactcttcaccgaccctcatctgcagtccctcatcgagacagggttgcggaccaataccgactaccagtccgccctgcttcgcgtggaagaagctcaggcagcgctgatgtccgccaaacttgctttcctgcccgcctttgcgctttccccgcaggggacagtgagcagcttcgatacgaacaaagctacgcagggttattcgctacccgttaccgccagttgggaactggacgtattcggccgtatgcgcaactccaagaagcaggcgaaagcgctgtatgcacaaagtgaagattaccgtcaggcagtccgcacgcagctaatagccggtatagccaatacttattacacgctgctgatgctggacgaacagctcatcatctcccgacagacggaggaggcatggaaagaaaccgtagcctctacccgttccctgatgaacgccggactggcgaacgaatcggctgtatcgcagatggaagcgacttattatcaagtgcagggttctgtgctcgatttgcagcagcagatcaatcaggtggagaacagtcttgctttattattggcagagacaccccgcaactacgaacgcggaacgttggcagaccaacagtttcctacggactttgccgtaggaatccctgtccgaatgcttgccgcccgccccgatgtccgctcggccgagcggacgctggaagcagcgttctatggcaccaatgcggcacgttcggctttctacccttccatcacgttgagcggaagtgccggatggacgaactccgtcgggtctatgattctcaatccgggcaagttcctggcatcggcagtaggttcgctcacgcagccgctccttaataaaggacaagtggtggctcagtatcgcattgcccgtgcgcagcaggaagaagcggctctcggttttcagcaaacattgctcaacgccggcagcgaagtgaatgatgcgctgactgcctatcagaccagtcaggggaaaagaatcttgctcgacaagcagattgcttctctacaaacagccgtgcgaagtacttctctgctgatggaacatacgaatacaacctatctggaagtacttaccgcccgacagtcattgctcagcgcgcaactatcacagacggccaatcattttaccgaaatacaaagtttaattaacctataccgtgctttagggggaggacaggaataaagaatatcatacttcctctgtttttttgatcctaatgaagaagggctgccggagaagtgattctctgacagcccgtttttcgttagagggcattcccgataagaagtgttattaatttttgtttcgcccggtcccgccatcggcgccaacgaacggcatgatttgtttcatgctctgaaactaaaagtttcatgccttgaaaccaacagtttcacaccgagaaaccaatggtttcaagcaatgaaactattttgaagttatcgaagcgcagctatgattctttcgcaagcctgtccgtcaccataagggttatgcgtttcggacatccgcttatacatttctttatcttgcagcagggcagtgacattactgacaattgcctccgcatccgtgccgaccagcttcaccgtacccgcctcaacagcttccggacgctcggtcgtatcccgcatcaccagcacgggtttgcccaatgaaggggcttcttcctgcacaccgccgctatcagtcagcagcagagtagaatgttgcatggcataaataaaaggcagataatccaaaggagagatcaggtagacattgctcagaccggaaagcagttcatacactggcttctgcacattaggattcagatgaacgggatagactatgtccatctccgggtgaagagccgccagttctttgatcgctttgcagatatgcaggaaaccatctccgaagttctcacgacgatgtccggtgacgaggatatactcacgatcacctaccgtgtagcctttctcctgaagttccttcgccatcttttctttcacaccggcggcggtggaaatgatatcgactgccatcagcagggcatcaatcaccgtatttcctgtaataaagattttcttcgcgtctatattctcttgcagcagatttgcccttgactgttccgtcggtgcaaagtagtaagtacagatacggtctgtcacctggcggttcatttcttccggccagggagacaacatattataggtacgcaatccggcttccacgtgtcccacaggtatctgcatataaaatgccgcaagggatgctgccatcgaggtagtcgtatctccatgcaccaatacggtgtcgggacggaagtccttcagcacttcgcgcagtccgagcagtactttagcggtaatgtcatacaagtcctgattgggagccatgatattcaggtcatattcgggagtgatgccgaacacctccaatacctgatccaacatctgccggtgctgtgccgtaacgcagacacgtgtctcaaaatgttccgtatctttctggagcgcctttacaagcggagccatctttatcgcttcgggacgggtaccgaaaacgagcaatatctttttcatctgctttatttaatagagtctatacaacctcttcgcaattaaactacattttatcgtctcacgccgcagaagtccagttctatctttccttcttctctgggcaatgcaaggaagacatcgtgacgaaccagccagacgataatatccgctttctcgtatgcttcccgataatctgtcagatggaagctcttatgagtgcttatattaggctcgataatcagcacgtccgctctcgattcggagatgatgcgggaagcgatatatttggcgggagattcccgtaagtcatcgatattcggtttgaaagccagtcccatgcaggcaacgaccggttcgtgctcgttctgttccacaaacttctgacaggtttccaatactttgttcgcacaccagtccgctttgtaatcgttcgtttcacgggcacgcttgatgagctgcgcctgttccggatagtcggatacgatgaaccaagggtctaccgcaatgcagtgaccacctactccgcaacccggttgaaggatattcacacgcggatgcttgttggcaagttcgatcagttcccatacattgattccggctttgtcgcagatcatggagagttcgttggcaaaggcgatctgtgagtcgcgggaggagttctccgtcagtttgcacatctctgccgtgcgggcattggtgccgtgcagtttgccttgtacgaaagcggaataaaactcaatggctttttcggtggatgccggatcgataccgcctatcacgcggtcgttgtgcaccagttcgtataatgtatttcccggcaatacgcgttcgggacaataagcgatatgtatcttccctttcagttcgggacgttctttatagatcacttccgccatacgttcggtggtatataccggagaagtggattcgatgacaaacaggttaccctcctgcagataagggatcacggaacgggtggccgcttccacataggtgatgtccgcccgatggttctgcttgaacggggtaggcactacgataaagaaagcatccgccgcttccggcttgcatacagcacgcaactttccactctgcactacgtccctgactacctgacccagttcaggttctacaatatgtatctttccctggttgatcgtttccaccacagaaggattgacatctactcctatgacttcgaaaccgtgagcggcagcaacggctgccgtaggaaggccgatataccctaatcctaaaaacacaacctttttcatgttcaatatctccttattaataagtgtggcaaaagtacaaataatatgtgactttgtacggattttcactgaaaaccactacttttgtgcaaacattttgaaagcatgagggtactaatcatcaatacttccgaacgaataggtggtgcggctgtcgctgccggacgactgatggaatcgcttaagaacaacggcatcaaggcgaaaatgttggtacgtgacaaacagacagaccaaatcagcgtcgtcggcctaaagcgcagttggctacacgtatggaaattcatgtgggaacgcatcgtcatctggaaagccaaccgtttcaagaagaatgatctcttcgccgtagatatcgccaataccggtacggacatcacttcgcttcccgaatttcagcaggcagatgtcatccatctgcactggatcaaccaagggatgctgtcactcaacaccatccgcaagattctgacttccggcaaacctgtagtatggaccatgcacgatatgtggccctgcaccggcatctgccattatgcacgcgaatgcagaaactacgaacaggaatgccaccactgcccttacatctacggaggaggaggcaagaaggacttatctacccgaatcttccggaagaagaaagaaatttatagtcaggcatccatcacgtttgtaggctgtagccgctggctggcggagaaggccaaagtcagcggactgctcaccggacaaacggttatcagtatcccgaacgccatcaacacgaatcttttcaagcctcacaataagcaggaagcccgcagaaaatgcaggctgccacaggaagggaagctgattcttttcggttctgtcaagataacagacaagcgaaagggaattgactatctgattgaagcctgcaaactgctggcagagaaacatccggaatggaaagactcattgggcgtggttgttttcggcaaccagtcgcagcagttgcaagacctgattcctttccgcgtctatccgcttccttatattaagaatgagcatgagttggtggatatatacaatgccgtagacctcttcgctatcccttctctcgaagagaatctgccgaatatggtgatggaagcgatgtcctgcggtgtgccctgcgtcggtttcaacaccggaggcataccggaaatgatcgatcatctgcacaacggatacgtagctcagcgcaagtcttccgaagatctggccaacggcatccattgggtactgacggaacccgaatatgcggaactttccgcacaagcctgccgcaaagccataggcaactattcggaaagtatcatagcgaagaagtacacggacgtttacaacaaaataacagggaaatatgcatagtgtccatcctactcccaagttctcgattatcacggtgacctacaatgccgagaaagtactggaagataccatccaaagtgttatctcgcagacttaccaccacgtagaatacatcatcgtggacggggcctccaaagacggtactctctctatcatcgacagataccgtccacggataactaccgtcgtcagcgaaccggacaaaggattgtacgatgccatgaacaaggcgatttcccttgccagcggcgactatctctgtttcctgaatgcgggcgactgctttcacgaagacgacaccttgcagcaaatggtgcacagcattcatgggagcgttctccccgacgtcatctacggggaaactgcgattgttgacaaagacaggcactttctgcatatgcgccgcctttccacgcccaaaaagctggactggaagagtttcaaacaaggaatgttagtctgccatcaggctttctttgccagacatacgctgatggaaccttatgacttaaactaccggtactccgctgatttcgactggtgcatccgcatcatgaaaaaggcgcgtaccctgcacaatacgcacctgacaatcatcgactatctggatgaaggaatgactacgcagaaccggaaggcttctcttaaagaacggttccgcattatggcaaaacattatggatggataagtaccgcagcacatcacgcttggtttgtactgcggttgattatcaagccgggacaataaacagtgtatttcagactgactgacccagccagtctgaaactataaaatatagaattatatctaattcacctcataaagcattacctgatccagtatcactccctcatccaatgccttgatgaccaattgatgtgatttcctgcccagaacgggaagtacgattttccggattgcctgattacgaagcacgttctctttccattcctcgctgcgccccttcgtttcgtacgctatcacttcaggctcggcaccatccagagaaaccgagaaacgcaacttatcgccatgcaccggatgattgggaagtaaccggatatccacctctaccgagtccgttttcagattaccgaaagagaaagtcagcgcatcgccttttcttatctctgcggctttgccttcatatcccaaaccttcgcagacaatagcgttgcccttctttgcctccgccccattccattgacaggctgctttacggtccgctgtcatcggagcagtagccgcatttctttccacacggttgaatacagggagcttgcggggtttgaagtccatcatgcgattccatttcccattctccaatgagttataatgttgagtcagtgcagcaatgctgtcgtaagcggcatcactcttttcccagtcttccttatcgtggcgtgccaattgggcgtataacagtttgcgattcatttgtgtcgcagcctgtacgggatatttcaccagttcgaagtaagcgctctgtctgtcggcgggtactttagaagcagctttctctactgtttccgaaagttcgctgtaagcattcagacgttcgtttatctctctttcgctccacggtaagtctttgactacccgatagaccggattcttttcttcctcccgtgtatttcccataaattcgggtttgcggatatgtgccaagcgataatgttcctgcataacgaggaggatggtctttgcacaggaggttcccagttcccgttccagccaatgtttcagatgtgcggttactccttcggaagataccttatccagattccatgccatatccatgaacagttctatctgatactcggcaggtttgatgtctccgacgttcagtatccacattttctgtattccctgatcgtaagcctgcttcatctgttgataaatgagcgatggactcatggtgctcaaccataaatgatcgtgcgggcgtccccagtaggaaacatgataatagactccgttgccgcctttacgggcacgctcttcggcagtggggaaatgacggatatagccgtagttatcatcacaccacatcaaggtcacgtcttcgggcacttgcagtcccgcatgataaatatcgagcacttccttataaggaataaagacctgcggcacttgtgttacgtctttattcacgtacttttcgagcaagccgcgctggtcaacaaatacccggttcaggacggctttctgttcttctaccgtcttggctccctgcatctttccatcgtgaacgccacgcatacccagcgtgtaaagtatctcttgtccggcaacttctttcacacgattttcccaaaactgataaacggccggactgttattcacgtaatcgtatgctccttttccacgtattttccattctccggcagcattgcacgccattggttcgcagtgggaagctcccataaagatgccatactttttcgctgcttcccgattgcccttcgtcagaaagaaaggcaaggtacactcatgcatagcaggccagtaggtattggcccgcaaacgaagcagcaactcaaaaatacgttcgttggtacgcggcccgatttctcctttcacatccgacggttcgtaagtcttgttactccaaggcatcagtccccaatcttcatcattaataaagatgccccgatactccacagaaggagactgcaactctctgaaattggaagaaaggcggaacatctctttcttctccggagtcacatccgcccaccattcccaaggggaaacacctagcagacgggatatttcaagtatgccgtaggctgtaccatgactgtcgctgccggctactactagctttccatcttctgagacggcgagcatgaaagcctgctttttgttttttaatgcggaaatatcgatgcctgcctgctcaatcagcttgctctgtccgatcgttcctaccaggatgttcccggtgtttgtgtctatatgggcagttgccgacaatacagtctgaaggtcacgggacaacaagtccagcgaagtacgcaccaccggtgcttccgaaccgctgcaagctatcgcaaccggccgaccggactgcaaaacaaaatctttttgtttaccctgaacggacacgatcactgctacccaagcaaggaaagaaaataaaattctatttctcataaatattacagttttacaatatcagtaatggtcacaaagcaatcgtcgctgccatagattctcttcgttttatcagtccatgtggggctgatgcccgtaacttcaatcaccagcgtatattccccttcagccaattggggagtcttaaaacgcgttgcatgatcattcgccttactatagaaatcgaccagtgaagaatatattttctcccctttcttatcaaggatattcatacgcgcatatccgctatgacagttcgtttcgcccataacagccacacaagagccagtgaaaggaatgctcagcgtacttccttttacattggaagatattcttccttcctccactttccagtcagcttctttactgaacgttatcttctttaaatcgacggtttttcctttgcgcagaggatttacgggtttcaacttatcaacgtcccaggaaggccagtattccggaatagaaagctttgttccatccacctgcataggcatccacacataggtggcagccgaagcctgatgcggataagaccagcgatcgcccataaacataggaatcgtatcttcgccacactttaaaggaaacacaaaagtggtctgtgaattataggtcaggcttccttcgggagcaaacaaaccttgtctggtccacgggcctttgacggaaggggcagtaaagtagaaattatcattcttctcccaactggtcagattggagaacaagaagaaatacgtgccgtcctttttaaacattgccggagactctccgtgagaaccacctactcccgataccactttttcctctgccgtacggtagtccttactcaaacgatagacaattcctccgtgcaacagcagatatccagtaccgtccgcgtcctgataagtccccatatcccagcggcgaataggcttaccttcatacaacagaggtccgtgaagtttatattcacctgctatagtgctacaggtagcataaccgatatggggatctttatagttcatatcgtctgcatgcatatacatcacatactcgccggtagaagggcatttcatgactttcacacgctcgcctacacgatcagggccaagaattccgcttgactgcatcggcagtacaacacgttcgaacttccagttcaccaaatcatcagatgaataacaactgaaacccggaaatgcattgctcttgtccgacttatattccccgaaaagataatatctgccattctcttccacaatgcaggcaccgtgggcattgacaatctctcccctgtcgtcaaaccagggaattccgttatttactattttttcggttttccgggccatgcccgttccataagatacccacaaaaaggcaaacaataacatccagtatttcatgatattcttctataaattcttataaaaaatataaggcacaattaaattacaaatttacgattaactatctatattcctatagagaatagtacaacaagcatggaatattgtactatttttcttcaaaacaacatcccgcagaacagccacacactttccatctccgccgtgcatatcatgcagcatctttcatcattgaaaagaataagaatatttaatgcacaaaaatagggagaagaacgtaatgagacgggaggtaaatcgggcagatatagggggtaaatcgggcaataaagtaaaagattgtcatgttacgataattcgcagtctgctaagtcaaataaaagaaaactctctacgggttcttctgacatatagaaaactttttaccatcaatactaaaatcgcagttgagtttataataaatagttgcatcgtttattataaacggtctccccatttattataaactccaatacaccttttaagcacgtatttcttgattttatgcaacaaaaaaggctgcaaaccgtataaaaggttgcagcctcaagcttatcaccggttcacatagatgctgatttgcatatgatcccctttgtattttgttataatgttacactatttttttcggttcggttaagatgattgataaggtgcatttcgtttcattttttaatgggttgttactttattgcctgtatgactcctgcaaatatacaacaaaaaaatgcctttgtcaagtcctgcggatatttgaataattaaaaagcgacaggcagtgcaagtaactgatacatcaaagtgcgtgccatacgctcctgccctttggtgtcgggatgcaaacggtcatagccggcatcatagaaataaataagctgttcttcaaccatcggattcatacctgtcactgcattaaagtctatgacaggtattccccatatatttcctgcctccttaatagcctgcacataagcatctatatattctccgcaaccattctgatagctttcatccggctggacattcttatcgccgaagttagccaacgaacgatgcaaaggagtcagcagaacgatctgcttatccgggaaaagtttcttcagttgagtgattcctatattaatacgacctctataagtgtcttgagtcatgacaggcgtacgctttttccgcgtcaccatcttcttcatctcaccgtgagcagacagcacttgctcttcttgttccgtaaaccactcaccgataggcacactactattataatcgtttgtccccataaaaaccaggatagcatcgacttctccgccatgttctttcttcagcttttccgcctgacggggtacatcatcccactgccttccactaatgccgtaaacaaaaggagtgatccccagccattctttcagaaagtcccagtacttctttatattatcaccgtagcaattcgggtctgtgatggaatctccgatgtatcctactttcttgccttgccagggatgctgaatacaaccttgtttattttcagaaaagtcttttgttacagatgcttgctcttgtccatacgccaaacaagaggagagaaacaaaactgtgcatatgatcagaaacctgtttttcattgttttattctattaataatgaggtactcgtattcaagtatggaaatgcagcctcaaaaatagacagtttaagcgaaagtagcaagaataaaaacaagaagataaagatagtatcttcttcccccgtttgcagggcaactataatctgattgcaggacatatatagccaatgtgcagggtaactatctcctgcacgttggacatatatgtcctgcacgctgggcatatatgccctataaatacttcatatatctaatacacagacttattttgtgtacatcttcaatcggatatatccttccttcgactgatttttcaatgcaatcccgatacgtgtatatgctggagagttcacttcaatcgtttcggaagtaaacgccactttaccggatgcctcaatagctacaatcatctgttcggaatcagtagccagcagaagatgtgtatcgtccaggattttccagtcggctcgtgtcgttatggctgtttcgaatcggatcggtgttttcgctgtaaattcatcgccaaccgtaaagctgcctttgccctgacggtcgtaaacgaaagtacgaatgagcttatccaaattgggggtggaataagcagaggtatagtcaatactgaatacatctttttcgttcgtaaattctttctgtagcacaacacctttcgctttcccgcccgaggactgtgttcgtccgtctactacaggaaccggatgaccgaatgatccttttatcttatatttctgaggagcgtctccgttaaagtaatcaccgggataggagttcggaccaccctgatcgccaaccatcgtttcacttcccaaagctacggcataagaaccgacatcattgtggttatgattctccgcattggttccgcccttggctgatatggccagacgacaggaagttccaccggcaggacgagcaatcaaaatacctgcctgctcataataagcgcgtaaagcatccgactcttcctgtaatacctgacggattccgtctgtcattccaacctttgcaacctgacttgtgaaaagttcgagaaggtgaagggacaagttgtttcctttgggtaaaacaggctgttcttctgcagaagtaatacccagcgcccggtcgcagtaactgagaataaacttgtccggcgacaacccgatgcgacaatccgaataggcggggcacactccttcattcatctgtatcttcttcccataccgggcgatacggacaaacttgggagtctgaaagaagtcgatctttccctgcgttgcccggtatacttcttcacgcaacagaatgtaggcacggaaaccataattataataacctacaccttcactacagtagccgtcgtcagcgtaccccttcattccatacacgttatacttttcggctgccgcaacaaagtaagcacgttcctccttatcgggcaacaaggcaagagccgcaccggtaacacccgccagacacacagagttccagttattggtagcggtgaaccaccaaaatggttttgtctcttccagacaacggtagaccggacggaaaaccttctcacggaaagcacactgcacccgtgcccttacctccggcgacagacgatcgtccagcatggtaacacactgagcaataccgtttccggcagtagcaaccaccaagtctacataataatccgttcctttataattcttcagaccgcggtcgtgggcaggaatagaccaaggcttctgactgcaaagagccaccagagctttttcgatggcagggacataacgcctcttattttcaaggcattcagccaaagtcagcctgtacagatattgataacgggcattcatcatattctctccgggcaaacgaacgttcgtcttattcaaatgcaggtacagtgaatcgacaaaagggggcatcccctgctttaacaaagcaggagcttccttttccagaagttgtttagcgtcgtcactctcttttatcttattccagaaagtcctgtccttataagacgttcctatcccctgcggtcgatcgggaagcatagctgcaatttcctgaatacggttctgcgggatagtagcattctgtttcggagcgtcttctgccatacgatacatttccgttccggcaagcaggaaagcacccggtccgtatacttctgtcatattgcgggtcactttctttgggtcggcaccgataggttgtacatatcctagtttaccgtcttcttctaccgcagaaagcagtgctttccatcctttctctactacaggcaggaacttttcctttggtaaaagtccctcgttcagtccataggcaagggcatatacgaagaaaccgctacagcttgtttctggtgatggataagcgtccggatcgagcagacttgcacgccagaacccgtcgctgctctgtaaattagcgatgcggtaacagagtttctgaaacagttcctgatagaacggacgatatttgctcttggcaggcagttcacgtagcatttctaccagtccgccaagcacccagccattgccccgtccccaaaagactttggcaccattactctctttcatatcaaaataacggtggtcacggtagaagagattttcttctttatcgaacaggaactcgtaagtcgctttgtactctttatccataaagcgaatgaatttcttatcaccagtgatattatagagtttcagataaacggggggtgccatgaaaagagcatcacaccaagtccagtgttctaatgtcgtggcatctccgtaagtcaactgaaacgaacccgaaggaggattggcgaccacccactccgtacgcgccagagtaggaacaatcatgtccttttgcttgtacttttcgtacagatacagataggtttgagcaatacaaatatcatctgcatgatacatccgtttatctacctgccaatagttacgacttcccaggcgggtcagccatttataatagaagtcatcctgatcgtccttctcggcgatctctgcccaataagcaagtcccaggaaaaaggtggcattcacccagttgagatcaccataaacagctctgttgtaatgaccgatctgccaatcggctaccctacgcatcgattgcttcacttcgagtttagtaaacgattgtgcatgtgtcgtgcataaataagctatgcttagaaaaagaatcaaaagtaatttcttcataatatattttttaatttatatgctttggatgcaccggcatagataccggtatttctaaaatcacataaaacagtctttcgctcgctggatatttcaggaatcagcaattcaactttaatacaagattgtgtctgcccaggatcagcaatatgcagttcggcattgccactgtgtccatccttaatcatcaatgcacaggctttatccacacttacagaaagctctccgttacggaatgtactctctttataaaataccatttgccatattcctaatttcgtatgcctcactatctgcatagaatccgtattcgccagaatttcgacgggactcttcctgtagttattcatcttgcgggcagaatgaatcccaggcaccacgatataggcataggtagcattccggggattacaaccatgattaaatcccaaagtaaagacctcttgctgctgctcatttttagattcagtatgattaatgctgtaccacgatcccgtctgtatcttcttgctcaaaaagagatttccgccggcgggaaagacataaccaattccattgtgcaatacccattcgggagaatcatagacgaaatctccttctttcaccatcgactgcttcttactttgtgacaatatgacctcctttttcgaaagcaaacattgattgatagtagtacataccggtacaccggctgtcgaattaacccccgctcccaaacaaatgatttcatcatcgaaaaagaaccaggactttttagctgcggtatttatatcagcataggtatcaaaatatgaataaacagatacgccataaagactatcagagactcctcctgcaaatacggaagttcccttcgtttgccaatcaattacagttcgtggaatggtatccagttgaggagcagtcactccaggaatacgattccagttccataccggaaagatgcgggcgtactcgtccccttcggtcacgatgtttgtacatccgtcggacataaaataggttttcagattttcaccattcccatattcgcatcgcatggtacgattggaaaccatacgaacgtcaaatgtatagtggggacggacatgaagagcatagtctcctctgaaataatgagtgtgtaacggctttattccatagttggcggacttcttgccttccaatctggctataatcgcattgtattcatcaatatgtgccgggtcgagctccagcattcgtttggcaaacaaggcggcatgactcttttgggtagcattattacggctcactcctcttcccaatacatcgaaaagcatgtattgtccacgtataacctgataataagtgccgcacataaaatgcctcagaaattgtattctctcatcatccaatgcatatttcgttcctttagtatatagagctacctgtgttactcctttcagtatttcgtctccataaccaccgatataaagctgcacgccatgctgaaaatagctgttgtcatgctgaaatccttctttcacagtatatgatagaggactataaacattctcaacagccgttttcaagtcaacatcattcttctgaaggcaagctctataaatccaatgtaaagcaatatccgtccggttggctccagtccatctggcaggatgtccgccgtccttccgcatacgttgcaagacctttgtctccaatacttccggaatctgccttttaccaacacgcatctgaataagcagaataccgagtttctgcggctcagcaatctgattataccaccagttattacaatgtggattacgatgctgccaatactccaagccctttactatcttatgatacaaatcttcattctgataataggaattctttggatgagtataagcaaatacaaagtcatacaaccgatccacatgaataagtggcatccagttagtacgatcccggcgggcataatctatatctataaaacatccttggacgtcatcatacagctccagagctttatcaatattcggattttctgtaaccccatcccgaatcttcttcattagaatatcaaaatcatcattctgcaagccagacgtacaaatagaggggcaaggtaaaaccaaatcccaaggactccatgccagcaataatagaattatgattttataatgtatcattttcatatatgcatgtttatcatttggagaataagggggtatgtcaaaagtaactaaattcccttcttgaaggaggagagcttagttacttttgacacaccttctcatccttaaaatacaatcaggccgaccactcaggctacttcgtatatttaacaggtttcgaccagattttatccaatacgttttcctgcggagcatacaaggtttccattataaaagaatcgcctgtaaaatcttctaaaacgtcctgtccttccttattataataagaaatttttgttgtttcttctcctcccttgttccaagttagcctggatgccactaatgtgctgtccagcaacatggaatatttgatgaccagattaccactctgcatactcttagaaacaatggaacgatttaacagatagctctggtactgtgtcccataaatggttcctgtaaagtctgtagccaatgatttattcaactcatcatcttccagccaggcggaaaaaatgatagacccctcccgcatattctctaaaagaatatccgtcctcttatttttggccaactcatatctgacagtatcactttgattcaatgcaagagcaatctttgtagatctcccgtctttcactatcggaaatgaaatcaacactctttcccacccattacgcacggttattgaatctttcgataatcgtgtaagatacatgattggaccatccttaacaaagtccttataagtcgcatccattgactcgcaagatataatggaacaaaatatcaagatgctgactgatataaatataaatttcttcataatatttgtcttttatatagcaattactgtattattttatcctccggtgttccaaagaaagtaagttctgccacattgatacgagatgttcctacattataattcttgatacaaacaaacgtcacatatctatatgcatccagatctacggaaaattcgagttcattgccgtctcttgccagttccttatcagcatcagttaacgggacaatagccgccggaataacagaaccgtcggctctgggcaatactccttgatataaccgtacccatccttcatcattttccggatcaaacttggttacattattatcatttcgtccccaaatttctatttctttcggatacagaccgtcaaatatagatgaataatcagttccattccttcttccatagacaatcatacggctgagcttaaacttcttccctaagtccagtgtcaccgaactcggcttggtaaaatcatatcccgctgttgtgagggtcatgaaagtattattgcttccaataattccgtcatacagattctttggggtattagcattcggtgccagataacctttgtattcgccaatagccaagtatcccatttttttcttatctacttcctcttcataatatggagtcagagatatctccttactttcagaaagatgtccccacctatccttcaccaccacactaaattctgaaggaacggcttccataccacgtatgggctcattaatctcttgctttttggtatataaagctccagcttccgtccattttcctgtagcatccttccggtacacataaaaagtaagagtctcattgctggtgttggatgtctttatccggataccggcaaaatccggttttatttccatctccttataagcagtgatataaggtggctcttccggatttatttttacttccagaggttcagaataggcttcacccggacttacagaatacaacttcacattatattcaccagctttttcaaatccttccaccactacagagtcggcaaaatacgaagcattggtcgaacgttctcctatctctgtcatatatacagccttcatataaagaaaattcttatcactgggctgtgtaaaatagattatagactttcccggcagatttttgacaccattcaatactacctgttcaggcggagtcgtacttccatggggagaattcatatcactatcgttatcgcaagcactaggcagcaatgtgatggctagtactaaaaggctactgtatattatctttttcataaatcaaatgtcactttaattacttaccaaccataattttgaactaagttaggatcttttctcaactcaccgatatcaataggccagaaatacattttgggagtgaaatcccggacaagcactaagttctcactataataatctacatcagtttctccataacggactttccaaccggtcaatggctgtgtcaattctgttgtcgcagttttccaccgacggacatcccaaaaataatgtccttcaaatgctaactcaatacgacgctcctgcatgatgatttgtcgtagaccagtctgagtagcatacttgctgtttcctacatattggtcccaactttcttttacgccttgaagtcccgaacgttctctcaccatatcgatccatggcaataccgtagcataatcctctcctttttcatttaaagcttcggcatacatcaaatacaaatcagccatacggataacagggaacggataagtgaccgatgtaaatccggaagccgcatcggacatgaccgtcttgtagttaaccactttcttaggccaaataccagtcaggttctgagagtgatctgccggaatgggagacacatttcctcctttacgcgcattcaccgaatacaagcccgaaagtcccgtctttccttgtccgaaccaaataccgccgtcaaagcctaagctggcataatatctgtgttcacgttccagattcaatttgactgttcccgttttataattcagcataatagtattctcatatccgggctcagcttccaccggcgtgggagcctgcacttcaaatctattagcataatcccatgtcttatcttcttctataggaaccccatgtttagtataaaatgagttagtcagtccaagagaaacacccagattggttctgttcgtagcattcttagcatttctgccgggaaccaagtcacgcggcattgcctgtatctgatagttgtcataagaacccgaaccgacccatgactgagagtttgcccataccacttctttgttccacttctcagtgacagcacctcgcaaattcatcatcagcttgtcggactctgtcatgaccacagtgggatcatcaaaataatataaaccgaatcccaaatcttcgagataagtaatggcttctttacacgcttcggcagcctttacccatttctgcttcttctcctcttccgttttaaccggattaaagattttcacacctctattatctgcaattacctcataatccatatttccattgaacaatggacttgcagcggttaccagaactttcgctttcaatgctttagccatacctacggtcactcgtcccagttcttcagcttcattctctattttagccggaacatccggattagcaatcaccttgtccaaagtttctgtcacataattgaaacaactgtccaatgtctcccgataaggatgcatttcctccgtactactacttaccggaacatatcgatccataataggaatcggtccatacatcctgatcagatagaaatgataataagctttcaaaaattccacttcaccgatccatctgtttttctcgctatcatccatatccggtgtagtatgtatattctcaatcagaatattacaataagcaattccctcatataaatgtccccattgagcacaatatggtgaatcggacttttgcaatccttgggctatataccaggcgctggttcccaaatagctccggaaaacatcggaaatacaaaaatcaccggcaccaagcaaagctacattatttttgagacttccgtcactaggcatatacctgtagcaagtaaacaagactttttccgcttcttttctcaaggcgaaagcatggtcttcaatggtcggtatgttatccgggacgatattcagttcacatgatgtcaatataaacaccgacaaacatgacaatatacatattttgatttttttcataaccattctttttagaaacttacatttacaccaatattgaatacacgttgtaacggataattaagaccattacctgccaattccacatcccaatccttgaacttactcaaaacaaaaagattggtagaagacatatagagcctcagattggacataccccatttgctcacaattttttgaggtactgtatatcccagttcaaccaatttcagtcgtaagaaggaaccgtctctcatgaaccatgtactcagttctttattgttggcaacagaagtggttgacaatctgggccatgttgcataacgattgcggttactttccgaccaatagctatttgcaataaatttcactagttgattattagttttctgcttcatatccggatctttaaagaatggagacatcttatcataatcaatccagaaagaagactgcgccgagccgtggaactggaaattgatgtcaaaacctttatagctaaatgttgatccaaagccatagttgatttccggactagtcggatgtccaataggaacttgatccaatgaattaattactccatctccattcatatcccggtatttgatatctccggctttataatcaccaaactgtacaggagagttggccacttccgcatcgtctataaatagcccttccgcaatgtatccccacttctggttgggcgagtagcctattttgtatttccaccattccttatcatacgtgttatcttcatatttcagatattcactatgcgcataggttaagtttccgcgtactatcaaaaaagcgtttttgttaaggttcttttgatactttaaatcaagatccacaccgtgtcctttggtctcgccaatgttagcatatacgtctgcctgatatcccattacgcttggaatactggctcttttctgtaatatgtcagtacgatgttctgtgaaatattcagctatcaggtcaaatccgtagaaagaagcttccaatgcgaaattagctttacgggatttttcccatccaatggcaggattagcataacgtgaaacatttacgcccggtctgctatatttgttttcatacccgaaagatgctccacctgcattcatattcacattagacagatataagaaacgttcatcgactctgccaatcttatcatttcccaccaaaccgtatgaggctcttagtttcaatttcgtaatttttgaactgagcggttggaagaatggttcgttcgaaatcatccagccaccaccgacggacggaaagaatccccatctgtgtttcttatcaaagcgttcggaagcattgtatccaaaattgaactccgtgaaatagcggtcactataggcataagtaaaacgtcccgacacacccatatttcttgaaggcaagctctcctgcaaagttttgtagtttggattcttactgtcgatatactgagtaacgataagaccacctacggaatgatcaccgaaagtctgattataactggttctcgtttcgattgtcattacattgttgacagtcttgtcaccgggactaaaatcaaggtattccgttccggagtcaggattgatgttttcgatagaatatttctctgtcatgaaatcataagaacttaaagcatagtaatatggcttatattgtctggtctgaccgtaatatgatttacgagaaacgttgaagaaaccttcaaatttcaaacctttagtgataaagttcaagtcctgcgtaacacctaatgtagcaagaagagtcgtattctcatattccttatatccttttaccatttcagcatacgggttaagataacttccgtcatcgctgtttccaaaaagaatgtgtttgatatatttatgttgttcatcggtaggatatacagcgggaaaaagtacaggattagacttcattaccatcttataaatatccgatcccgaataaataggaccttcataagtgtcaaagattccacttaagtttactcttacctgggtcgtttttgtcacattgatgttgacattagccctcatctgataagtctgaagattgatattgttgttgaagttgttcttgccgtctacgttgagcaaaccctggtctttggtatatcgcagagacacgtaatacgtagccgaatttcctccgccactgatgctcatgttggctcttccattccaggtcgagttcttcattagttgccttctccagtcatttgtaggataaatgatagaaccagatcccggaacggttctgtctattttatcatcactatacatgacaggggcggaaggatcacgtgttaagatggcttcattatgcaatttcatgtaagtgacagggtctgccaactcaatattactggtcggacgagaattacttccctctattcttacatcaaacttagtttttcctctctctccctcttttgtctttaccagaacgacgccattagctcctctcgaaccgtaaagggccgttgccatggcatctttcatgattgaaaaactttcgatatcatcgggattcaaacgccctaagtccgtacttgtagattcaatgttatcaatcagaatcaaaggactggtgttaaatccgaaagatgcgataccacgtacaaagaaactagcatcatcatcccccggctctcctgatgtctgataagaaataataccggctacctggcctgccaatgcagttgtcatattactgctcggcactctcaggctctttggcgaaagtgtagtgatagaaccaatcacactctccttcttttgtgttccgaatgccacaatttccactgcatccagttcatttacgttttgtgaaagttggatggtaacgtttgttttccctttcagtggaaattcttgtgtattatatccaataaagctgactaccagcacatccttttgaggagaagccatcaaaataaacttaccatccagatctgtgacagttccactggtgggattacttttaagagtaacattcgctccaggtattccttcaccgctctcatcaaagacctgcccggtaatcttaacttttgcatcactttgctgctgactcttttcatcaccagtcattttctgttgcccatcttgcgaatatgctcctatcgcgacaaagcaagctagcagaaacaaataaaacttttcaattttcataaattattagattagttaatgataaatacttgttttccatttaaaagagattctttctcatttcattcataggcttttatattttagattcaacatttttcagattacatacagaaacgtctccgattaccaacctgcgtgctcttctttgttttcactccaatcggcacttcgcttcttttcgccggtatagttccattcaatctcgtcagtgtattcttttccattatatgttgcaacggttttaattgtattcttaccttgttccaaggttacatcatccaagacatagtgcacatccgtgtagccttggcgtatacccgtcagttcttttccattaagatacacttgcggtgtacctatgttagaataaacagtgacggaagtatgttttcgttcgcggtcgatgttgcgacgctgggtcaggtagagtacgggatctttgctccagttagctttataccagtaataggagtcttttttgattttccggtcaaaagtgatcaaccccttcaagttacgggcaggtacaccgccacggctccacatcggtacaccaaagtcaaacatattccaaagataagaagcgatgatatagggatgctttgcaatgacactccattggtattcatgtgtcttggtctgaaaagtttccggatagaaagactttccccagttcagagcatcacccagatattctgtctgatggtccagatttgcatcagcaccatattccgtcaacatcagtttctgccacgggtatttctcctccagcccttttatccaaggctcgatatcctgcaactttttctcataccatccgaagtagcggttcattccctgaatatccgcattttgattgaccggatgctctgcatggccataaccatttacagatacagtgtagcggtcaggatcctctgtcttggccagattatgcagagtttgtgtcagtcctgccgtatattcgtggggctggtatacttcattgtgcaatccccatacataaatggaagggtgattgaaactttgacgaatcagttcacgaagctgagactgtgcattttcggcttcatatcctgtcacccgattcacaaaaggaatctctgcccagatgaccaatcccaaagaatcgcaacgggaatacaggtaatccgactgttgatagtgggcgaaacggacagtagtcgctccgatatccataatctgagccaagtcgaaatcatgttctttgttggtaagcgcactacccaatccccaccaatcctgatgacgggttaccccatacatcgggtatttctcaccattcaagtagaaacctttgcctggcacaatctcatatctacgaacacccaatggctgtaccacctcatcaattacttttccgtccgccagtaagcgggaaataaccttatataaataagggtccttacgtccctgccacagatgcggtttattcagtttgaaggtagaaatgtaagtctgtgttccctgcggagtgagtaccaaaggaaggcgatgggaagtgaccttcttgccattctgcgtataaatggtattttcgagtaccaagtcagcaggagtaagacttccattgtccagcttcactttcactgtgatatcggcagagcgtttcgatacattcctttgagtaatatatacacccggagaggcacaatcggtaactgtaatgttattctgttcagtaataatcagccataccggacgatagatacctccgtaaaccccaaaaagattgtgatttaccggaatcacatcaggacgtgaagcattatccgcctttaccattatctcattctcagctcccagtttcaatgcggttccaatttcaaaagcaaaggcgctgtatgctccccggtgcattccgacaagtttaccgttgacatacacttctgtgttggcgcccacaccttcaaagcgaagaaatacacgcttccctttcaactcattgccaaagaattgtgttttcctgtaataaccaactccttcatagaaagcatcagcttttacctgcatatctttagcgttccaggtatgaggcaagtttacagtttcccagtccgcattccattgagcagcgaccttcaccgggtcctgtgaaaaaggcccgcgtttgaatagccatccttcattgaaagaggtcacttcccgggcagagagtgaaagaatctgcccgataagcgctgataaaatgagtatatatttaaacttcatagaatcgtttctttatcatttatgttaaagcatctcgataaatactttttgttcctttagctgcacgaactttaagctgaattacataaggttcacccggattctttttaggaacagatacgttatattcattgcgggttgtctcaacaacagtgatatcttcaccggtagtcagcaaagtggctttttctactgtaatgcctttcggagtctttacaatcaaccgttcactataaggctgattgaatactaccatataaacttcatcgtttttaccacgtgtataatatccccagtcttgtttttcaaatccggcataatcgcaagcataaacagcttttccgtaacgattcatccacttaccaatcgctgtagccattgctttctcttcgggacggaaatcaccatctgcctgaggcccgaagttgacaaccatgtttccacccatcgaaacagcgtgtacaatgcggtcaatgacttcaatcggagttttcacatagctcaatgaccagtctttgtgatatccccattgattttcgggtatagtcatgcaggcttcccagtcccactgtgtaactttgagatctttcaccggatcgggcaagcggcgttcgtaaccggattcgtagtcacccatcagacgaccattgctatcaaaatgacgctttcctttgtcatcagcacgcaagcggctattgatggtaacacccggaacgagttccttcaacatttgctctgcatgagctgtccaccaaccattctttttaatgctggcatcccacgtaccatcaaaccagaaatctttaacggtcgggtaacgtgttgccagttctttcagttgattgtcggtaaattcaaggaaacggctgaaggcgatactatcttcttttgattttatatcataacgataatccggattactccagtccatcactgagaaatagaagtgtacatcaattccttcgtcattataggctttcaccaactcgcctaatatatcacgcttatacggggtatttgctacagtatatttagtatacttactaggccacagacagaaaccttcatgatgtttcgttgtaatcttgacatacttagtacccatttctttggccatctttgcccatttctttgcatcgaatttcgtagggttccattggtccatcagtttcagccattcatcagcaggtacttttgcccagcttttcagccattcggcagctccgccatatacttttccgttccattctcccccggggatagcatacagtccccagtggatgaaagcacccagacggttgtcacggaacttctgcatggcagggtcttgccgtttaccttcattcgtagctccatatttcaaaggaatttccttctttgcttcttgagcaaacgttacagaactgacagtaatcaataataagagtaatgttattaatctgcttttcatgcgataaattattgtgtttttcatacttattttattgtctttgattctatgtattaaaacagaatgaaagcattgcaaaaataggagacctatatgacatccataaacacaaattttgcaaaaagaacatttctgcatccacatggaagatttggtcacctataatggaagatttggatacatcgcccttctttttctgcacaaatgatgttatccaacgtatagcaacctataggcagacattggggggattaatacctggtttgtcaggtattaacagctgatatatcaggtattaacaactgaattatcggatattaatagctgatatgccggatattaatacttgagaagtctggtaatgacacagctattcctttttactcctgactccttgcggagcaatcccgaagaaggctttaaaggatttgctgaaataacggggagaagaaaagccgagccgaacggaaatctctgttatatttagttccggatgctctgtcagcaaagacatagcttcatccagcttcactttcaagatgaactcattcggagttaacccggtcatttgtttaaactgcatatataatttgctacgtcccatacataattctgaagcaagcgcagtaacatcaaaatcagggttctcaaaattctccctgacaatatttacacatttcgtcagcagttctttatctttctcgttaatagcttccgctacaggagattccgtaatgaccttacccgcataatgtgcaatcagacgtttcttgttttttatcaagttattgcaacgggccaccaatacctttatattgaacggctttgttatataatcatccgctccgaacatcaaaccttctacaacatattccacagaagtctgtgctgtcaacagaacgacagaaatatgagaaagttctacattggtcttgattttatagcacaagtccttacctgacatctcaggcataatcacatcacttactatcagatccggttgtatctgttgcgccatctccagtccttcgcgtccattacacgcagtatatatattatacatcggtaagaatatatcttccagcatggacaatagttcggtattgtcatctaccaaaagaatcgtaggcttatcttcttcatctatatttttctgcgattcaggttcttttatctcttccgccatcaactgtccataagaagatacagaagtttccggaataatcagtgactcccgaccttccgtcacagccatctcttcatcactgaaatgtcggtttcctaaaggcagagacaagataaacttagtaccctcaccaacagtactttctacctcaatctttccatgatgcatactcataattccttttgccaacgccaatccgatgcctgtccccaaagtaaaagaagaggaagaagaggcattatccgtctgatagaaccggtcgaatatcttcgaaatatgttcaaccggaatcccaatacccgtatcacacactgaaactacggcctgtgaagcaactttccttacttctacagttatatttcccttattggatgtatacttaaaagcattcgacaataaattaaaaatcactttctgtaactgtattggatcaaaccagacagaaatcgtttcttctacagaatcaaagcgatatgtgatctcctttttttgtgcatattcataaaaacacatataaatctgacgagtaaaagtaaccaaattctgttcttcaactctgagtttcaaataaccctgctcctgtttgcgaaaatcgagcaactcggagatcaaattccgcatatgccaggcgtttttatatatacgctgaatacgattataaacggttgtgcccaaatccatttgcatcaatacttcaatttgccccagaataagcgttaatggagtacgaaattcatgagaaatattagtaaagaagcgcaattttacttgattgagttcttcaatcctctctttttcttttcgctcaaactccaatgaagacctcagagccgcctgccgtgttttaaaacgaacaaatgcgaccatcaatgcagtcagacaaaggacataaaacagatatgcccatatggtagcataaaaaggagcggaaacatgtatattcaagcagattgcatctttcaaactctccttattttccatcgaacgaactttgagcgtataatctccgggaggcagattggtgtaagtaaccgtagtgccggaagtctgggtccacactttatcgaagccatccagataatattcaaacaaacgattacggtcactattataattaaaagtagcaaattccactgttacgttattctgttgatagcttaaaaagatatccgacgttttcgccaatatctcagtcaggatgccggactcatcaccaggaactatttcttcattgaaaataaacaatttatcaaaattcaagaagcttttgacctgagattcataaaaggaccgctcttgaaacatagccaatccattggtaccacttatataaataatcccatttttgcttcgatataaagcggaccccaaattataagtctgacgaaacaagtgataagtctcttctgtaacctctttttcacgatcaaagatagaaagccctttcccatgcaaaacaagcagacaattatccctggcagactcgcagatataataacaataattactcggaagtactccattggtagttccgtaagacttgaaagcatcctgtttctcttgatacttgaatatccccgcgccaattgtactaaaataaatatctcctttattatcttcaaaaatatgcacggttttgtatcttcctaccgtcaacgtgtctttctcgctatccgccaaatattgagtcacttttgaagaagataaattgacgcacactatccctccgccaccaacagcaagccacatacgctgccggctatcgatcagaaacgtttcaaaagcatattcccgactgatcaatttctggacagacggatcatccgtaagcggtgagaatttctcggtcaccggatcaaaaaacaccggaccaccttgtgtcaacatcgcaatgccatccttatactcctgaatatcgttcacaatctcatgaggcaacgaggcagggtcaccggtaacatgatggagagtgtgtcccttgttcgattttaaatccagaacgaacaatcctcctaaatgagtccccgcatacaatcgattgttctcctttctataaaaaaccgacttgacattattactccctaatgtactctgatctcctttttgatacatatatcgggagaaaacgccagtatccccatgataacaattcagccctccaccttcagtacagatccacacatttcctgcactatcttcagtcattttaccgactaccggaaagctgagacagtcttcacgtaaaggttcggcacaataaaagctatgattattcttatcaggattgaatacattcactcctccataataagtcccgacccaaatattaccttgcatatctttatgaagagagagaatagaagtatggcttaaagaattcgaagaacttccataacgcgtataatgactccacgtatcagtaatcggatcgtaacaatcgattcccttgaacgtacctacccaaatatgcttaaaatcatcttccagcacgcatcggacctgattatcggataattcacccattcccgaatgactaacataagcggttgtctcccgatcgggagaaacacggtataatccgttccaggctcccacccatatatttccggaactatcacccaaaatacaattacccttatcaagggtaagtaaaatctcttgccgaagagggtcttcacgtgatattgcgaccaagtattttctggtaaccacccatacagtctctctgtctacatagagtgctcttcccacaaaacctttctgcacacgagcaaagaacgtcagctctgtaccctgtcccgtataataataaatgccgtctgcacaactcacccaaagtgtatctttcttacaaaacagtccatacacacctttctgtcgcagacaagtgaattgctccgtataaatatccagtttaatcagatcgtttcccgaacgaatatacattcttccgttcttatctccacataattcgttaatctcattattagtcagtccatgattactttccgaaggctggaatactcttacatccttaccgttgtatctattcagtccctcagtagttcccagccagactgcccctaactcatcctgataaattgatgggatacacacctgagataatccatcagatactcccaaatgcttaaaataatgattagtggcttccgccattaccatagataaaagacttaagagaaaggttattgttcttcgccacattttacacataattatattgcgggtagcaaaaatacaaaaaaaacataattattggttaagaatctctttaatttatacccttccagccgaaatgcagtttattcatttgacgattcttgctaaaatacagtcccacagtattttttcaaggaaaaatcaatggtgtttttaggttaaaaccatatctttgccacaaactaaaaagaataattggatgttaatcacatttacattccgcaaggatctcgttctgtaaataatctgtaagtcttcctctcattacagattatcccttacattttctccggcatattcatgtcagagttgatttctattttctaaaaaaataacaactattgtaggttcaaatggttttatgcatcccccgtatgcctccatttgacgtacacctaaaacattaaaaacaatgagtaacaataatacatctatacatgatttcgatttctctttcatatgtaactacttcaagctgctgaaacgtcaaggtcccggaagtccggaagccacacgcaaagctgtaagtttcatcaacgaactgaccgatgatgcaaagattgccgatatcggctgcggcacaggaggtcagacactgtttctggctgactacgtgaaaggacagattacgggcatagacctctttcccgattttatcgaaatattcaatgagaatgcggtgaaagccaattgcgccgacagagtaaaaggaatcaccggatcaatggataatctcccgtttcagaacgaggaactcgatctgatctggtccgaaggagcaatctacaatataggattcgaacgtgggatgaacgaatggaacaaatacctgaaaaaaggcggtttcatcgcagtgagcgaagcatcctggttcacttcggaacgccctgcggaaatagaagacttctggatggacgcctatccggaaatcagcgtgatcccgacatgtattgacaagatggaaagggccggatatactccaacagcccatttcatcctaccggagaactgctggacagaacattattttgccccacaagatgaagtacgggagacattcatgaaagaacacgcgggaaataaaactgcgatggatttcatgaaaggtcagcagtacgaacgaagtctgtatagtaaatataaagattactatggctacgtattctatataggacaaaaaagataatcattatctgccggagaagttggcaagataggacaactctccggctcttattattctttattttgcattaaaatggaaacgaaagaaataaataggcaggaatataaattacggatcgacaaagtgaccgaatatattcatcaaaacatagaccaacctctatcattgcataagatggcaggaatcgcgtgcttttctcctttccactttcatcgcgttttcacgtttctgacgggcgaaacaccaacggaatacatcaaacgcacccggattgaaaaagcagcgctgctactacagaatgacaggcaactgtctgcgaccgaaattgccggtcgttgtggtttcagcagtttatcactcctcagccgcaactttaaacaacatttcaatatcactatccgtgaatttcgttcacaggaataaacacctaaaaagacatggaaaatcagattctaatttttcggacctccatcacgaagagacgcgacatcaagctcatcggaagtctcctggcaaagttcccgcaaatcactcgatggaatgtagatttcgaggactgggagaaggtattaagaatcgagtgcagcaatatcaccgcactcgagatttcggaaacactccggaatagtcatatctttgctacggagctggaataagcagttgtttcagttcctccaccccttcagaagctcctttccgaaggacatgtatcgaacgggaagtatgtgtatccaccggcttcgggtctatcagatacacctctgctcctctcggtacataatgcagcaaacctgccgcaggatatacattgagcgatgtgccgatgataacgaatatatccgccttttctacatatcggacagctgtctcaatctccggcaccgcctctccgaaccagacaataaaaggacgcaactgagttccgtcaccagccttatcccccattttcacttcatactcttccggcttcagttcctttatataatgagggttatacgggtctctgctggaacagacctttgtcaactcaccatgcaagtgaatgatatggctgcttcctgcccgttcgtgcagattatctacattctgtgtgataaccgtcacattgaaattcttttccagctccgccagcagttcatgtccgcgattcggcttcacttccagcaattgtttccttcgtgcattatagaagttaatcaccaatgcaggatcacgctggtatccttcgggagtagctacctgctccacaggatatttatcccacaaaccgcccgcatcacgaaatgtgctgattccactttcggcactcatgcccgcacctgtcaatactaccagattcttcataaccgctcctccttattattaaaagatatacaaatgtaatcagaatcattgaataaaggaaaacttccgcccgcataatctaatcagacagatacaagaatttaatgctgcccatacaaaggcttactgccggtcatgcaaaaaactattcgtctgacagatgtgtttctttcgtctgacagttgtcagacgaaaaatcaacagttgtcagacgcaagttcaacagctgtcagacgaataaattccagcataaacgaacttaaacagtaagaacacaaagattaaatcttaggaatgaaggaattaattccttaaagaaaagagactaactttcacggatataagaatttttaaatactaaatgctaaatcattcaaataaaacgtgtacttttgcgattcataaatttgcaattgattgaaagctaaaaccatgaaggtgatatgcttcaatcttcaacaaaaacattatatggataaattcagttacgctattggcctcggaatcggtcaaaacttattaagcatgggtgcaaaaggcatcgccgtagatgactttgcacaagcaattaaagatgtattggaaggtaatcagacggctatcagccatcaggaagcccgcgaaatagtgaacaagtatttcgaagaactggaagctaagatgggcgctgccgccatcgaacaaggaaaagctttcctcgaagaaaataagaaaaagccgggcgtggttacgctgcccagcggactgcaatacgaagtgatcaacgaaggcacaggcaaaaaagcgaaagctaccgatcaggtaaaatgccactacgaaggcacactgatcgatggtacactgttcgacagctctatcaagcgcggagaaccggctgtattcggcgtcaatcaggtaatcccgggatgggtggaagcattacaactgatgcccgaaggttccaaatggaaactctatattccgtccgaccttgcttatggcgccagaggtgccggagaaatgattcctcctcacagcacattggtatttgaagtagaattactcgaagtattataaataaaaaatttcaaagcaaaatgaaaaaagttagtatttttatggcaatcgccgctgctgcaagtcttgcttcttgtacagctcaagctcctaaagcaaatctgaaaacagacatcgattcactgtcttactctatcggtatggctcagactcaaggtctgaaaggctatctgacaggccgtctggacgttgatactgcttacatggcagaattcatcaaaggtttgaacgaaggtgcaaacaagactagcaagaaagacatcgcttatatggcaggtcttcagatcggtcagcagatcagcaaccagatgatgaaaggtatcaaccaggaactgttcgctggtgactctaccaaaacgatcagcaaagacaacttcatggctggtttcatcgcaggtacactggaaaaaggtggcgtgatgactatggaagctgctcaggaatatactcgcacagctatggaaactatcaaagcgaaagctatggaagaaaaatacgctgacaataaagctgccggtgaaaaattccttgctgaaaacaaaactaaagaaggtgtgaaaactactgaaagcggattgcagtacaaagtaatcactgaaggtaaaggtgaaatccctgctgacacttgcaaagtgaaagtgaactataaaggtactttgatcgacggtacagaattcgacagctcttacaaacgtaacgagcctgctactttccgtgccaaccaagtaatcaaaggctggacagaagctctgactatgatgcctgtaggttctaaatgggaactttacatcccgcaagaactcgcttacggttcaagagaatcaggacagatcaaaccgttctctactctgattttcgaagttgagttggtaggtatcgaaaaagataagaaataagaaagtatctttctaaatagaaaaaggaaaggggtgcaaagtctttgcactccttttttttgctttttcctattttttttcccgtaaaagaagaataattaaaataaatctctatatttgcttactatttgataacaacaggaaattataatttattattatggaaaaaatagacaacctcgacaggcagattctagagattatttcacagaatgcccgcatccctttcaaagacgtagcagccgaatgcggagtgtcacgtgcagctatccatcaacgcgtacaaagactgattgacttgggcgtcatcgtaggctcaggctatcacgtaaacccgaagtcactaggttacagaacttgtacatacgtgggaatcaaactggaaaaaggttctatgtacaaatcagtggtggccgagttgcaaaagattccggaaattgtggaatgtcatttcactaccggtccttataccatgctgaccaaactctacgcatgcgacaacgaacatctgatggacttgctgaataacaaaatgcaagaaataccgggtgtggttgctacagaaacactgatttctctggaacagagtatcaaaaaagaaattcctatccgcgtagaaaaataacagaatggaattcctgaatgaatatcaccttgccgggttatttatcggaatttgtacctttttgattatcggcctttttcaccctgtcgtggtaaaggccgaatattattggggtaccaaatgctggtggatattcctgatactaggcatggcaggcgtcgcggcatcactgagcgtcgacaatgtcattctgtcttctctgttaggggtatttgccttctcctcgttttggaccatcaaagaggtctttgagcaggaagaccgggtgaaaaaaggctggttccccaagaacccgaaacgcaaatataagttctgagaagagaaagtattgtagttttttattgttaggacttgcatatttcaatagaaaatactacttttgtcaccgcatccagtaaacggatacaccggacttgtagctcagttggttagagcaacagactcataatctggaggtccctggttcaagcccaggctggtccacaaaaaaaatggttgtaacacaagttgttacaaccattttttatatccggcatcggggaccgaatctattacttcctctaatttttgcctcctttcagagaatttattccatgcccaaagtatatgagaatatactagttcccacaagattatgattttaaagatacggaagaggtaaataaaacgggcatcattaaagaaaccctagatagggactaactaaaaaggcaatagtatctccaattcccctccttcgggaaagaggggtggctgaaagccggggtggtaggtaaacaaggttatctctaatttactataaataaaagaattgcgtattcacctaccacctccccctacgggtactcctccttcccgaaggaggagagttaagatactaccgactttttagtcagccaaaaaaaatcccattttgaaaaccactcttggcaccaaaatgggataacacaaacaaaacaaacaatattggagcgattttcacaaacagcttccttttcttaatctatatttcataacacttattagttctctctaatgtgaaagtaatatttcaccgcaaaaatattatttctccattacatataaaaaatctatataattgtagttataaaaaataatttatttagatataaagatctatctaaaactattaagaataatttttaataatcaaataactctttatttatcagcaacatacaataaacaatcatttatactgaaacaaaaaacaatccataaaaacgaacattgactttcgcattcaaaacgcaaaagcgaagcaaacaacctaaaatatttcactttataaaatcacaatcccagcatcacaaacagagtaaactactcaacaagtttccattctgagatttaatttctatatttgggaaatgtccaacaagcacttatatatttatctatgaccgatactatttcatatcaatacgctgctccgtctgtgttacaacgttcgtctgatcaagacgaattatttctggcaaaatacagtgaaatagaaaagaaagaagctccctgtttcttttgggggaagttgacacaaccttatatgacggcacgctgcctcattgcgttgtccaacgtagtacaatccagttttaatctgactcctgcccagctttccatgctgaaagacccgattgtaacggcaggaaatgaacgtttacgcttcgaaggattttcgaattgtgcaggcgtatatgccagagtcgacgtactgcccgatggacacgacggagagtttctggagaacggaacaacgaatgttgacttcaatgccggtatgatttctgcattgggaagcatcagcaaacaagaaaaagtagtgatgtcagtcggacctaaggaggtagggctttacaataaaggtgaaaaagtaatagaacgcaaagtaccgctgcccgtaaaatggataaaggggctgaccacggtacagatttaccagtctgttgccgaacggatgtattctttcaatcgcatacagactttgcaactctttcagacactccccaaaggaaccgtgaaatgtgactattatttggtgatgcgcggacaaaaaccggccttttcaccggtgaaaagtctgaatgccgtttgtatcggaggagtacatcgtctgcgcctgctcgaacccctgttgccatttgccgacgagctgagagtctttgttcatccgacaatgcaatcgaccatctggcaactctatttcggtccggttcgtttcagcctttccctgtcgagggaatgttggcgcggattctcaggagaaggtgcggcattggacgctctgcttgaagacgtaccggagaaatggatagaagcgatggataaatacagttacgccaaccagcagttcaaccccactcttttcgctattgaggagcacattgatctcgataaggtggattctctgtccgcacgactggcagctatggggttactgggattcgacttggatgagaatagtttcttttatcgtcgcctgccttttaagacagagcgcatcctgagtctcaatccgcgtatgatggctgccgagaagctattggaagaagagaaagtggaaattatatcaaatgacggaaaccagacagaagcacgtgtcgctgggagcggaggagtaagacatacggttattctggacagggaaggtgagaaagaacgctgcacctgtacctggtttagcggcaatcagggagaacggggagcctgcaaacatattttggcagtaaagaaacttgtacaatggaagaactgaaacgcgagttggagaaattatccaaaacttatgtggatactccggagaaagaagaaaagatattgataccttttatcaaaaggttgttagaactttcagtgaaagaacggagaaaactcctgcccactatccgggaactgcaatggataaaaggcaagtttagtgaaactttttgcgatcatcaccgggcacgctttctgggtgccgtacagttcgtatgtggcaacaaacgagaaatggacctgggataccacatagacttcaacttactttgcaaattgctttctctttatactcccagttggctggcagagtatataaatgatgcggaaagttacttgaatttcaatatatcctacgaacagctcatgcagctgatagatatgggctatatgcaggaactctctccaaaacgtatcgcacaaatattgcccggttatatctgtatcagatcttccattcctaaagggaaagacacttttaacagcgatttactattaaaaagagaaatcaccctgaaagaacacatttggtatcttttcgaactggaatcatccattggttatcataatgaccgcgcccaaacagcctataaagaagggaccacctcacgggatgaaagctttagcgccgccttctatcgcttttctctcgacggacatctggacagaaaccggcttctgcgagcaacactttccaccttcaaccgaagttttaaaaaagacatggtaaattggtttgccggactctttgaagaattgcagccaagggttgaagaactcatatccctgcaagaggaaattatgcaagtgttcacctctccatacaccaaaccggtgaatgtgatgttacagcaattaaaaaagattgcttccgaaggcgaattccgctatcaggagtttatcgagcgtgcgactactcttttcttttccagccccaaaaactcactgcttactatttattccatttttgagcagatcgttgccgggcaccccgaaatgaaagaagcgtgttgcatcccactctgccaactattcctgaagaaagatgaaagcctgcaaaagaaagctgccagctttatatcaaagtacggagacgcatcctcttctacattgcaagaggcattgctatcttaccaacccgagatgttccagagcgtacaggatatacttgtttctttcatgaagcagcctgcggaagaagccggccttcccgaaacaaccttccaagaaaaggttcgtatttgttgggaagacaaccgcatcccgtttcctgccaataaagaagattttctgttccagctcagccgcctgttcgacatgaatgaaagttgggaaacagacacagcgattgccgccctcatcgccttccatcctcagttggatgaagaagatttcagccggatggagcctgtattccaacgggcagccaacatcattatcaatagttgggcggtatacgagaactttcttgccactttcctgctggaatatcaacgtttatggacacaaaaagacactgccaaccaaggattcctaagtaagctcttcacccgcctggaagaaagactcaaaggaatagacgcaaacagaggtgcctacgacgaacgtgctttcaaacgtcttgcagactggcaaccagcctacagcaatagaacttgttttgaacctatcaaacaattgtggctggaagtaatccgtaaaatccaaaaaggcgactcattacctttactctctactccgacacatagcccggcatacatccaggccaccgaacttgtacgacggctcgccgtttatcaggaagcgaatgcaaagccttgttcatgggattttcagctggccatagcacgctgcgctttagaagacaaggaagaagccattgctgtcgcccgacaattattaaataatgaatatctgcatctttgtctctttttattagataaagggacgcagcccgaaccaccgtacaatcatccatctgcctggcttgcagccggactggtgaaagagccggatactgaattcgaagcattcaaaaacttctcctgcaatacgctgccccacaattacctgacaggaaattatggctggaaagaaccggcacagaaagaaaatcaatatgcagcagatgtacgtctgctccagctcgatttctacaagtggcatgagtatgcagaacacaacagccaccagctttggcaagaacatctggtcatcaacagcagatacaatataggcgattccgactatatggaacgtctgttcagcttcttccccaaccagccggaaccactggttgcacaaatcatcaactgctacatggacttcagttcaccgcaggaagagagcaaacgcagtgtagccaatgctttacgtatgttattgtcttttcactgtccgctccgggagatgagtttactgttgctgggcggaggcctgctttttgttgacaaaaccgtccgttcatacgctgcggagctatgggtggaaggcatcgctaacaacagaatagacaatcaccggttaggagaaatagtagcacgaattatcaatatgggcattgttccgctaaaacgcttcaccacagaagtgtatgaaagcatatacaaacgaagcgcctttcacaatcaacaactggaagagttactcactgtattgatcggcggattgcccgacaatccggtcaccggacaaaaacagttactcgaactctacgcggaagtgcttcgcatgaacggccattgcgtaacggacgacaaagtccgcaaacgcctggaaatgtggaaaaagaatgctaatctgaaaaaagtagttactgcattagaaaggtgataagtaataggtaacaggtaataagtaataggtaatattgcttggtatcagttttttatcatttcaggtgatcttaattgatttaaagtagactaatttataaacacggatattgttatcatatatccttcaatcaaaattataaccatgactgcactagaaacacagcttaccgagatagtagaaaaagagcaagggcagaagatcattccttttctgcagaaactgacacaggaggagcggaagagcctcatcccttgcctcagccggttggaagaatactataataagtttgtccagctggaagaaaggacatatggtacgcgtgccacgtcgggccagcatcacattattgatcttgccgcccttgtgatatttcccctcaaggaatttcgcaaacacgaatgggggataaacacagcgcatctgaacgagatagccgcatggcatattcccacgtggctggacagttatttcgttgaaggtgaaggtaaggagttcggaggcttctacaatatggactatgagatattgatggactggatagaaaggggaattctcaccgtttccccctctccgcagacgatagcaggttatctggttaactatatccacactacccccgtattagaaaagcgggatattacaatcaacgagcacatctggtatttgtttgaatacgactgcggacaaaactggcacgccaatccggccaaaggatatccttattatacattccagcacttcaccgagaacggaaagttagaccgtatgcgtgtactgaaagagtctttgctggcaatcaaccggaacttcaacaagaacctgtgcagctggtttgccggtatgtttacggcactcaatcccagcgttcaagaacaactgacattgcagccggaaatgtttgccgcactatcttctccccatagccgtccaatcaatatcattctcggtcttctgaagaatctgtgcagccatccacggttcctgacagatgattttctggatcagaccactgtcctcttcgcttcggacgtaaaagctgtccatcaaaacacgctgggagttctcagcaaactggcgaaagagaaaaaagaatatcatgatgccatctgttgcgctgccacacaagggttgatgagtcgcgacgaatctactcagaacaagatagtgaaactgattcaaacatttggagaaacagagtcgcccacattgaaagaagcactctctgcttatgcagaaacaatgctgaccagcactaaaaaagagttggcagcttatctgaaagacaatgtttcagatgctttatctaccgataaagtcttgctgactactcttgacgagcaggcaaatgtcgcctccttcgactatgaaccgatgccacccatccttcgggaagacaaccggatacaggaaattacttccatcgaagacctgctatttctggccagccaaatactagattccaatgagctataccacttcgaccttttcctgaatgcgttggtagaatggaatgagcaactggaagcgaaacatatcacccaatggacacctgttcttcaacgtgcttataagttacttatcaatggcggaagttcacgcaacggaatatcggattctatgatggcaacgttccttatcgactatgcaaaactattaatcaagcgtttccccatagaagcaaaagaactgagcaccctacacgagaaaatggtgcagaaagacgaacttcagaaaggtcagtggagatatcgcaatctgcagaaaataaccatccgccagaagagtaataaaagaatggaatttcctattcacaaacaattactgtgccggacattagaccttttggaaagcaacgagaaccgacttcccatgctatccactcctacgcatatgcctgcatttattgaccccatagttctgataaaaagactcggacaatatcagcaggccaatgccgagccggacgatatggatatgcagatagccctgtcgaggatggcattgaatgattatccctcgcaagaccttccgactgtccttcaggaattggaaggggaataccaaaatttgttttccttcttgatgggagcaaaagatgcagttccacaagctcccttcgcccacccttcatggtggatgacagcaggattgatcaaatcaccggagacggtttatactgaattcaaagatttctcttatagcaaaagctcacgcgaatttctgacgggaaacttctcatggtggactttccaaacgcctcattcatatactgattatcacaacaaagtggtcaactggacatcttcaacccttagtttcaatgttccggaaggagagaacatccacatcgtcaacaaaggaaagtatgatgagagagtgaattatcactcgtatgacccgcatccgctactggtggaaatgtattcacagatagaacgttatgacgatatacaaaacgatctgccccgccttgtatggctagctcccaatacaccggaaccattgtttgtatggtgcatccgctgtgccatttatgatccgatgctaaatgaagtgagagaagttggtatcacccaagccactatagaggcacttcaccaattaaggcacgaatggcatgagacctcttatctgctggaagcgagttgtatgctggtagccgacaagacttcccgttcttatgccgccggaatatggacggaccgtgtcaacacaggatgtatagacagtgcacgtatcggcaggatactgggttcgcaccaacgtaccggatggggacctctgaaaagacttaccgacttgatacaacagcaaatgataaacgtcagcccactacacaaccgggaactggagctgctacttacatcactgattgccgaacttccggaacagcctgtcaaggaactgaagaagctgctggaaatatattcggaactgctgtctgtcaataacagcagagtaacggatgaacgtattctgcaactactcgaaatatggaagaatacggccaatctaaaaaaagtaatagtcagtatcaaccgctgaaaatccggataaatcacagaagaaggtgtgccggtattcagactatatttgcatatagggtatagttaccgttcatgcagggtatagtaacctaacatgcaggatatatatgtccaacgtacaggggatatatatccaacacgcagggcatatatgtccaacgcgcaggatatatagatccaacaaacagcgtaaaaaaggctttttattggtgctaaattcaaaaagaagtatctttggcacacaaaacccaaaggagtaatgatgatgctgaaatatagtttatctgtcttttgctttctgctggcagggtattcctgtgtaccggggcataaggagacgaagacatctgcaaaggtcgaaacaacgtgcacagactctatatgcgcaggacccggagatataagccccgaaggtacagcatccgactgtatatcctttgctcatgcggactccattgatgcagattctatttatacatccccctcgcagaaaaatgaatccgccagcacactggttccaaaacatcagaaaagcccgatggctctttacatggattctctgggactaataaatatagcggagctggacaacagcatcgccatcagcctaatgtacacaaaagcggataacttcaccggagaaattctttatgacaacctgtccgaagcctatctgcatcctcatgcggcgtatgccctcttaaaagcacaagaagcactgaaggcactgcatccatcttacagtctcattatttacgacgctgcacgtccgatgtccgtacagagaaaaatgtgggatgtggtcaaaggaacttccaaatacagatatgtctccaaccccaaccgtggaggcggacttcataattacggcctggcggtagacatcagcattcaggactcgctggggcgaccgttgcctatgggcacaaaggtcgatcatcttggagtagaagcgcacatcaccgaagaaggcgaactgatacgcaacggaaaaatcaccaaaacagaacgtcagaaccggatattattgaggaaagtaatgaaagccgccggattccgtgcattgcccagcgaatggtggcatttcaacttctgcagccgagaagaagcccggaagaaatacaacgtaataccataaacaagtccaccatataacgccgaatataaacaacctatgatgcaaatctcccccgaaacccagctctttatccgcgaacatcagacggatgatgtacgtgctctggccctgcaagcccgaaaatacccgaatgtagatatgccgaccgccatcacacagatagcaggaaggcaggttgccgccgaaaagattccatcatggagcgacatggatgatatatggtacccgaagcacctatcactggagcaatgctcgtcagaagtcaccgcccgctacaaagcaacccttttaaaaggtaactccctgacggacctgaccggaggattcggaatagactgtgctttccttgctgccaaattcaaatccgccatttacgtagaacgccagcaggaactctgcgagatagcagcacacaactttcccatcctgaacctaaaccatatcaacgtaaagaacgaggacggagtgagttatctgcaagctatgtctccggtagactgcatcttcctcgatcctgcccgccgcaacgagcacggaggaaagacggttgccatctcagactgtgaacccgatgtagccgaactggaagaactcttactgaacaaagcgggacaggtcatggtcaaactctcgcccatgctggacttgtcattggcactgaaagagttacaacacgtacaggaagtccacatcatatctgccaataatgaatgcaaagaattactactgatactcggacaagcatcggtagaagaaatatccatccattgcgtaaatctccctaccaaggggatacaggaagaacagcatttcgtattcacccgcgaacaggagcagtgcagcgaatgcaactataccaacgcactggaaaattatctctatgagccgaacgcttcactcctgaaagccggagctttccgcagcatcgcctccgcatttcctgttaaaaaactgcatcctaacagtcatctttatacttctgatgtgttggtcgagagctttcccggcagggctttccacatcattagtcaatgcagccttaataaaaaagaactaaaagaaagtctcggagacttgaaaaaagcaaatatcacagtacgtaactttccggctacggttgccgaactccgtaaacgaatcaaattgtcggaaggtggagacacttatctgtttgccagcaccttaaacaacgggcaaaaagtactgatccgctgtgagaaagcctgagtctgtaatagcattacaacacagccccttcctgcaccattacatcagtatatgaaataggaacgataaaaaaggataaggatcactcagctgtccttaaaatcccagactgaatttcccgaaaaataaatgagagtgtcaaaagtcaatagtaacgaaactggggctgacaaaaaagtcggcagtatcttaaatctcctccttcgggaaggaggagtacccgcagggggaggtggtaggtgaatacacaagctattgctactgacttttgacacccccattaatgagtaatattattaccgaagtgttacactcaatttattccccgaaggtatatccgaactattgccatacatgatttcatattttccgggcataatacgcatagtatttgtagtcggatcaaagaactcaaatgtagttggcaaaagatcaatagatacaacacaagtctctcccgccttcagcggtacccgacggaaagcgcgcaaactctttatcggcccttccgcatcatctactttgcggacatacacctgaataacttcagctccatcatacttccctgtattcttcacattgactttaaaattcaaatcctgtccggcagatatagttttcttattcaaacgtcctttggaaatatcgaaagtagtataactcaatccgtatccaaagggaaacaaaggaacttccgtcatatatctataggtacggttcttcatactgtaatcttcaaaatccggcaactggtccgtattcttataaaaagtaacgggcagttttccactcggattaaaatctccgaacagaacgtccgccacagccaatccgccagactgcccgggataccatgcctgcaagatagcatcacaagactccatctcaggaaccaatgcgactgccgatccggaacagttgacaaacaccaccttcttccctgctttcttcaatgctttcaggatatcacgctgcacttgcggtagttcaattgaagtacggtcgccgccagcaaatccgggactgttaacggaatacatctcttcgccttccaaactcggcgaaatgccacctgcgaaaataacaatatccgcttctttgactctatcgacaaccatctcaggtgaaatatgacgataaatacccaaatcaaatctaagcaatgcctccgcacctgcctgcatatattctattctgatcttataatctgttcccgcagtcgctttcagtgtatagtctcttttagcactggcatgttctccccaatagtcaatcaccttttcaccgttcacatatacccgatagccatcatctccttcaatcagcaactcataagctccactctctttcggacgaaaacttccttcataaacagcagtaaaattatataagcccacacctgtggcaaaggccgtattcccaccattactcagattaatcggagaagtaatctgacttgtagccgctacatcaccactcaaattcatattattccagtaggtagctgtcagaccgggacgcccattgttggagatctcattaaaataagattcaaaaatccgattatccagcaactcacatcctttctcaaaaggtacatcgcctatcttgcagcgaatcccttccaaaatagtatatgtatgtgagggtacaccttcatagtttccccattgcatcaccgaatcaaccgcattcggtcccatcactgcgatacgtgcccctgtttttgccaacggaagcacgccattattgcaaagcaataccatagatttacgtgccagatccaacgccatctgtttgtgcaaatcacaatccacagtatctatactaattctgctccagggaacaatagaatccggatccatctcgcccaaagcaaaacgggctttcaacaaacgatgcaaacttgtgtctatacgttcttctgtgattaatccctgctttactgcttcctccaaatgcgaatatatcgaaccacattcaagatcagttccattgatcacagcagaagcactggcatcggcagcatctttatgtgtctcatggcggcctttcacaaaaaaatcatcaatagcaccgcaatcacttacaaccaaatgtttatatccccattcatccctcaatatttgcgttaacaaccggttgctaccacaacagggctctccttccaggcgttgataagcgcacatcacttccttcacgtctgcctcttgcaccaaagccttgaaagccggaaggtaagtctcccatagatcacggggagagaggtcttctacatcaaaagagtgacgtttcgcctcaggaccactatgcactgcataatgcttgacacacgcatgagccttgtcatattcggcatctgccggcccctgcattccctttactacagctactcccatacgggtagtcagataagggtcttcgccgaaagtctcctgtccccttccccaacgcggatcacggaaaatattcacattcggattccaaaaagtaagcccttcgtttccatatccatagcgattacggcgatgggcatcgtggaatttagcacgtccttcatcactaacggcaacatacactctttcaattgcttcatcatcaaaggtagatgccatacccatagttatcggaaacactgtagccagtccattacgggcaacaccatgcaaagcctcactccaccaattatagggagctactcctaaccgttctaccgcaaaagaagaatttttcattaatcctattttctctttcaaagttaatctccctaataagtcttccgcacgctcttcgggagtaagtttcggattcttataaggttcattctgcgcgaagctgcccatcgacgcaacgatactcaaacttaaagttaacagtacttttttcattttgtccaaattaattaaagctttatttattatgttaccttgcaatttcacatcggaaaactacattctaatcattgctttcaaatacaataactatgatcggggaatgctgtctgatttatctgttcaaatggaaacgcctaacttgaaacagcgatgaatgataaatgtagtgcaaaaaaagctgctataccaaacttttttccaactatttttattactaaataatttttgcgaatcaaagcttattactatcagcctccaaacttgattatagccaaaagtacatgagtttctattacatcattaataatctgactacttcagaaagtctatctgaaaagaaaagaggctattgaaaatacagataaagtaacagcctgctaagaacagcaagaaagaagataagtatattccgacactatataaataatgagaaagaaggaatgtcttatttttataactaaaatgaaagaagcgacaatagaatctcccaacctcgcttcaccttatctttcaagaatttcaaggccttacccatatgtatttctacagtcttctgactaataccaagcctctcggctatctccttgtaactcaggttttcttcacggctcaacaagaaacactttctttgttgttcaggaagtgaattgattaaccgatcaatgaatatttttagttgagaagcgcaataatcttcctccacagtagtggagttataataaccttcgtttccataggctaccaaaacagaggttttgaaaagattctcatttactctcttcttatttttattaaatacgatgtttcgggtaacaataaagagaaaacctttgatattttcatcttccttcagtaaatgccttgattcccacaacttcacaaacacatcctgaacaatttcctctgcatcagcaattgtagcgatgtacaatcggctaaagtcataaacctgactccaatactcgttatacaaatctataaacgcttgatgatcaccgcccttaatagccaatactctttctctttcgttcatatttgtgcaaatattagtgacaacaaagctatacattatttgaaagatacaaaaataaaacacattttttttatatccgataggggtaaatgtaatatggggagtatttagtatgtaaccgaagtcaataacgatcattatcactaatatacaaagacgtgaattcaatagaactcattaatattataaaaaagatgttagccgacagactgacaacttccgaaagggaacagcttctcaatgagaagcctatggttaactttcagtctcaacaatgggataaagctcctaaagctcatatacaagatcatgttcccccgcacaccatactcaataagattatggtcagatgccggaacgaaaaacagcctttagagagaaacaagaaatactatcgtatcggatattccatcgctgccactgttgccatcttcattatcggcttttggattgccaacaatatttcatcatccgacattaatatcagtgctccaatgaatgataagctggcagtcatgttaccggacagttcggaagtatggctcaacgcagcttcccaaattcgctatcacaagtcattcctgaacaacagagaaatcttcctggaaaaaggagaagctttctttaaagtgaaaaaagctcagggagcacccttcagggtttatttccgggaatcgcatattgaagtgaccggaacggaattcaacatcaaagccggacacatggaatcagaaattaccctgttcaccggctccatcaaattccaggcagaagaaggacagcaagaactgccgatgaaaccgaacgaacgaatcgtatacaatacccaagccaaatcaattgtacgtacgcatatagatatcaacgagtatgactggcgctcaagtaaatatcgctttaccaacaagccattacaggaattcatcaattttatcaaccgttcataccatgtaaacatcataattaaagaagaaaagctcaaaaagctgaagttcaacggaaccatacataaagacgagccgcttaccaatatcatcgaaaagatatgtatcagcctcgatttaaaagagaaacaagaaaataacgacatcatattatattaatacattaaaaacaaattatctatatattcactattaaccttttagaaacatgaaaaacatgcattttagtaacagcatactcagatatgccgttctattgatttgcttccttccaatggctctctacgctcatggcgcacaaggaaagagaatcattctcaagggtcagtccatcaccatgcaacaggctattcagctgatcgaagaaaatagccagtacacattcttcttcaagtccggcgttgtcgccaatgacgagaaaaaggactacgattgcgaaggagacattaatgaagttttaagaaaagtattcagtaacagcggaattgactatgtcatcaagaataatgaaattatcttgaaaagcgcgaaagcagagactgttcagcaaaaaagtcagggaccgaaaaagtcggaaatcgtaggtgtggtagtcgacgccaatacaggtgaatccattatcggtgcttccgtacaaatcaaaggggctgctacaggagtaatcaccaacattgacggaaagttcacgatcatggctgctccttcggatgttattctcatttcttatgtaggatacacacccaaagaaatcaagatcggttcacgcaaagtgttatccatcgatttgaatgaagatgccaagcaattggaagaagtagtcatcacagcttatggtacaggacaaaagaaagccagtatggtaggctctgttgaatctattaaaccaactgaattaaaggtaccttctaccaatctgtctactgcatttgccggacgtctggctggtgttattgccgtccagaaaagtggtcagccgggagctgatggcgccaacttttggattcgcggtgtttcgaccatgaacggagtcaccgatccactaatcattctggatggtgtgcaggtaagttcaagtgacctgaataatcttgatcccgagattatcgatagtttctctatcctgaaagatgctaccgcaacagcgatgtacggtacccgtggtgccaacggtgtgatgattgtaaccaccaaatcgggtatgaatctggataagccgattatcaacttccgtatggaagcacaaatgtctcaaccgaccagtacccctaaattcgtagacggtgccacttacatggaacttttcaacgaggccgtaaacaatgacaatagcggtgacgtgctttacagccaagatagaattgacggaacacgtgccggattgaatccttatatctatccgaacgtaaattggtatgacgaattgtttaaagacgcttcttatagcgaaaagttcaactttaacatccgtggcggtggtaaacgtgtagactacttctccagcatctctgtcaaccacgaatccggtatgttgaagaatcgttcaaaggatttcttctcctataataacaatattgaaatcatgcgctataacttccagaataacatcaacgccaaattgagcaattcttctaagttgtccttgcgcctgaacgtacagttgcgtgacatgactactcctaaccagggagtaggagccatctttaccaatgccatgaatacatcacctgttgaattcccggtatattttccggatgacggtgaaacaccttatattaaatggggagctacagaacgtgtcaacgccgactatcagaccaacccggtggctcaggctgctacaggctacaacaaaggattccaaagcacagtcattgcagcactggaatttaaccagaagttggatttcatcaccgaaggtctgagtttcaaagcactggcttcattcaagaactggtcgagttccgagaacaaacgtgaagggaagtggaacaaattcgcactgaccggatacgaagacgatggcaatggtggctacacctacacaacaagccgtattggagacgaatatacgacaaacctgaccgcaaagaatacaaattccggtgaccgccgtttctatttggaaggaatggtcaattacagccgtacattcggtgaacatgacgtcaatgcgatgctaatctatagccaggacgaacttgtaaacaacacaccgggcgatgggaactttatcggttcattgcctcaacgcaaacaaggtcttgcagcacgcgcctcctacgcttatgccggaaagtatatggctgaagtgaacgtaggatacaatgggtcggaaaactttgccaaaggacaccgtttcggtctgttcccttccattgccgcaggttataacatcagcgaagaatctttcttcaaacctttgaaaaatgttgtttctaaattgaagctacgtggttcgtggggtctggtaggtaatgaccagattaacggcagccgttttatctacatgtcacaaattgacctgggcggcaaaggatttacaacaggtgtcaatcagaatgtgacctacaatggtcccgtttatcaacgttatgccaatgaagatattacatgggaggtaggagagaaaattaactttggagtcgatttacaattgttccactctctggacctgacttttgatatcttccgcgaaaatcgtcgcgacatcttccaggagaaagggaccactccgacatatatgggtacagctaccactaaagtatacggcaacctggcagctatgcgcaatcagggatttgaattagcagccagctataacaagcagttcaacaaaaactggttcgtcagcttcaaaggaactttcacatatgcgcataatgaaatcacccaatatgatgaatcaccgaaatatccatggcagtcaaaaatcggagtcagtgccaataagaatgccatttatatttctgacggactcttcattgatgcagcagatattgccaaccaccaacaacaattgggagcggcagtgattccgggagatatcaaatatatcaatatttcaagagactggtacggatatgatgataacctgacagatacagacgactgggtatgggcaaaacatcccggcgtaccggagattgtatatggcttcggtccctctattaaatggaagaatctggatttctccttcttctttcagggagtagccaaaacctccttcatggtaaaagatttccatcccttcggtgacagtatgctacgcaacgtactttcatgggtggcagacgaacgctggagtcccgacaatcaaaacaccaatgcgacttacccgcgcttgtcacgcaaaaccaataacaataacaacaagttgtccagctattgggagcgtaacggtgccttcctgaaattaaagaatgctgagatcggatatacctataagaatatgcgtttatacatcagcggttctaatctgatgacctttgctccgttcgatctgtgggatcctgaacagggtggtggcagtggtctttcatatccgacccagcgcgtattcaacattggattccaaatgactattaacaacaaataataccttaaagatatgaaaaagaatacactatatctatttatcctcttattgattacagggctgaatacttcctgtaactatctggatatcgttcccgacgaaacagccacggaaaaggatgcctttgccaatccccgtgctgcactgcgatatttatattcctgctacggatatctgcctcagtcaaacatggttcagtcatgtatggactttaccggtgacgaaacgatcagcccgtttgccgaaagttacgtaaaattcgctgaaggttcttatgactcaagcaatacaattatcagttattggaatacactgttccagggaatacgtcaatgctatttgctgaaagagaacatcaactccgtacctaaaatcagccagaatgaaatcgatctttacacggcagaagccgacttcctgatcgcctatttccacctccttctgatcaaatgctacggaccgaccatcttggtgaaagaacttccggcactcgacactcccgcagataatatgctcggacgtcgtccgtacgacgaatgtatcgactgggttgccgacttacttgacgatgcagccaccagacttcctgccacacgcaatagttcggattatgggcgtgccacgagcgtcattgccaaaagcttaaaagcacgtatgttgctttatgccgcttcaccattattcaatgggaaccctgattacacagactttaagaacccggacggcgaacagctcatgtcgaccacttattcggaagaaaaatacaaacgtgcagcagatgcaacatgggatgccattcaggctgcatcaggagccggtcacgagctctatatagccagtactacaagtaatgcttatccggaaccgaccaacctgacagaacgcacacttcgtatgactttcatggatagcgaaaactacaaagaagtcattttccccgaaacccgtaaagcaggtgcttatggtattcaacgtaaatccatacctttcttcccacgtggctcgtggaatggtatagcccccactattaccatgctcgaccgcttctacacagtcaatggattaccgattgacgaagaccccgaattcaatacaaacaacaaactggatatcgtaaccatccctgaaggcactacctatgccgaaccgggaaaaagaacattatacatgaacatgaaccgcgaaccccgattctatgcgtgggttgcatttgagaacggttattatgaatgtcgtacagacgataaaagatatgcttatcacaaattctggggtgctgagcgttctgaaggagacaagtggttgaccggatttctggcaacagaaaactgcggtgtcagagccgatgacggaaagatagtcactgcggcacgctctcagaactactccaaaacaggatacctgaacaaaaaaggtgtacacccagggatacaagctaccgttggtacccccggaccaacggtagaatatccatggcctgtgatacgtctcgccgaactttacctgaactatgccgaagcctgcgtaggatatggtaaagaaggatatcccgaaaaaggaatggcttatctggacaaagtacgcgaacgcgccggactaaaaccggtactggaaagctgggcaaatgccaaagttcctttgacaagctatgacggccaatgcggtcccgacggcagagtgatgaaaatcgtcagacaggaacgtatgatcgagctttatcaggagaatcataatttctgggacatccgccgctggaaaatgggagaaacttatttcaatgtcaaggcacgtggtctgaacattcttgccgagacaatggaagacttcgccaagattgtggagatacaggacaagcgtacattcgatgcaccccgtcagtatctgatgcctattccggcaggtgaagtaagcaagaacccgaacatggtgcagaatccgggctactaatcaatgatgaataacaattattaaaaacaatctgatcatgaaaaagatacttataacgatatgtcttatcggaggattagccatgctctggtcttgcagcgatgacaaagattcctatccggtacccagcgacatcgaaaatctaaaagcgactcccgctccgggacagattaccctgagctggaccaaccctgccgatgaaaacttatattatgtacagatagaatatacaatcggagccacaggaaagtcatacagaaaacaagtcagccaatacgccagcgaattggtaatagacaatctgctccaaaagtacggtgaaatagactttactgtacaagccttcaatcgtggcaatacggcagggcccagccaccaaataacggctcaggcagaaaaagccaaccctactttcggcactcccgtaaagatagatctggactataagaaaatatggacgaatgctccatttcctacccgtccgataaaagacctggtagacggaaatatagcaaccttcttccactcgtggtggagctcactagtggaaatgccacattatctggtagtagatttaggcgaagaagtcagcgctattaaattccgttcgactaataccaaccgtgcgaacgatagttcatggaaaacgatcaacttatatacaagtgatagttataatccagcagaatggtttgatggcgtcgagaaaattgatggcaatacagtggatatctcacaggcaggcacccacaaggaaactaccttaacagggcttcctaacggagtgagcgaagtgtataactcggagataattccgctgtcaaaaccttcccgctatctttggttcgaagtgacagagaccacgaagggaaccccttattttgctttaggagaactagaaatctatcaatgttcaatggtcgtactcgaataaaaaaagaatgaagaaatatatactgcttttctttctattatcgttgctgccatgcctgtctacggcatgctctgacgatgacggctcttcaacccccaatttaaccgttggaaaagagacagttgatttcaatagtgagtccggtagccagaatgtagctgttactaccaatgtggatatctggaccgtcaaatcagataaaaattggtgccacccgtctgcagacgggaaggcactgaaaatatctgtagacgaaagtgacgaacgatacgtgcgcaaagcaaccgttaccgttatagctgccgaccagacaaagacaatcacagtacgccagttgggatacgaagcagccattttggttgaccagcccagctttgaggtaggtgttatcggtggagaaatccagtttaacgtgacgacaaatgtagaagtagccatcactttgccggaatggattaccgcaaaacctgccagccgtgcaccggccacagtcaccaccccccatagatatatggtgaaagcgaccggacttgacagtcaacgtcatggcaacattgaaataacagaagtattaccgactatcgatcccgatacggaacaggcagaacctgtaagcgcattcgtatttgttacccagaaaggtctcaacgaatttgccgaaggcaatggagaggacgtaaaaggtgatatcaaaatcaaaatagtgagcgggacggcttcttcttttcaacccggcagcaacatcgaaaagtcttttgacggagattattcgacactttatcattccagttggagtaatggtgcaagcaactatttccccatcacattaacctataattttgaaacagtcacagatgtcgattatttgatatatcatccgcgcaacaacggaaataatggtagacttaaagatacagaaatacaatattcagcagacggtcacacattcacaaaactattggataaagattttcaaggttcagctacggcaggcaaagtaacatttgatcaaacgatacaggcaaagtctttccgtttcatcgtaaaaagcggttccggcgacggacaaggatttgcttcatgcgccgagatggagttctttgcaaagaatcccgtgaactttgattattcgaccctcttcacagatgcaagttgcagtgaactgaaaaccggtattacggaagatgacatagcgcagtgcgaatacccgttctttaaaaatatagcctactatatgattaaaggcaagtatcccgcagaattccgtatcagcgagttcaaggcatatcccaatccggatatccagtcggaaacccataagaccaacccttacagtcagttggacaatccgaccggaatatcggtcaaggcaggtgaaaacctgattgtgttggtgggagacacacacggatatgacatcggactgcgggtacagaatctggatgcaccagagaatgacggttttggcggagtaacctacttactgaatcagggaatcaacaagcttactatcagcgaacaaggactggtgtacgtgatgtacgtcacaaaaacgctggacgatccagcagcggcccctgtcaaaatccattttgcatcgggaaaagtgaacggctacttcgactcgcaaaacccggagcataacggacgctggtcggaactgctcaacaaagcaaccaactggtattttgacgtactggggaaatatgcccacctcactttcgagacgagtgacctccggacatacacaggttccaagggagatgaactgatagacctttatgacaagatcgtgtacagcgagcagcagctgctgggattggagaaatacgacaagatgttcagaaaccggatgtatctgaatgtcatgtataagtcctatatgtacgccacagcctatcacacagcctacaaccgaacaacaatgaatgaaatctgtagtccggaaaagctaaagacaagcgcttgctggggaccggcacacgagataggacattgcaatcagacccgtccgggagtattgtggggcggcaacacggaagtgacgaacaacatcatgtccgagtacatacagaccaccattttcggccagccctcccgcatacaggtcgaagacatgggaatcacctaccgaaacagatactccaaagcatggagtgggattatcgccaccggaagcccgcacgccgacttccagaatctgggaaagaataatgccaacgatgtattctgtaagctcgttcccttctggcaactggaactctatttcgggaaagtactgggcaggactccattgcaacagacggacaaaggaggtttttatccggaggtatatgaatacgcccgtaataaagactacaccggaatgactcatggagaaattcagctcgactttgtgtatgcctgctccaagatttccggtatgaacttactcgacttcttcactaaatggggattcctgactccggtagacaaagaactggacgactacgggaaaaagcagctgaccgtgacacaagacatgatagacgctctcaaacagaaagtgaacgcactgggaggcacccgtccggatgtcgctctagaatacatctcagataatacgtacgaactgtataaaacgaaacccgccatcatcaaaggagagaatgccactcatgctcccaagacatttacggtaggttccggcgacaatgcggtgacttacaacggtgagaccatcacgatcaagaactggaccaatgtagtgacgtacgaagtgaaagatgaaaccgacaaattcatcctcatctgcagcggcgaaaatgccccttcgtctgtagatacattcaccattccggttcgctggaaagatggtttccggttaagcgccgtttccgttacgggcgaacgtatcgacattccaatgaattgatcgtatctcagatacattcaagataactttttatcgggttaggtatcgaagggtgtccgcaggcgggcgcccttcttgcgtaacacaatcgtagcatatttgttacgcgttcttcaatcaactgtaaaaagcaagaaacgtcaaacctctacttttgcagcaaataattaacgcacgctaacatttatgaaacgatttctcagattagtctctttgactcttttaatcatgagtacaagcggaaatacttttgcagaggaaaaagtaaacgtagcccgacagggtacgatccgcggacgcatagtagacacttccaagcaaattcttccgggagcctccatctacatcgaaaaactacataccggagtgacaagtgatgtcaacggttattatacattcgccaatctcacaccgggcacatacaccgtgaaagtcagctacgtaggctactctcccgtcgaaatgaaaatcaccattccggcaggaaagacactcgaaaaggacgtcgtactcaatgaagggctcgaactgcaggaagtagtggtaggcggcgccttccagggacaacgccgcgccatcaactcacaaaagaacaacctcggaatcaccaatgtcgtttcagccgatcaggtcggaaagttccccgattccaatatcggcgatgccctcaaacgtatcaacggtattaatgtacaatacgaccagggggaagctcgcttcggacaagtccgcggtacctccgccgacctcagttccgtgaccatcaacggcaaccgcctcccttctgccgaaggcgatacccgtaatgtccagctcgacctcatccccgcagacatggtgcagacaatcgaagtgaacaaagtcgttacctcggatatggacggagatgccatcggcggctccatcaatctggtgacaaaaagcactccttacaaacggatgttcagcgccacagcaggaaccggctacaactggatcagccagaaagcacagttgaacttaggatttacctacggcgaccgtttcttcaatgacaaactgggaatgatggccgccatctcttatcagaacgctccgtcaggatcggacgatgtggagtttgaatatgacgtcaacaaaaaaggcgaagtagtcatggtggaagcacagaaacgccagtactacgtaacccgcgaacgccaaagctactcactggctttcgactacgacatcaacccgaaccaccggctgacgctgcaaggtatctacaaccgtcgccacgactgggaaaaccgctaccgcgtcacctataaggatttggataagacaggactagacgacgaaggagatatgcagcaatccgcccagatcgagacaaaaggaggaacacccgacaacagaaatgcccgtctggaattacaacagacaatggacctcagtctgagcggtgaacatcagttcggaaagctgtccgtcaactggggagcttcctacgcccgtgccagcgaagaccgtccgaacgaaagatacttcagcctgaaacaggacttcctcggctttaccgtcgtagatgccggcgaccgtttcccttacgtgactacggacgtcaacttgcacaacggagaagcggacggcgaaaggggcaaatggaaagtgaaggaactgaccgaaagcaaccaggaaatctacgaaaaagaccttaagttcaaagtcgacttcgaacttccgctgacaaacggtatctatggtaacagcctgcggttcggagcaaagtacgcctccaagaccaaagaccgcaacaccctttgctatgattacgcagatgcgtacaaggacgctttcgacaaggattacatgaacaacctcaccagccagattcgtgacggatatatgccgggaaatcaatataagccgaccgatttcgtatccaaagaatacctgggttcactcgacctcagcagtatggaaggcgaacaggtactcgaagaatcctccggcaactaccacgcccgtgagaacgtaacttccgccttcttccgcttcgaccagaacttgggaaagaagataaaaatgatggcaggcttacgcatggaagccacccacatcaaatacaacggctggaactggaacgtagccgacgacaaagacgagacagaaactctcgaacctaccggaaaccataagaacagctatgtcaactggctccccagcctcttgttcaaatacgatgtgaacgacgacttaaagctccgcacttcgttcaccgagacactgagccgcccgaaatactctgcattgatcccctgtgtcaacatcaaccgcagcgacaacgaactggtgatgggtaactccgacctgaccccgaccatctcctacaacctcgacctcagcgcagactactacttcaaaagtgtcggtctgatcagcgcaggtattttctacaaaaagatcaatgactttatcgtcgatcaggttatcggtgactacacctatcagaacaacgaatacaagaagttcacccaacccaaaaacgccggcgacgccgacctgctgggcgtagaactggcctatcaacgcgacttcggcttcatcgcccccgcactgaaatgtatcggtttctatggtacgtacacctacacccacacccaagtgaacaacttcaacttcgaaggtcgtgagaacgagaaagacctgtccctgccaggatcacccgaacatacagccaatgcttccctttacttcgaaaagaaaggcttcaacgtacgcttctcctacaactacgcttcgagcttcatcgacgaaatgggagaagtggcagccctcgaccgttactatgacgcagtgagctacatggacctgaacgccagctacaccttcggcaagaagataaagaccacgttctatgcagacgccaccaacctgctgaaccagcctcttcgttactatcagggaaccaaagaccgcaccatgcaggcggagtactacggtgtaaagattaatgccggcgtaaaagttaacttctgacaatgcgaaaagcgaaaacctccgttcctaagaatggaacgccccgttggttttaaaggaacggggtcttggttttaaaccaacgcctcgttcctttaaaaccaaaagaacagagaatttcagtctttcaataacggcaattataaacaactaataatcaatataatatgaagataaaaagcttattcattcttctttttctttccgtctttacattcgctcacgcacagctcacggattattccatctttgacaagaagtttaacttctatgtagccaatgatttaggtcgcaacggctactatgaccaaaagccaatcgccgaactgatgggcacaatgggcgaagagataggccccgaatttgtattagccaccggagacgttcaccacttcgacggagtgcgcagcgtgaacgaccctttgtggatgaccaactacgagcttatctactcccaccccgaactgatgatcgactggttctccatcttaggcaaccacgaatatcgcggaaacactcaggcagtactggactacacgaacatcagccgccgctggtcgatgcccgaccgttactacaccaaggtattcgaagaaaaaggagctactatccgcatcgtctggatagacaccactccgctgattgataaataccgcaacgaaagcgataaatatccggatgcctacaagcaggacatcagcaaacagctgttatggctggaatctgtgctggcaagcgccaaggaagactggatcatcgtggctggtcaccaccccatctatgcctacactccgaaagaagaaagcgagcggcttgacatgcagaaacgcgtagacagcattctgcgcaagcacaacgtagatatgtacatctgcggtcatatccacaacttccagcatatccgtgtaccgggaagcgatattgactatgtggtcaactccgccgcctccctcgcacgcaaggtagaacccatcgaaggtacaaaattctgcagtcccgaaccgggtttctccgtttgctctatcgacaagaaggagcttaatctgcgtatgatagataaaaagggaaatgtactttatacagtgacccgaaagaaataagttctctattaaagaaaaaaattctactctcagaaaaaacacacacgacaaagggcgtctccttcgcgatgaagggggcgccctgatttattatagtaatcctttattcagagatcattttgcaatatttcgagttacagtacatactctcgtaggaaattacttttataataggcaatcagctacaacacggacttcaagtccagaacttacaataggacacgatgcggataatcatttattttaattttagcacccgttaatattgttttaaatatttaacaatgagtattatcgctggggtgcgctacgataaaagtcattgttttgtagtttgaagacttgttggcaattactaaaatgttgtattgatcttggtacgacatgtaatatcatctcttcatgtggtccaggcttatctataactctttttacaattcacccaatattggaaacaagcccaaaaggtatgtttttatcaattaaaatccgcaaacacaaaaacattattactttcctcattttcaagaagtgaagcaaccagttctttgagtttaccactgagcttgtttttgtaatatgcttcttcgagttcagcaaaatccagttcaaagtggtatgcatgttcataataattaaaaagccggggattgatatacaactcttttccttcaaaatcggaaagagttattttttggcgaaacagttctcctgttgctttgttgcgcatataatactttggtgtcggagatttccctgtttcccgataagggtaaaccgctataaactgatattttcccgcatccatgcagatatccataaccgtcattgggttttgactgctcaatattggttttttgtgcatatatggagttaaatgcttttctttgctgtaatgaaaaacggtgtcggattcgggattgtataaaagtaatccgtcagccgactttctcacacgtccgtaattcacctgactagtaaatacactgtttttataactcagatctatattttcgtttggtagtgagatataatccagcactgtaccatccaatttggaaataagaaagaaaactgaatcaatggtttgttctacttctggggcattgctttgcatggtagattgccacaatttcgtgttatcatacaccaatatggacacatcgtcaaacaaagccatttgtccgttaacattcacctgaggtaaatttattttccttttgaattcacccaatgatgaatagaccataatatgattgctaaagtcgggcgaaacaaacacttcatcatttgcctcatcatacattagcgaagctgcatcgctgtattcttccggtccctgtcccctacggttaaaatgtgatttgggatttccctcttttgagaaaaacagcacgctgttctgagagcggtctataacaataatattgttttcggttacataatcaatgctgcctttatagagataatcatcagtttttgaattgaggtgcagataagagacacccgcaatatcggtgagctcaattttcttttcgggatattcttcggtgacatcaataaatgccagtttctcttgcagttcgttattagaggtgcaacttgcaattacaagtgataagactaaatagaatacttttctcatattcgtaatatctaaaaattgtgctaagttagtcttttttctattattacgtttgaagcaatcataaatattccagcatatacacgaaaacatgaaataagagtagactaatcagcaatcaaaagtaacggtagacagacttgtatatccccaaatatacagctgggaatatttattacttatagatgatgagcctatattactctgatttattactctgattagcagtatccgcaggtttactcttgcttagatcatccttgggaatcgttgtttcattcccatcacggacagccatgtaatgcggagacataatctcgattcccgcttcattaaacttatcctgaaagtctggtgcaaatcagaataaatctgcgccatcttatgcgcctctttgatataagcattaatctgatacaccggataccagtcactcaacgaagtttccagcacaaacgggcgcggatcatccaccactccgggggtattcaatgcagcatcaatcagtatctgattgacctgacgccagggaacatcataaccgatggatacctccgaatggataatcaagccatactcccgtgccgatgtactataattcaccgtatgagaggacataataaaagaattgggcaccgtcaccacctcatttttcggagtgcggatacgggtgacaagcggcgtcttctctataatatcgccggtggtatcgttcagtttaatccggtcgcccatcttgaacgggcgcatataagtaatcaccagtccggcaataatattgccgataacggtactcgatccgagcgaaacaatcaatccgacaaagaccgaaatgccctgaaatacacccgatttagagcctggcagataagggtaaatcattgcaatcataaacgcgtagagcaggaaccggacgatgtggaaggtcggcattgcccaatccggatagaaaccattgaatttgagacgccccgcctctatctcacgagccagataaagcaccatacgtaccagatacttcaccgcataccagataacaacaattgtaaacagattggggatatagtctataatatccacaaagatattccgaatcggattccagatataacctagtaagcgataggctaatccttcggtctgcgggaagatgataaaaatcagcgggacagtgattaccaactgtatccccataaggatataacgcccgatgccggcaaggaagaccaagagattggcttgtttctgggcatccagcaactcgtatccctggatagacacaggctttatcttcgtatctttcagacgcaggatgcgtactttcagtttgcggaacagccagttggtcagacggaaaaggagatactggccgacaatcaccagcaggaaataaaggatacgtttcgccatccgccacacgctatgttccgctttcatctcatgcagtttggtgatcacattctgccgcctctccttggcaagggagtcacgggagactccttcccacaaagcatcctggtctgtaagagacagcaataccttgttgccatacatcaggtcggaaacaatatccgaatggtcgatggagacggaatcgggacggagattaaaacgctttcctatctcttcgatagcggcaccagtcatctgtgcccgttgctggggagcgtatccgccgcgttttgtaaaaagataaaacagggtatcaccttcggcaatgacgggtactcctttcgtgaactgacgcaaagagtcgatacgctgccgttgctgggataatttcaccgaatcggctgccattgtctgaagcctcatctgctccatctccatgcgcatattggcttcattgagccgggcctcttccagggatttctgcaaatttgccacacgggcagaatctgaatcccggcgcaaggaggttggatgcgttgctactgtatctccggcaaagatcttcttgactgcctgctccagttgcgcctgtacattcaccgcaaaggatgccatgatcagcagtagcgcaaaccgttttatttttttcatatccatatagaatgattccagtttgtgaatgaaatataaattcacttttcattaaacatagcaaacatacggattgtttttgacataacaacttccaaaatgattatctttgccaccaaaagagaaaaattatgaatatactgttcctcatcggaggattaatcctcattcttctaggagctaacggactgacagacggtgctgcttccgtagccaaacgtttccgcataccttctattgtcatcggactaaccattgttgccttcggcacgtccgctccggaactgacggtgagtgtctcttctgctctgaaaggaagcgcagatattgctataggtaatgtagtaggaagtaacattttcaatacactgatgatcgtgggatgtacggcactgttcgctccgattgtcatcacccggaataccttacgaaaggagattccgctctgtatcctttcgtctttggtgttactgatatgcgccaatgacatattcctggactatgccacagaaaatatactgaacagagtagacggtttgcttttactctgcttcttcgctatcttcatgggatatacgtttgctatcgcttctccccaatcttctcctacaccggaaccggcaggacatgaacacacggcaccggaagaagagatcaagctactttcgtggtggaaatccattctctatatcattggcggactggcagcactcatctatggaggtcagctgttcgtcaacggagctacagggattgcccgcagcatgggagtcagcgaatccattatcggattaacgctggtagccggaggaacttccctgccggagcttgccacttccatcgtcgccgcactgaaaaagaatccggaaatggctatcggaaatgtaatcggcagtaatctcttcaatatcttctttgtattggggtgcagcgccagtatcactcccctccatcttagcggaattacaaacttcgacctgttcacactggtaggttccagcattctgctctggctgttcgggctgttctttgccaagcggaccattacacggatagaaggaagcattatgatactttgctatgtagcgtatacggtggtactgatttataattcttaataaagtaatccatacccaacaataaaaggctaccggtaatcatacccgaagcctttcacttttatcatagaaacaaatcatttattccacttcaaccgcagtcaatacattcacgccatactttccatccttagaaatccaccagtccgtatccccattggcacaatggatggcataacgaggattatatctgagtctgtccgatccgtccggtatccacagacctaacttataagttccggcagtcaccgaggcagggagttcaagagatacatccactgtatgcatcagcgaagtataagcagaatcctttggttcgaacggttgccagttctttggattggcatcggtcggaaattccgtaacctctcctgcatcatcaatcaatacaaaataaacaggatgttcaccaaatacggtggcaaaacctctgttcttcaagctcagtttcaagacgttctcctttccactcacgaatttggagggaagctgaagtgattgcagctcaatccggtaacccagatgatcacgtatataatcgaacatattgcgttttaccttcgttccgtctttcttccggaagtaactgtcggacaccggcatatgatgctggagaagggagtcttccgttatcatcgttttcttccagaccaccatggaatattcgggcggattattctcgtcaaaccggttgttgggatgttgctccttataattatgtatgatacttagcgaagtataatgctggaggaataaacgtctcgccgcctgcataccgtcaataatccatccggcagaaggactgtccggatcagcgcccacgctccagaatccccagggcagttcaccgtctactacgaggtaaggagattccgccactatctgatcgaacttcggtgtcccttcgtgcatatcggcatcccatctgtcggggcgtatgacaatgaagtcatcatggaaagaaagtctcttataaagttccggtttatctttcagcaggttcttaaattccgggagtctgacttgtacatttctctccgcaggaaccacagaaagcagtttttccaatacggcagcctttgtttcttccgagttttccagtccctgaaccgaactgtgccattcgccccacgcgccaatcattccggcttgtacgaccagaatcaagtctttatttttctccaggaaaggttttaattgatccaagtgcgccagtatctgttcgccggtaggaccgacaggcgaccgtcccataaagtcgcgttcgtaggcaaagcgcagtacggccttttttccttgcttttgcagttcatcaaaatatgcctgcatggtccggaagttttcttcagacagctctttacctattaaataagtcagataaaagtagctctgtgagagtgaaacactatctgctacatacttagcagacaattcattcagttcttcggtaggagtgtctttttcgtgcagcacatccaccgcggtttccagccggaatcccctgcccgggttatataatccattttctccctgcgggtcatctacacagattccacgaaactccagcgtccgttgactatgaccgcatccgcttgccaataaagcaaagagtgcaactatcatgctgctacctatccaattccttttcatagtaataattttgtttaccggacaaatgtatgacaaatccggtgacaagcattatttaccggtcattttgtataagaaagtatcagcatctgataaataacgcaaaagtattagttaatgctaaaattgtatttgccctgctgtcggaataattctacctttgccatacgcttcagctatgcctccatagccgtagatttaatcttaaaaataaggcaatacatgaaaagacttcattggatcttactattaatgattctgctgatcccgacagaaagtatcagtgccaaaaagaaaacagagaaaagtgacagagaaatctggtgcgacgtaatgtaccggatggctgctcctgtattaagcaacatgagcgaaggtctgctgaaacagaatatgctcgtagaattaagtccgacatgggacgggcgcaatcagaacgtcacttatatggaatgcttcggtcgtctaatggcgggactggcaccgtggctgtcattgcccgacgatgaaactccggaaggactccaacgcaaacaactgcgggaatgggcattgaaaagctatgctaacgcggtagatcccgcttcccccgattatctgttatggcgtcaggagaatcagaccttggtggatgccgccttcctggcagaaagtttcctgagaagttatgatgccttatggatgccattggacagcatcaccaagcagcggtatatcgccgaatttacggatctcagacgggtcgatccttcctatagcaactggctgttgttcagcgccaccgtcgagtccttccttcggaaagctggtgcgcccagtgacacttaccgcatcagttcctctctgcgcaagatagaagaatggtatgtaggtgacggctggtattcggacggacctcgtttcgcattcgattattacaatagcttcgtcatacatcctatgtatatagaagcactggagataatcaccgaagccggcaaacgtgagaagataggaaatatgcccggctgcaacttccatgaagcgatcagacgtgcccaacgattcggagtaatcctcgaacgcctcatctctccggaaggtacgctacctgttttcggacgttctatcacttaccgtaccggctctttgcagacattagcgctgcttgcgtggcgcaactggcttcccgaagaattatcaaacggacaggtacgcgcagccatgacggctgtcatccaacgtatgttcggagacggccgcaacttcaatacagcaggctttctgacactgggattcaacggttcccagcccggtatctccgattattacactaataacggcagcttgtatatggcatcgcttgctttcctcccgctaggtctgtctgccgatgatcccttttggacggatgcttcacaatcctggacttcgaaaaaagcatgggaaggagaagagtttccgaaagatcattcttatcataaagaataagtgagaatcagcgtcttataatagtttccagtcgcactggaaactattgtccattcacaccggaaactgttttatcacagccagctcttgacttttccttttttattttgtatctttgaaggtagtaaaaagaagaaaagcaatatgaaacgtataaaatataagacataacagcagtcaataaggcatctgtttccatctataaaggaatggaaaagggagaaaatcagcactgattttctccctttttgtttatataattccaaggttactcagaaatttcccaaaaatagtttttaataaacttggataccgtttataataaacccttcaactatttattaaaaacgctcaaacggtttattataaaactgtaaggatattattgtagccaagccgaaaggatattcatatttgagcagaagaatcattaaaacggtcaatattatagacaaatagtcaacgacagaatttgacagccaaagaaacaacgccaagcaaaagacaaaattttaaaagaaataccataaaagtattagtatctgctaatattatatttgtctcccccttaaaatagtcttacctttgctcatcattagttatggcctttgattcaataacgaataaaacattaaccatataaataaaagtatcatgaataaacaaacctttttaacactacttgctacattcgcactcctcttcagtttcactttctcctgccatgccaaaggaaaagacaaagctaaacacgttgttttcatcggtttggacggctggggagcctacagccttcccaaagcagatatgccaaacgtaaagaaactgatggaggacggagcttacacactgaaaaagcgttctgccctcccctcttccagcgccatcaactgggcatccatgtttatgggagccggaccggaacttcacggatacaccgaatggggatctaaaacaccggaacttccctcacgcgtattaaataagaatggtatcttccctactgtttttcaattactgcgcgatgcccgcccggaagcggaaatcggttgcctgtatgaatgggaaggaattaaatatttagtagatacgctgtctttaagttatcactatcatgttgccgactgcaacaagactccgaaagaactgggcaatatggcttcttcttatataaaggagaaacaccccgctcttgtagccatctgctacgacggtccggaccacaccggacacactgccggacacgacacaccggaatattacgagaaacttaaagaactggatgtgtatgtcggccaaatcgttcaggcggtaaaagacgcaggaatgctggatgataccattttcatattaacttccgatcacggaggtatcgataaaggtcatggcggaaaaaccatgcaagaaatggaaactgctttcatcatatccggcaagaatattaagaaaggactccggtttgacgatgtaagcatgatgcaatacgatgtggcgtccactatcgcccgcatctttcatttagaacaaccacaagtttggataggtagacccatggagattgttttcaaataatcattcaggatgattaacaagaagggaaaaggagaagctaaaataactggcttctccttttttatttatctatccacgctcataagataggagattataaatactatttcttataagtaacaaaatgagcagtcataatagttttatttcctataagtaatagaaatcacacctccacagctgttaattaccgaataacacttgcatcaacatacatatccttatacctttgtcccccggtaacacaacataatataacttcaatcataaaatgtactcttttgacattcttaataagcaatccaactgattaaagcagcattcaaacattctgataggacatcttatcttttgtttattcaaattaaaatacaatacgatagaattgtattagtaaatgataaaatactacttgtctgacggagcattatcgcctacttttgcatcatcagttattggttgaagtttccatggatcaatcaacaattgaatagagtttataatctaatacaataaattatgagaagaaaaatttattttctactattcttttttctttgcctgactagcattccactggcagcccaggatattgaaataaaaggaatggtaacagaagctacaacaaatgaacccttaccaggagtcacagtcagagtgaaaggtaaagacaccggcacagtaacagacatggatggtaaatactccatcaaagcgaataaagggaatatactgatattctcaacaataggtatgaaacaaatagaaaaagctgtcacgtccggaactccaatcaatgtatctatggaagaagataatatcgctctggaacaagtagtagtgattggttatggtacagtgaagaagagtcatctttcgggggctgtaggttcggttagtgcaaaagaacttaacggtcaggttgcttctaacgcagccacagccctacaagggaaaatacccggagtatcagtagccagttccagtggtgatcccaatggaagtatgacgatcaatgtacgtggtatcagttctttatccaacaacaatccactttatgtagtagacggagcatttggagatatcagtatggtcgatcctaacgatatttcctctatcgaagttttaaaagatgctgctgcggcagcaatctacggttcacgtgcagcaggtggtgttgtactgattaccactaaaagcggtcgtaaagacatgccgactaaattagatgtcaatttcttcacaggaatcagccagactcccaaaacactgaaagtttttaatggagaagaatacagccgcttcgcacgctactacaaattagcaggcgacggttatggtgcagaaaacggagctacccctttcattggtgaaggaacagactggcaagacgtaatgttgcgcacagccatgacttataaagccaatgctaccatcagcggcggttccaaaagcggttcttacagttcatctgtcagctaccttaataaagaaggtatactgcgcaacactgatcatgaatcttacaatatccgtttgaaaagcgattattctttcttcgacaatcgcttgacaataggtgaatctatgattgtaaatctgacaaaaggtagtggatacattcatcaggataccatgttcgatatctttcagttcccgtcagtagtaccggtatacgatcctacaaacgcagggggctggggtacttccaatgacatcaatttaccgaatccattggcggaaatgacagtcaacgacgaacggacagaaacaaccaagattttcctcaatgcctatttacaggctgaaatcatcaaaggactaaagtacaaactcaatgtaggtatcagaaaagagcatactaagtggcgttattacaaggatgtatacgatttaggaacattcggtaaaaacgacaagcccgaccttgaagaaaaatcgtcaacatgggaatcatgggtattagaaaacaccctgaattatgaccgtacattcggcaaacacaatttgtcactccttgccggatactctgcccagaaagacaaaagttacagcctttatggtaaaaatggagatatgccccagttcattgaaacaatgccgggcaatgtagatccttccaacctgaaagcatccagttcgctgaatgaacttgcattggtatctctgttcggacgtgtcatgtattcctttgacgaccgttatttattctcggcatctattcgccgtgacggttcttcacgtttcagaagtggacatcaatatggtgcattcccttctgcctctattggatggaacatcaaccgcgaaaaattctttaaacctttagagaatgtattcgatcagttgaagctgcgttttagttatggtaaactcggtaatcaggagatgaccagctactatccgacacaaagtgtagtatcggacggcatgaactatgtgatgaataattcgccttggtttggttctatgccatatgtgcaggcaatctcacccgccaatttaacatgggaaaatacggagacctataacatcggtttagatgtcagtctgctaaacggacgattgacgcttactgctgatgcttacgttaagaatacaaatgatgtgctattacctattccttctaccgcatctaccggtatcagcggaaactctattcagaatgcgggacaagtacggaacaaaggattcgaacttgcggtcaactatcgcggtgccatcaaggaaaagttcaactattacatcggtgccaatatcgcagccgacaagaatgaagtgaccaaaataacattaggtggacaaaacctgatgatctccggatacagcgcacacggtgccggtggtcgcggtatcaatatgtttgcagaagggcatccgatgtcatatttcaacctgatcgaaacagacggattattccgctcggcagaagagatcgctaattataaaaacaaagacggtgaactcatccagcccgctgcacaagttggtgatgtccgctacaaagactggaacggtgacggcaaaataaacacagatgaccagcatgacgtaggaagtccgttccccgatttcacttttggcataagactcggcggcgaatggaacaacttcgactttaaccttttctttgacggaatggtaggcaacaagatatataattatccccgttatcgcctggaatcaggaaacttcaacggaaacatgagtaccgtattggccaattcatggagaccggacaatcagaacactgatattcctcgtttctctaagactgacggtgcagacaacaaatgggcatacaccgacagatggctggaagacggctcgtacatacgtttgaaaacattggacattggctatacattacccaaagttctgacaaagaaaatcaaacttgaaaacgtaagaatatacacttcaatggagaacctgttcacattgaccaaatattccggctatacccccgacctgggtgaaagttctgtcgcaggtgttgcttacaatgtattctcaagaggtatcgaccagggacgctatccattgccccgtactatttctttcggaatacaagtcaacctgtaataccttaaattaatattaaacattaaacagtttatgaacatgaaaagaaattggttatcatatatgtgcatggcagctcttttttccggagcgctgacatcgtgcaacgaatccagctttttgaatctgtcggaccccaattacttcacggaaagcaacttctggaaagataaagcagatgcagaaagtgctttggcagccgcctattctccgataaaaggagccatgtacggatacttcggcgcatttgacggctggctaaacttaaacggtcgtggtgacgatatctacacaatcaaaggagaagaagttccgatgtggaatattgcaaacttcctgaactcgccctctaccggaaatgatccttacggagcgctttattcaggcatccagcgtgccaacatcgtactgcggtatattgatcagatacctgcatcaggtattactgaagaagaccgctcgatgatcaaaggcgaagcactctttctgcgtggctatcaatacttcctgttagtcaacaattacaaagaagtgcctttgagactgattccatccaacgaagatgaaaccaataaagccgctgctacagaagctgcattatgggcacaagtagaagaagatctggataacgccatcaaatgcaacctgccagtagaacgctctactgccaaagaacgcataactaaaggtgcagctattgcaatgctgggcaaagtatatgccacccaacacaaatatccggaagccaaacagctattaggtacattactgaaagctccttattcttacgaattgatggacaacttcgaaaagaatttcacaaatgaagaagagttcaataaagaatccgtatttgaactggcatacagtccggacggagactactcctggagcaatgaaagcggtatctgtttaggttgctatattcctcagtttatcggtccggtaaaatccggcggatgggctaaattaatgccgaactccctgatcgtaggagagtttacaaaagaaacacgtccgagtgatgcagataccaagtttgacaaacgtatgtatgccagcctcttttttgatgctgccaactatggagataaagttcctaacgagaaatggtatggaaataattactccatggatgatctttgggaaggcaatgaaggaaaaatggcaggcggagcaccaagtttcaacgtcaatggaacagcaggtaaattcctgataaagaaaaataccgcatattatgtggatgacaaggcaccggacaacatgggcaacaaagaaggaaggtccagcaatttgcgcgtaatgcgctttgccgaggtactgttgctttatgctgaagcatgcgccaaaaccaatgatccggatggtgccaactatgctttaaagcaaatccgccaaagagcaggacttacggaaaagacttttgcacaagctgaattaatgaatgaaatagaacaccaatgcttattggagttctttgcggaaggacatcgttttgacgatttgaaacgttggtattcgcccagcgaaattcagttgatcttcaaggcgaatggaaaacaaggtgcggaaaacttccaggaaaaacacctttattatcctataccgacaagtgaactaaacaataatactgccatggaacaaaccagtttatggaaataaaaaacctagcaagattaacttaataaagaaacaacatgaaaaagatatattcattattattcgtatccctctttctattcattggatactcttgtgacgatggaagtctgagtcacagtgacgtctacattccggacccggtagaagaaacagacgaggatgacggattctcagccgaacccaccacagaagctgtcatcaaagtacagttcggagaagggcacgaacatcagataatcgatggcttcggatgtgcctttgcagagtggtcacatcgtatatggaacaacatgatgcgcgaagatgtagtcaatgatcttttcggagaaaatggcttgaagctgaatattttcagaggtgaggtatttccacactatcagaaccctaccacaaacgtcattgacttcggaatgaaccgtaccttcaatcttgcagccaacgatccctctatgatcaatgattactggagagactttaacggttccggatgtggcgaacaagtacaattaggtcaaatgtggctggtagatatcctgcagaaaaaatataaagatgtgaaatttatattctctacctggagtcctcccggaactatgaaatctaacggaaagccctcaggcggtagtctggcatccggttcggaagacgcatatgctaactatctgattgacttcatcaaagcatacactgaaaagttcggcattgagatatatgcaatatcaccatctaatgagcctaacagcagtggaacgggatggaacggttgtagctggagttataccaatctggctaacttctgccagaagaatcttcgcccagctttagataaagcaggttatcaagacatgaagattatctttggagagcactcgtggtggaaagcaggagtcacttttcttgaaaatggcttgaaagcctgtcccgatctggttaactccaacattattgcagcagctcacggatacacattaattggcaacactgagtttgtacaatcaccactctgcgctgaaaataatattcatttatggaatacggaaaccagttctacagacacatacgatccatcctggaaaaacgcgatgcaatgggctactactttccataattatctggcagtttccaacctgaacgcatttatctggtgggcaggtgcacgtccttgtacgaataatgaagcgttgatcagactggaagaagcacttcccggaaccaattatgaaagagcgtcccgctactacagttacggacaatttactaagtttatcccggaaggaagccgacgtgtggatatcaagactgttgctcccgaaggtgacgaagaagcattcccgaaagaactgttgatgacagcttacatcaaggacgacaattatacgatcgtactggtaaacaattctacaagcaaggccttcgaaaccaaactggaaattgaaggaaaagagtttcagaccatgatctcgtatacatcagatgaaggagttaagtggcaacgcaaaaaagtaaatccatctctcagcggattgcgctccattacagtccctaagtttagtgtagtaaccatcactggtaaaatgaaagatattgaagctgaataaatagtctaaataaacaatgaatatcatgaaaagaaatctattatatttggcaggattcctgcttgcagccgctactgttttctccggctgtaatgacgatgatccatcctatcacgacttagtgccgaatacgcaggagttgatcattaatttggatgagaccccggaaggaatcattcaaatagttcaaggcaacggcaattataaaattacaagttccaatgaagatgtagcaaccgccattgccgaaggtaacaaaattaaagtaacagctctgaaggccggtagtaccgacttatctattaccgactgggctaaaatgagtaccaatgtcaaagtcatcgtcgatcagttaagtgaattggttttgtccaattcggctacaacaatgtatccgggtgaaaacaagacagtcaatgtttatacaggaaacagaggctacaaagtaacagttgacaaagaatctgtcgtgaaagctacagtagatgaagaaggacatatacagatagaatctctggcaccaggcaatgcaacagttacagtgaccgacagactgaacaagagtgcagaattttcagtaaaagtaataaagaaacttgtagttgacaatagtgaagaaattgcttatttgacagtcggtgaacctttgacaatcaagattctggacggtaacggaggctatacctgcacaaataatggttctgccacttatctgaaatgcacgatagcggaaaatggaacagatgttatcatcgaaggtcttaaaagatatcgtttcaacaagacggtaacaatcaaagaccaggaaggagagtcaatcagcatcaatatagtctatattgacgacctatatctggagaatccatcatatcgttacttaatagcaggttcatcttcttatcagtctgtctctacctcggcagtgggttccattactcattcggaagagttcaatatgtccgaaattgttataaaaggaacaggaacttatgccagcggttttgcagttcagtttacaggtgatttgacgaaaggcaacaaaggtgatgcggtactgtataaagtaacaagaaatgcagtggacaaaaaagtgaaatatccgatagaagattgccggatcgataaagtggaagatggttggtactgggtcagcttcttagaacccaattgcaccatccgctcttatatgattaccaaacaatagtttatagacttgacacatgtattttttgaaagtacccccatactttcaaaatgacaaaagtacaaagagactgtccctacaacaccgtatatctcaggtatgtctggcttgtaaacagtctcttttgtcctgtcaagtaatacaaaaaggatcgcaagccgatgctttactctaattttatgaattgatatgaatagatatgataacagactacatattctcactaaagaatatgatgagctcatctcacgtgaaaatgaaaagatactgcccggcaatggtgtttttgaacgatacaaataccccattctgacagcagaccaccccccgctggagtggagatacgacttcaatccggaaacaaatccctatctgatggaacgtttcggcattaacgccgtattcaatgcaggcgctatcaaattcaacgggaaatatcttattatggcacgagtagaagggcatgaccgcaaatcattctttgccatcgcagaaagtcccaatggtatcgacaacttccgcttctgggaatatccggtacaactgccggacctatatccggaagaaacgaacgtctacgatatgcgtctgacaaaacacgaggacggatggatatacggtatcttctgctcggaaagcaaagatccggacgcccccgcaggagacctcacatcggccattgcagcagcaggaatcatacgcagcagggaccttaaaaactgggaacgcctgcccaacctcgtctcccaaagcca

SEQ ID NO: 4555 - DNA, 952 bp, Unknown
  gut microbiota DNA sequence
caactctacttttcaaatatacacttatattttgttgtgatatttaatactgcaaatgtaaatgtgtcaaaagtcagcagttttctttcgttgcaccaaggtgcaacgaatatagcactaaggtgcttcaactattcaacctacgtgcaacgactatcaaacctaggtgcaacgaaataaaaacagggttataatggttagagaatcaatatgaccgactaataaacagtagcagaacggtcacttatttactacatttcaactcactgtcacttaaacataagttcattgtatcacaaccattctttcattacttattattacctgcatagcaaagcacactattgtggaataattccacactccctgccccattttccacacattccccatacgtttccacactatagataatgtacataatctacatatcccacttataatcaacgcattgttagcacacatcagtctttggcacacactttgatctttaattagccgttagataatgtaacaaccgattccttaacacataagagagaattgaaaatatatgtttaataatcattaaagcaaacgattatgaaaaaattagtattagtagtagcaatgtttatgtttgtttgtggtggttcattccttgttaaggctcagaactctgcagaagctgcgacagccctggcagaagttaatgcaacagctatcgttaatgatacagtagtaaaagatactgtaaccaagagcgaggaacctgttaagacagaactgagtgcaccgaccgctattgtcaacgatacagtcgttactgacactgcatccaaagacaaaccggctgagcctgtcaaggaataacctttccaaaaactcacggaacatagtctgccgaacaatagtaagcacactacaaaaaaagccatccctacttcgtctattccggggatggcttttttat

SEQ ID NO: 4556 - DNA, 4462 bp, Unknown
  gut microbiota DNA sequence
tattcttttttatatttatccgtattctctttgatgattccctgatcttcacagtgtgctgcaatcagtaaatccgtacctccgaagatattgcgcagacttgccatccggtctaccagcatatttcccgtactggaacccataaataacttcaccccacatacccggtttttgtccagctgactgaataacggataattattgttagtcgctccgaaataacaggagaagttgacagatgatttttccgccagcaaagccagtttgtcattcagcgcctccaaagttgtggtctgaggatttgtgttcggcatatccatgatcgaggtaactcctccggctgccgcagcatggctttccgttgtgatatctgctttatgagtcagccccggatcgcggaaatgtacgtgctcgtcaatagcccccggcaaaagataacagccggatgcgtcaatcgtttcgtcacaaggcatggcagcctcttgtctgtcaactaagatctcagcaatcttctcaccttcaataacaacagatcccggaacttttcttccttcgttgacaattacggcgttttttatcagtatacgtttcatttcttttgcgggaatttatggaaccaactatttatttttaacttgatcactccgaatatggcttctccaaagatactgctgttcatcttggaagttcccaactcacggttaatgaagatgacggggacttctatgattttgaatccgcatttgtaagcagtgaacttcatctcgatctgaaaagcatatcctttgaagcgaacatggtccagatcgattgtttccagcacctgacggcggtagcatacaaatccggcagtcgtatcatgcaccggaataccggtaatgaagcggacgtacttggaggcaaaataagacatcagcacccgtcccatcggccagttgactacattcacaccacttacataacgggagccgacagatacgtctcctccttcttttgcacaagctgcgtacaaacggggcagatcattcgggttatggctgaaatcggcatccatctcgaagatatattcgtatgcgtgctccaacgcccacttgaatcctgcgatgtaagcagtacccaatcctaacttccctttgcgctcgatcataaagaggcgttcggggaattcctgttgcaaagttttcacaatgcttgcagtgccgtccggagatccgtcttctataaccagtatgtggaataccttgtctaaaccgaaaacggcacggataatattttctatgttctcccgttcattataggtcgggataataacgatgctatctgataattgcatagaagtcctatttttaagacaaatgtagcgcttttcctttagttatagagggactaaggataatttaacgcgtttgtatttgttccccggtgtgaaactattggtttcatgccttgaaacttttagtttcattgtttgaaaccaatagtttcaaggcttgaaacaatcttgaagaagaaaacttcggtgtgactatatcaatcccggttcttttttcgtacttttgcggtgaaattttatagctatgacaataactgagttgcaacaacaatatgctgctcatcctaatacggcagtcatggaacgactgctgaaggatgcgtccgttcaaactattttttgcgggggcttatgtgcttcttccgcttctcttttctcttctgtattggtgaaacaagatgtgtgtccgtttgtctttgtactgggcgatctggaagaggcgggctatttttatcatgacctgacacaagtactgggaacagagaaagtgttgttcttcccgtcttcattccgccgttccatcaagtacggacaaaaggatgcggccaacgagattctgcgtacagaagtactgagccggttgcagaaaggagaagaaggtttgtgcatcgttacctatccggatgcgctggcagagaaagtggtatcccgcaaggaattgagcgataagaccttgaaactgaatgtgggagagaagctggacactacttttatcacagacgtgctgcatagctatggtttcgaatatgtggattatgtgtacgagccgggacaatatgccgttcggggtagtatcattgatgtcttttcgtttgcttcggaatatccttatcgtattgactttttcggtgacgaagtagagagtatccgtacatttgaagtagagtcgcagttgtcccgtgagaggaaacagggagtggctatagtccctgacctggcagtgacgggagatgtgacaacttcttttcttgatttcattcctaaagaaaccgttttggcaatgcgtgacttcctttggttgcgcgagcgtatccaggtagtgcacgatgaggctttgacgccacaggctattgccgtacaggaagccgaagaaaatggcggtatcacgctggaaggcaagctgattgacggcagtgaatttacggtacgtgccctcgatttccgccggatggaatttgggaataaaccgaccggtacgccggatgcaaagatctctttccatacttccgtacaacctatttttcataagaactttgatctggtggccggttctttcaaggactaccttgaacagggatattcactttatatctgtagcgacagtaccaagcagaccgaccgtatcagagccatttttgaagaccggggagataagattcagtttactcctgtagtacgtacgatacatgaaggctttgtggatcatacgctgcatctgtgtatttttacggatcatcagctgttcgaccgtttccataagtacaacttgaaaagtgacaaggcccgttcgggtaaggtcgctctgtccctcaaagaattaaatcagtttactccgggcgattatgtggttcacacggatcatggtatcggtcgtttctccggtttggtacgtattccgaatggagatactacgcaggaagtgctgaaacttgtctttcagaatgaggatgtcgtgttcgtttccatccattcccttcataaagtttccaaatataaaggtaaggacggagaagctccgcgactgaacaaactgggtaccggtgcctgggagaaactgaaagaccgtacgaaggcgaaaattaaagatattgcccgcgacctcattaaactatattcgcagcgccgtcaggaaaagggtttctcttacagccccgacagcttcttgcagcgtgaactggaagcctcctttatctatgaagatacacccgaccaaagcaaggcgacgatggaggtgaaggccgatatggaaagcgaccgtccgatggatcgcttggtgtgcggagatgtgggtttcggaaagacagaagtagcgatccgtgcagcgttcaaagccgtagccgataataaacaggtggcggtccttgtgccgacgaccgtccttgcctatcagcatttccagacattccgtgaacgtttgaaggatctgccctgccgggtggaatatttgagccgtgcccgtacggcagctcagtccaaaaccgtattgaaaggactgagggaaggagaagtcagtattcttatcggcacccaccgtattttaggaaaagatgttcagtttaaagatttaggcttgctgatcattgatgaagagcagaaattcggagtctctgtgaaggagaagctgcgacagttaaaggtgaatgtggatacattgaccatgactgccacaccgattccgcgtacgcttcagttctcgctgatgggagcccgcgacctgagtgtaatctctacgcccccgcctaaccgctatccgattcagacagaagtacataccttcaatgaggaagtgattacggacgcgattaattttgagatgagtcgcaacggtcaggttttctttgtcaacaaccggattgcgaaccttccggaactgaaagcgatgatcgaacgtcatattcccgattgccgtgttgctatcgggcatggacagatggaacccacacaactggaacagatcatttttgactttgtcaattatgactatgatgtgcttttggcgactactattatagagagcggtatcgatatcccgaatgccaatacgatcatcatcaaccaagcgcagaactttggtctgagtgacctccatcagatgcgtggacgggtagggcgcagtaacaaaaaggctttctgctatctgctggcacctccgttgagcagtctgacggcagaaggaaaacgacgcttgcaggcgattgagaacttcagtgatttggggagtggcatccatatcgctatgcaggatttggatatacgtggagccggaaacctgctcggagcagagcagagtggcttcattgccgatctggggtacgaaacgtatcagaaaatcctagccgaagcagttcatgaactgaggaatgatgagtttgcagaattgtatgcagatgaaataaagggagaaggtca

SEQ ID NO: 4557 - DNA, 30627 bp, Unknown
  gut microbiota DNA sequence
gcacgtccccaacaatgttttgactgtcctgtcaccggatcggcccagcgctccgtgcgacttacatcacacgcatgacgataaagaccattcttcggatcatacgtatgacgggcacaggtaataaactgatttatgacgtctgcataatcctgcgggcgattattacggaaagcatattctgcataaaaaggagctcccatataaagtccgtccagccacatctgatgcggatatatctttttatgccagaatcctccgtcttcattacgaggttgtccggcaaactggctatagagcaagtctaatgccttcttatacttttcatccttggtctgctcatagatacgaaacaggatttttccggaattgatacggtccagactgtaatcggtcaatttgtatgcagtaatacttccatcctcatgcaccatcgtatctgcataagcaattgcataatctcgtattttcttgtcgccataagtatcgtatacatcaagcatcgcccccaattccagtccgtggcaatagtcccatttcagtctgggctgaaaatcaagctgccaggattccgggcaacggatcatctccgattcagtcatccgcaccgaccaaggcagtttttcatccacctgctgcgccgacagtgaaatggtgcttgacattattattactaatatcaaaaatttataaaaagagcttcgtctcatggtttattgttttaaggattatacatgctattttttcatgctacgaaagtagtgtatttcctccaaacagagtgggattttttagttaagaaggtgtattttttgtttttcgtgcacggaaacgactaattttgtgcacgtaaacgtcaaaaatgtccatttttgatgcattaactgataaattaagagtttcgttttggaataaagcggaaaaggtcgtacttttggcacggtttacaactaataccctctggggaaacacagtaatttatcattaaaaacagagaaaaaatagaacagaatggaagaagtattcaagtacattatcggtctgggagcggcagtaatgatgccgatcattttcacaattttaggagtatgtatcggtattaaactccccaaagcgctcaaaagcggtttgttggtgggagtcggtttcgtcggcttatctgtagtcacagccttgttgaccagtagtcttggtccggcattaagtaaaatggtagaaatctacggattggaactcggtattttcgacatgggatggccttcggcagcagcagttgcctataatacctcggtcggcgctttcattatccctgtttgtctgggagtaaacctgttaatgctgctgaccaaaacaacccgtactgttaatattgacctttggaactactggcacttcgcatttatcggggctatcgtatacttcgcctccgatagtattttctggggatttttcgccgctatcatttgctacattataacattggtaatggcagacatgactgctcctgcttttcagaagttctatgataagatggacggtatctctatcccgcagcctttctgccagagcttcgttccgttcgcgattgtaatcaacaagcttttagataaaattccgggattcgacaaactgaatatcgactctgaaggaatgaagaagaaattcggtctgatgggtgaaccgttattcctgggtatcgtgattggttgcggtatcggagctttgggctgtgccagctggaaagaagtactggacggcattccgggtatccttggattgggtatcaaaatgggagcggttatggagttgattccacgtatcaccagccttttcattgaaggtttgaaacctatctctgatgcaacccgcgaattgatcgctaaaaaatataagagtaatacaggcctgagcatcggtatgagccctgcacttgtcatcggccacccgacaacgctggttgtatccctgcttttgatcccggttactatcttccttgcagtgatccttccgggtaaccgtttcttaccgctggcttctctggccggtatgttctacctattcccgatgattctgcccatcaccaaaggtaatgtggtgaaatcattcatcatcggactggtagcattgatcgtaggtctgtacttcgtaacagaactggcaggattcttcacgatggctgccaaagacgtatatgccgctacgggtgacccgacagtaaatatccccgccggcttcgaaggcggagcgctcgactttgcatccagcctcttctgctggggtatcttccacctgacttacagtctgaagattatcggtcctgccatcctcgtagcccttgcactgggaatggcagtctacaaccgtatccgcatgaaaagaaatgatgcgaaaaacgcagctaacgattaaatataagtataatccaaataaagattcgaaagatgaaaaaattagcaattgcaatgatgatgggtatcgcagctatgtctgcttctgcccaggtaaattacaagatgcaggtggcttgcaatccgcaagacgtgaaaacgtataatacaaaccgcctgcgtagtagcttcctgatggaaaaagtaatggttcctgatcaaatcaacgtaacttattccatgtacgaccgcctcatcttcggtggtgccgtacctgcaacaaaagagctggtacttgaaactatcgatccgttgaaagctaagtatttcctcgaacgtcgcgaactgggtgttatcaacattggcggcgaaggtatcgtaactgttgacggcaaggaatatacgctgaacttcaaagatgcattgtatgtaggcagaggcaagcagaaagttactttcaagagcaaagatgccagcaaacctgcaaaattctatatcaactccgctactgcccacaaggagtacaaaactcagttgatcaccatcgacggacgcaaaggttctctgaaagcaaattctttcgcggcaggaaagatggaagaaagcaacgaccgcgttatcaaccagctgattgttaacaacgtacttgaagaaggtccttgccaactgcaaatgggattgacagaactgaaaccgggtagtgtatggaacaccatgccggcacatactcacagtcgccgtgtggaagcatatttctacttcaacgtgccggaaggcaactccatctgccacttcatgggcgaacctcaggaagaacgcatcgtatggatgcagaacgaacaagctatcatgtcaccggaatggtctatccacgcagctgccggaaccagcaactatatgttcatctggggtatggctggtgaaaatcttgactatggcgacatggataagattaaatatacagaaatgcgctaatctttgcgcagctctttagcacatatcaagtgatccgaaaaacttcattctttcctcgaaacggggagagaatgaagttttccggatttgtcatattcttcccccaaagagaccaaattgttacgataatacattactatgtacaaataatatgtataatgcaacgaattatacatgattttgaccaattattacaaaaaaaatccagctgaaataccgacctttgtcagcaaatcaaaatctatttaaatccattatcatgaatgcatttcaaaaaacaggcgaaaaaatgacaaactacagatggacgatctgtgcgatgctattttttgctactacagttaactatctcgaccgccaggtactatcgctcacctgggatgaatttatcaaaccggaatttcactgggatgaatcacactacggtactatcacttccgtattttctattgtttacgcaatatgtatgctctttgccggtcgctttgtggactggatgggaacgaagaaaggattcctctgggctatcggcgtatggtctgccggtgcctgtctgcacgcagtctgtggtattgtaacagaagcgcaggtaggactgcacagtgctgccgaacttgccggagccaccggagacgtggtggtaaccatcgctactgtcagtatgtactgcttcctggctgcacgctgtatacttgctctcggagaagccggtaacttccccgccgctattaaagtaactgccgagtacttcccgaagaaagaccgtgcttatgctacttccatcttcaacgccggtgcttctatcggtgccttgatcgctccgctcaccattcctatccttgccaaagctttcggttgggaaatggcgtttatcgttattggtggacttggttttatctggatgggcttctgggtatttatgtatgatgctccttcaaagagcaagcacgtaaacaaagccgaacttgaatatatcgaacaagaccagaatgaggccggtgcaggtccgaaaacagaggagaaagacgagaaaaagatgagattctggcaatgtttcagctacaaacaaacttgggcatttgtcttcggtaaatttaccactgacggtgtatggtggttcttcctgttctggaccccgtcttacctgaactcccaattcggtatcaaaacttccgatcctctgggaatgggacttatcttcacgctttacgcaatcacgatgttatccatctacggtggcaagcttcctactatcttcatcaacaagaccggcatgaacccttatgcggcacgtatgaaagcaatgttgattttcgcattcttcccgttagtggtattgctggcacagccattgggaacattctctccgtggttccccgtgatcctgatcggtatcggcggagctgcccaccagtcgtggtcggccaatatcttctctacagtaggtgatatgttcccccgaacagcaattgcaagtatcaccggtatcggtggtatggccggtggtatcggttcaatgattcttcagaaagtggcaggtaacttatttgtatatgcttccggaacgacaatggttgacggcaaagaagtggaaatgacaaaagaactactggaacaaggagcacagtttgtacatcctgcgatgacattcatgggcttcgaaggcaagcctgccggttactttgtaatcttctgcgtatgcgcagtagcttacctgatcggttgggttattatgaaagcactggttcctaaatataagcctatcgtattggattaatccgatataattatatagaataaaaaacaggagggcactcagcatgagtttgtcctcctgtttttttaaccaattatttattcaaaaagttccaaaaacaaaaaagcctcttctcacgaagaaggctttttaggtttacttattcttcatagccatcctgtactattttacaaaatatcttgcacattcaaacaatgaaggatagtaaacgttaagatgaaaaaaagggaagtctcacgacttccacaattcttctaaccttaaatctaaatctctatgaaaaaaacgtattgcaaagataggggtttgttcaacaaataggtgttaatgaattgcataaagagagaataaaaactaacgtctgcaaaaattatgcaatattccggaggctctctattaattttaataaacttttatagagtggattacgctccaacagcgtcggcacacctgtcagcagcatctgttttcttgcacgtgtcaaggcaacgttcagtttccggtcaatcagaattccgtcttcttctgtcagattggaaaggaatttcaactgatacggatagttcacacagaatgaataaataatcacatcgcgttcacttccctgaaaacgttctacagtgtcaattaatatctgattcagttcgggaatgccgagagcttctatttccttcttgaccaaagctatctgactacgatatggagtaatgatccccaatgtgcgggaggcatcaaatgcttccgagtgttctttatagacagttgcggccagacgggcagcaatctttgcttccgaatggtttgttttagcagaagaccccatcggttcgggctgcgaaggatagaaagacagccggttgatatttccggaatcttccagttgatgcggcagtccgacaggcagcagccgaccttcatagaaagcttgattggcgaacagagccacttcggggtgcatacgtccctgacggcagagcatatcgtaagtacgatgggcatcggtatgctgacgggctgtgcgatacagtctttcaaacagagaatctttcaagttcttcagtccgacagcagacagggcttcatcatatacttccgattgttccgaattctgcaagacgacagccggaagttgtttatgatcgcctatcaggataaatttgccaacaccctctttcccgttttcccctttggcacaaagtatacccaacaactgaggttccagtatctgagtagcctcatctacaatagccacatcgaaatgcttcaatcggaaaagttccggtttgccggagatagatgctactgtaccgactaatatacgacagcggttaatacgttcgcaaacctctgtacgacgcatacaggtagcaagttcattctctatcaaatgatcccgatagttctcgtcacatgaaagctcgcttcccacacgaatgaaatctacttccggacgaatggaagaaagtgctttacagatttcatctacggcacggttagtgtatgagagcaataaaatctgggctccttcctctttataaaaggtttcgaccatcttcttcagtgcacaagacgttttaccggttcccggaggccctaccagcagaaaatagtcctttgctgctttcgctttcaaagcaatacgagtaaagtcatcggcagcttcggctatctgcttatccaatgccacatcaaattgcggctcccgttgaaagagcagcaaatcacgacgctcttttgtagcagacataaaagcataaagtccctggtacatgctacggaaagtagtatccatcgcatcgtgctcaatagcatagaggctatcagacggaagtacggaagagttctgctgggtcgcacgcagacggatgcagatttcattctcgttcagatagtcgatattgcctttgaataccatcttgttggtgacgttatccgtatccgcattccgttcgtaaagcacgatggcatcgccctgacggaagttagggagggtgtgctgcgcatcatccgccaccgttctctgaagttctccggacggcaccagcaacaggtgggatttatgttcatcggctgcgtgattctctttaattcttaaatcatagatgatctcccccgattcgcatttctccgccaaagtggaaagccataaagaagcggctcctgtacgtccctcataatccacatcaccggacttggacgtataaagttccttcgttataaaattatagagtgcatagaagtagcttttctctaaagtggagagagatttcaacttctcctggaaattatcgatagaagggcgcagatacgtctcccaaaaacgtcccgacaatccccgctcgtttagtaccgaggcttttatttcttccagtttttgtgccgtatattccaggctgttccgcaactggatgccatattcatccgctacaatccggttgcgcagatcgatcacacggcggaccattgcccatgaaggacgggaaggataaagcaacggatagcgtgtatagagcagataagcctttaccttccggtgatccatccccatcgaatattgcagaactgcctgataaagcagcatctgcaccttattattctctttcggttccacttttccgcgaatcgcatattcgtcagcctttcccgatttcatttcgatgaaagaagacatatcgcgctgcatatagtcgagccgcccttgcaggccgagcgcttcacatatataagaaggttcgagcacggcatccgtcttgtccagttcgtagccggcggcatgaaaagtatcattcaccgtctcacggatatgatcaaaatggagtttgcagtcatcaaagaactgacgttccttctcccgatcacgcaggtcggcacaagcagccagttcaatcggataacgccggaaagctttctgcatacatttcagataatccacctccccttccgcatgtatccactcatcgaggaaaaggttggctatatttcctaaaagcaacgggcgtgcattctctatcggctgaagacgggaaaggaaatagtttgccggatgatgtccataatcacggtaacattctgccaatgaactgatatcaagcagataatccggttcaaggacaatgaacgaaggggtcagaattcctgcttcgtcaacagcgacatccagcaagttgagttgtgcatggcgccagagcaactgacaggtttccgcaaattcttcattgatctgaggaatattgtaacggacacgcaacggttcgtcagctatttcatccaaaggagtcacatacagatactgctcgtcggaatactggaaacagacgcgcatccgctgcacctgcttgtgtgctggaggagctacgatataagttgcatccgtccggggaagcaaacgatacagttcctgtggaatatcttcctcaaaaagtttacggatgaagaaagccagcgttttcgcatcccgcagaaggtgttcgcgggtaggttcctgttgtcggttcagaatggcattggaggtcagtcggaaggtatgcagtctgttttgctccgctacagaaagccccactttggccgctacaaaactaattcgtgcggaaagatcggtcatctgcagactaccgttgtgcatatgtaggcggcaaagcctttccagcaagtcgcgcatctgtttgtagccaatagtcagctgcaaatgatccgccttacaaacggctaaaagaatttcataagattctcttccttcattttccatacgacaaaagggatatgataaaaattacatgtgtgtgtcaaaagtcagcctcaattgagttactatcgacttttgacacacacttggggaaacgaacgataaataattggcttatcagacttttgccacgccttcttcttcctcttcttcttccaactcaggaacttccttcttatcctttatcatcagaatactcatttcatagagcagataaagcggaatagccacaacactcagtgtgaacgggtcgcccgtcggagtgatgatagcggcagctattacgataatgacaactgcatgacggcgatatttgcgcaggaaagacttattgacgactcccagcaaagacaacaaccaagtcaccagcggaagttcaaaagccagtcccatacagagaatcagcatcataaagttatcgatatacgaattgagcgacagaatgttctcgacttccgaactcagctgataggtagagaggaaacggagtgtcagcggatataccataaagtatcccataagcaccccgataaagaacataccggttcctatggtcaaggctttcctgactcctttccgctcattcggataaagggccggattgataaaacgccagacctcaaagaaaatatagggcatagccgtcactaccgacatccagaaagctgtcgacatatgtataaagaaaggagctgccaaattgatattgacaagcttcaccttaaactcctgcgtaaaaaattcatcagtcaaatcgaatttctgaccgataaagcgtagtaagtcgtaaaatacaaaatcattatggcaaggcgccagtattacatggtcgaacaaataaggcatcgctacgaaatagccgattgccaatacaaaccagactccgataacacgaaaaagtacccgacgcaactcatccaaatgatcccagaaggtcatttctgccattgcttattatttcttagctgaatctgccggtgcgtcgatttcgtcttttgccttattgatttcttcttttgcctcgttcacaccatctttaaagctctttactcctttacctaagccacgcatcagttcgggtatcttcttaccaccgaaaaggagaagaataacaagagcaataatgatccattcagagccactaggcaaaaagcctaataataataagtttgtcatatgtttattaattatagaggtttattagttggtgcaaatataaagaaaaacggcagactataaaagaaaaacaggaaactataaacgggaaacgggaaataatttaagtatacccgttatcatttaccgcccatttatccatcgttaacctttatagtcttccattcactattctactacatataattctgtttttaccgcctgcgctttagtcctgatagtagactcgcttcacacggttcgagatgctggtcagcacttcgtaagggatcgtccccaacttatccgaaagtgtggttatcggcaggtcgtcaccgaagatgacagctttgtccccttccctgcaatcgatatccgtcacgtcaatcatacagacatccatacagatatttcctacatagggagctttcttgccattcaccagacagtaagcattgccacgtcccagatggcggttcaagccatcggcatacccgataggaattgccgcaatgcgggaaggacgcgtcagatgtcccatccggctatagcctaccgtatcttctccgggcacgtcccgaatctgaagaatcgtagtcttaagcgtgcttacattattgataatcgaattgtcgatcgggcttaccccatagagtcctatccccagacgcaccatatcaaactgcgcaccgggaaaacgttcgataccggctgtattgcagatatgacgcagaatcttgtgtgagaaggcttcctgcaattcctgcgaacctttctcgaacaattcaatctgctgacgggtgaagaagtcgaattgcgccgaatcacttcccacaaaatgagagaataccgaccggggaataaccgcattctgacttttcagacgacggatcaacaacggaatttcatcgacggaaaaaccaagacggtgcatacccgtatccagtttgacatgaatcgggaagttggtgattccttctttctcggccgccttaatcagtgcatcgagcaaatggaagttgtacacttccggttcgagtttataatcgaacatcgttttgaacgatgtcagttcggggtccatgatgataatggaggaggtgatgcctgctttacgcagttcggagccttcgtcggcaacggctacagcaaggtaatctacatgatgctcctgcaatgttttggcaatctcgtatgatccggctccgtaggcagcagccttcaccatacagatcattttcgtctccggatggcggagcatggagcgatagtgattcagattggcaaccatcgcacccaagttcacttccagaatcgtttcatgcactttcagttccagttcttccgataccagatcaaagttgaatacgcgggaaccttttatcagaatgacttccgaatgaagggttttgaaaatgcccgatcttagcaaggcgtctgtatcggggaagaagtatcgttccggcgtaccttcgaagcgagcggcacacgaagaaatctccgctcctacaccgatcagcttgttgatgccccggctctttatcagttgtgctacccgacggtaaagcgtagccgtactctgccctgtctccaaaatatccgataagataagtgtccgtttcagtcctttcttttccgaacggcgtaccaggaaatccagtgctatatccagagaagccaagtccgaattgtagctatcgttgatgagtatacaattattcttgccttcttttacttccaggcgcatggcgatcggttcgagccgtgccatccgttcggtaatctgatcggcaggagtcatcagataaagacaggctgccaggcagttcaacgcattttcgatggaagcatcgtctataaaaggaatacagaagatattatccatatccagatagcggtaagcaatcacagtatggtcttctttctttgtcaccttgctgatataaagagggcgctcgatatccttgcagctccatgcaatctcacgggctgtcagcatcgactttgccacacaattactgatcagctcgttatctccattatagatcaccacatcgcaatctttaaagagtgtcagcttctccatacatttctcctgcaatgagaagaaattctcctgatgggcaccgcctatattagtcagaataccgatagtcggtttaatcatgcgcttcaaggcccccatctcccccatttcggagataccggcttcgaaaatacccaattcggcttcttcattcagttgccagacggacaagggaacgccgatctgagaattataactgcggggcgaacggacaatgcagcggtccggactcaataattgatgcaaccactctttcacaatggtctttccattactgcccgtgataccgattaccggaatcttgaaattctcccgatgagcctcggccagcttctgcaaagccttcaaaggattcgccacgatcaagaaattggagaaatcgagaatggagagtcgagagttgggagtaggctgcgcaccatcctgctgcatagcattctccattttccattctccattctccattctcttaaagtcttcttccgtaaccacgaagttgcgcactccccgatcatatagttcggagatatagcgtgcaccattattacgtttggtgggcaaagcaaagaaaagggtttcttccggaaagctcaaagagcggctatctgtaagtagccaatcaatcgtcgcttcatgctctccgacacggcgtgcaccgatatattcggctatggattcaatcgtatatgacatagttctgtttctttttgaaagtctaagtacggatattttccgttaagtcgttcgatttttaacactatttgtcctaaaaagcgttgatacgcttccgactccggatgaaaaggcttgtgtgacaagtctttagtaatatcttcgatggcagtgatcacctgcttcgtttcggcagaaaagaaggcctccgaaaagcgttcccacaaataacggacagccaacggagacggatgaagcatgtcatcggcataatagcgataatcacgcagttcatccaaaacgatctcataagaaggaaagtagaacacatgatccggaaagagctgttgcaggcggtcgatggcaagcaataaggtcgatttactcaactggttggcatgcatcccgtcacgtatatgccggatagggctgaccgtgaacaagaccttcaagtgagaattgcgcgccaccatactggttatcaacgaagtatattcgttcacaatctcatctaccgaaagaatccggcggttgaagcagctctccggcagtttatgacaattggagactacctgccttgtttctttctgttcatatacataggcagtgccgaaagtcagcatcagccagtcaagttcgtggaccgaacggtgagcctgcgacaagcgagtgtttatcttttcaagtacttcctccggcgatgacgcagagaacaaaccatgatgcatcggactatgccagcactccttatataggaataagtctttctcctgatacaccttccccttcaatatctccaccaaagccgtagagaccgacagcggattatagagaatcccgaaaggattcatgtcaacgcgaaatttattttctgccagcaacctgcccatgttctctgcaaaacaagaccccatcaaaagaatccgttccgcatgactgacaggcggcaagcccgccggtagttctacctttgtttgaaaatccatatattctccttctttcgattgtttctctcttgcaaaagtacgacaaagatacgatattccgctttattttaatcacaaatctattcaaggcttgacaaatggctttttatgttgtatatttgtagaccgaaaacagaaaatcaatgaataacggatataaaagaatagaaaacatggataaaatacagtatcatattacaacaaatacagcttattccttctcattttactaaggaataagacgattgatatagcccaaaggctgcaagctctatgaagtttgcagccttttttgttgcattaattcaatctatttcctacaaaatctcattttagagtttctaataaacggaagacacgtctataataaacgatcatcaaatttattaataacgatacgaacgtttctgcaagttcatgttctcttttttcatgcaacttttatttccctaatagagatttcatttgattagtaatattaatccacatttcacataataaaaagaaagttacagttcttccgggaacccgacggcacatacttcaatataccaacgaccgaatgccattccaccctcgtacttcgctttaacaataagaatttaggtaaaaagaaagggcttccgctttctttttcgtatttttgcaccaaattttctcgaatcatgaagaatgaaccgatatataacttgctaaactcaatcaacagccccgatgatctgcgccgtctggaagtagaccaactgccggaagtatgcgatgaattaaggcaagacattattaaagaactctcctgcaatccggggcacttcgctgccagcctcggaacagtggaactgaccgtagccctgcactacgtctacaatacaccttatgaccgtattgtatgggacgtgggacatcaggcgtacggccacaaaatcctcacaggacggcgtgaagcattctccaccaaccggaaactgggaggtattcgccccttcccttctcccgaagagagcgaatacgatacatttacctgcggacacgcttccaattcgatctccgcagccctcggcatggctgtcgccgccgccaagaagggagacgaccaacgtcatgtgatagccatcatcggagacggttcgatgagcggaggactggcttttgaaggattgaacaattcttctaccaccccgaacaacctgcttattatcctgaatgataacgacatggctatcgaccgcagtgtcggcggtatgaaacaatacctgttcaacctgacaacctcgaaccgctacaaccaactgcgtttcaaggcttcccgcctgttgttcaagctcggcatcctgaacgatgaacgtcgcaaggcactgatccgcttcggcaacagtctgaagtcaatggccgcccagcaacagaatatattcgaaggaatgaacatccgctacttcggtcctatcgatggccatgacataaagaacctttcaagggtattgcgtgacattaaagacctcaaaggtcccaaaatactgcatctccacacgatcaaaggaaaaggcttcgcccctgccgagaaacacgccaccgaatggcacgctcccggcaagttcgatcccgtcaccggagagcgtttcgtagccaatacggaaggaatgcctcccctgttccaagacgttttcggaaatacactggtggaactggcggaagccaatccaaggatcgtaggtgtgactcccgccatgccttccggctgttcgatgaacatcctcatgtccaaaatgcccaagcgggctttcgatgtgggtattgccgaaggccacgccgtcaccttctccggaggaatggcaaaagatggcttgcagcctttctgcaacatctattcatcgttcatgcaacgggcttatgacaatattatccatgatgtggctattcagaatcttcccgtagttctctgtctcgaccgtgccggactggtaggcgaagacggtccgacacatcacggtgcgttcgacatggcttatctgcgtccgatacctaatctgaccatcgcctcccctatgaatgagcatgagctgcgacgactgatgtacacggcacaactgccggataaaggtccgttcgtactccgctatccgcgtggccgtggcgtattggtggactggaaatgcccgcttgaagaaattcctgtaggcaaaggacggaaattgaaggacggaaaagatatagctgtcatcagcataggacctatcggaaataaagcaaggagtgccatcgcccgtgccgagtccgaatcgggaagaagcatcgcccactatgatctgagattcctcaaaccgctggacgaagaactgctgcacgaagtgggccgcacattccgccacatcgtcaccatagaagacggaacgattcagggaggaatgggaagtgccgtacttgaattcatggccgaccatgaatataccccgacagtcaaacgcatcggaattccggataaattcgtgcaacacggcacggtagccgagttatatcagctctgcggaatggatgaagacagcctgacaaaagaattgctgaagcaatgtgaacttctgcccgacatgagcaaaataaaagaattaactaactgaagatgaagataattatcgcaggtgccggaaacgtaggcacccacctggctaaattattgtcccgggaaaaacaggacattatcctgatggacgatgacgaagaaaaactaagtgccctcagcgccaacttcgatttgttgactgtcacggcttctccttcttccatctcgggactgaaagaggtaggcgtgaaagaagcggacttgttcatcgcagtcacccccgacgaaagccggaatatgactgcctgtatgctagccaccaatctgggtgccaaaaagactgtcgcccgcatcgacaactacgaatatcttctgcccaaaaacaaggaattcttccggaaactgggtgtagactcattgatctatccggaaatgcttgctgccaaagaaatcgtatcttccatgcgtatgagctgggtacgtcaatggtgggaattctgcggaggcgccttgatactgatcggtaccaagatgcgcgaaaaagcggaaatactgaatattcccctccatcaactgggtgcaccggacatcccttaccacgtggtagccatcaaacgcggaacggaaaccatcattccgcgcggagacgatgttatcaaactgcacgatattgtttatttcaccactacacgcaaatatattccttatatccggaaaatagccggcaaggaggattatgccgatgtacgcaacgtcatgatcatgggcggaagccgtatcgccgtccgtaccgctcagtacgtgccggattatatgcaggtaaaaattgtagataacgacatcaaccgttgcaaccggctgactgaattattggacgacaaaaccatgatcatcaacggcgatggtcgtgatatggacctgctcatcgaagaaggtttaaagaataccgaagcatttgtcgccttgacggacaattcggaaacgaacatcctcgcctgtctcgccgccaaacgtatgggagtggaaaagacggtggcggaagtagagaatatcgactatatcggcatggcggaaagtcttgatatcggcacggtcatcaataagaaaatgattgccgccagccacatttatcagatgatgctggatgccgatgtatccaatgtcaaatgcctgacgtttgccaacgccgatgtggctgaatttaccgtacccgccggagcaaagattactaaaaatttaatcaaggatctgggattgcccaaaggaacaaccatcggaggtatgattcgcaatggcgaaggagtgctcgtaaccggagatacgctgattcgtcccggagaccatgtcgttgtattctgcctgagtatgatgatcaagaagattgagaagttctttaattaagtaataggtattaggtaataagtaataagtattaggtaataggtaataaccgtagctgcttgtacttgacattatatctgatacttggcgcataatacttaatacctattacttattacttaatacctattacttaaaaaatgattaattcgaggatgatatatcgcatcatggggtttctgttactgatagaaacggctatgttaatgtgttgcggtggtgtttcactattttacaaggaagatgatttaaacagttttctgctttcatcagctatcacggcctttgtaggtgtgattatgcttgctattggaagaggggccgaaaagtcactcaaccgccgcgatggatatgtgattgtcagtgtagcctggattgctttctccttttttggaatgttgccctattatataggcgggtatattccaagtgtcaccgatgccttcttcgagacaatgtccggcttcagcagtaccggtgccaccatcatgaataatatagaatcgatgcctcacggaatccttttctggcgggcaatgactcagtggatcggcggtctgggaattgtattctttacgattgccgttcttccgattttcggtatgggaggtattcaggtatttgccgccgaagccagcgggccgactcatgacaaagtacatccccgtattggtgttaccgccaaatggatctggggcatctatgccggtatgacggggacattgattatattactggtattcgggggcatgggacttttcgacagtatctgccatgctttcaccacgaccagtacaggtgggttctccaccaagcagacaagtatcgaatattaccactcgccttacatagactatgtaatatctgttttcatgttcctctcgggagtcaacttcacgctattattgctgatgttcaatgggaaaataaagaagtttatccatgatgccgagctgaagttttattttatgtctgttgcctttttcacggttttcatagcagtctggctttatcagaccagttcgatgggagcagaagaagcattccggaaatctctgttccaagtaatctccttacagacttcaaccggttttgccactgccgactatatgctctggccttccattctctggggctgtcttcttatcgtaatgataatgggtgcttgcgcaggcagtacgacaggtggtatcaaatgtatccgcatggttatcctcttcaaagttgccaaaaatgaatttaaacatattctgcatcccaatgcagtattgcccgtacgggtgaataaacaggtgatctccccctctatccagtctaccgtactggcatttacatttttgtatgcaatcatcgccattatcagcattcttgtcatgatgggcttcggagtgggatttctcgaatctatcggaacggtcatatcaagtataggaaacatgggaccgggactcggcacgtgtggccctgccttctcgtggagtgaattgcctgatacagccaaatggttgctctcctttttgatgcttctcggacgtctggagttgtttacggtattgctgctgttcagttccgatttctggaaaagaaattaaatcaaatatcatacataaaaaaggtgccgactattagccggcaccaccatacaccaattcaaacctttcttatctaaagaaatattatatttttctcagaacaatctttcttactactggcttgttgatttcgtagatcttggaaatcagaacatccatctcttgttcacgtgcgtcgcgaatttctttaaacatcatctttgaataaagatcccgacgtcctttcaaccacatgttcttctctacattttcatccatcacttcaatagcctttctgtcattagcaaacaataagcctttttgttgaaagaaaccaaactggcaccacgcatattctctaaatgttctttcaagttcccaacgatactcattgaggtgcatgatagttaatgcctgctggtattgtggagttttagattctgcagctaaatttataccctttgccaaatcagcagcatcccaggttcctatttcctgatcgtcaatcaacagtttatattgccccttcaaaccggtaactttcagcaattcagtattcatctcttccataaaaggaacttcttttataacttctgcctgactcttcttagaaccccagcctcgtgcaatagtatccaaaggatatggtaacgcctctgccagataatcaaaactaatatctttacctattttcttaatatttgagatggtacaaccttctgccttcactgcttgcttcttatttgcattgatttccatgttggccacatctttaccagcaaaaccttgtgctttcaagaaaagataagccatcaccatatgaccgtcattgtccggatggatacgatcgttaccacaaagagtaaaactaggatctttttgttgaagttcctgatttatagctaccataggcgcattccaatctgtaaattcccaaccatttcttgcagcagattctctttgatattctataattctcttaatagtctcattttttttcttaaagaccgtattatcctttatttgcgcagtttcatcataaggagaggttcccgtcattacgatacgagtatgtggcaattccttgaaacgtttttccatctgctggaagttcttgatgctttcctgatacttctgttcaccaaattctttcgcattatcaccattatattcataataaccggaatcattcataccgaaagtcaccatcaatacagtaggatttttgctaaaaatgtcaccatccaaacgtttattcatatcatacgctgtatcaccaccaatacctccattgaatacacgaataggcatattcgggaagcgggtcatgtaatacaaccagataaatgaatggtaacgaccaccatccgtaatactatttcctaaaaacacagctctatcaccttccttaaaaggtttcacggtctgagcaaacgcagtagtatatgccatgcaaactgctgcaactaatactaaaaactttttcatgttatcaatctatattttacaaatactgttaatctactatgagggataatttaatagtataaactaaaaattttatcaccatctactttctttttattttaaattcttcattttaaaataagaaaactctgccggtacatccttatctccataatgtagtaatcccggacgctgcactctatcccaacgaatcaaggatttacccttgaaaggggtattctgcacagattgccatgtttttccatccagacttttataaaagtggaatatacacccctgttcaacttccaatttcaaatatatctctttacttgcaaaagctgaatcataaagtactgactcaatatcgtctttcaccactttcaaaataagtttatctccttcaattccccaagcaatcaggtttttatcatcgccatacaaggtcaatcctttcagtcctttgcctgtgtttattactttcgtctcacagctatactgtggagattgaggacgtaaacataatgctgtaccatatttattgttattctttggagtaccggataaaaataactttcctttctttagcacagcgtgtatatctgaataaggataattccacgtccaatcaactttcaattgattccccttaaaattatcttcaaaatccgaaagaggctcttgctttgtaccgacaaaaggtataggctgttcagctatagccaaattcccagtcttgaaacgcacccaatgatcatccgtcatttccatttcttgcaaaatcggttgacgcccgataaagaaaccatctcccttcaaataagcgtgacacatataaaacatacgaccatcagatgttctcaccacagtaccatgaccacatgatttataatctccttctccgccatgaagaatggggtttccagaatatttttcataaggtccaccataattccttgcacgtgctacatacacatcatagtcactagaaggaccacaacatccatgggcagcgtatactatataatagtagtcgccttctttaaaatggtactgtccttccataccaattcccttttcatctactaaaagagtaaaaggttcaccatccaaatgcaaaccatcagcggacagtttacatcctaacaattctatcggacgcgtatccaaaccataagctttccaactgatatacaactgcccgttatcatcataaataaatgcatcgatagcttcctttccatactctacaatcggaccatgatcggtaaattcatgtaaaggagaatcagacgtagctactccgatatatgatatcccggtacttttttggcgggcagtataataacagtaaactttattattatgataaaacaattctggtgcccaaaatgaattagaagtccaggacggttgcttggtaaaaacatgccctacctgtttccagtttaccagatccttcgaggtaaacattggataaaaaggcgcccattccgaagaggtacccgtagcataatatgtatcttcaatccgaatgacagaaggatcgggtacatctccccgaataacaggatttgtgaagtagttttgttcttgtgccaccatttgcaatgcaaaacaaataccaaacaaaaagagtcctatctttttcattgcattttatttcttaaaaggatcatacacagcaactgctacacgtgaatctgcacaaccataatataagtaccatttctgattatggaatactaaaccttctataaatactgttcccgcgggatattgtccgctcttctcaaaatctgattccggaatatagaatggtttatccaatcggtcaatcaatttagtcggatctttagcatcgaataatgcttgcccggcacaataagaattagcagtatacaatgtatcaccctctgcacctgacttattcttaccattataaagtaataaaatacctttatcagtcataattgcaggtggaccacactcggtcaggtcactatcaaatttaccttcacgaggagtaattacttttagaaagtctcctttttcatcaagcatcggttcccaattaatcaaatccgtggaagtagctacgttcacaaacttttctccccaatacatccaatattttccatcaattttagcaatcacttgtttgccatctaccaattttgtgacaatagaagcagatttggaaaattcatcaaaaaaacgtccgccatatgcttttgcaaaagccggaccatatttttcccatatctgaagatcacgagaagtagctacggcaagacgggcctgcttacgattccattgtgtataaagcattacataaaggccatcatctgtcacagcaactcgcggatcttcacatccccctggccattccaattctttctggttatcatctgccggataaaatacaggaacagtcatccggttaaaatgcaaaccatcatcagaataagcataccctaagcgagaagtgcgtgaaccaattcctaccgccgaattatcttctgcccggtaaagcacaaccactttaccatcataaattgtagcagccggattaaaagtatcactagattcccatgctaccgaatcctgcctcattgggcaataaaaaacagtagtggtatcaggagagacaattgggttaataccttccggacgttgaaaatccgcccatgcccaatcggggaattcggatgtttgcttcttctctccacaggaagtaagcactgctgcaaccatcagtaaataagctatatgttgaaattttcttttcatgattgttctttataataattcattaattaaggaaaagatggtggaacgacctttgctccccacttcatgtccggtttacccgaagtactgtattcgatagtagctccgctattgagctggtcccagtctatccatgtactttcatatgattttccgtttagtttcatggatttgatatagatgtccttttctgaacctccctttatcacaatatcaccttttttcaaatgcaccttgacagatgaaaagattggagtatttaccgtaaatccccccacacccggaatttccggataaagcccgatacaggcaaacacataccaagcacccattgtacccagatcgtcatttcctgggagaccatctatcttacttgaatattgctcattcaacacacgattaatgatttcttgtgttttgtatggacgaccaatccaattatatatccaaggtatgtggaaactcggctcattaccggaagcaaaccatgcatcgttatatccggcatccaggcgtgtaaagaattcatccaaccgtttctcggctttttccttaccacctattatttctaccagaccggcaatatcataaggcaccatccaaaaataattcttataagtagattcacggaagtcttcaccaagagatttccacgatccgtccggattacgtgattgtagccaacctgtgtccggattatacaagttcttccatgaacgggcaaaatggaaataacgccaactggcaaattcatctcccaccgcatgcaatgcaaactgtccgatagcaaaatctgctgaggtatactccaattggatagatgcattataatagcccttatccaaatattgcttcaatcccgggcgagtttccacaccttgcgacttagaacccggttcctccgctccttttctcataatcttaaagataggtttcggatcataattacgagctccgaaagcataggcattagcaatcaaaataggagtcggatctccctgcattacccctgtttcaatattagccatcacccaacgaggaaaagagccaccggactgttctgcaaacaattgatgggaaataacaatatcggaagctacctccggatcaagcatggataataattgaatttgtgtacgatacgtatcccaattactaaaagaagtatagtgtttagaacgtgacttatgcactctgaaatccgctcccatatattccccattcacatcgctacaaacattcgggtgaatgaaagaacgatataaatgtgtatagaattggatcgtacgatcgggattggtaccctccacttcaatcatacccaaataatgattccattttgcctccgcttgattctgtatcttttggaaatcccatcctgcattttcggctttcaaattttcacgtgcattctctactgaaacataagaaactccaatcttatattgaatattcttctttttgtttacatcaaaagtaaaatatacaccagaatattcgccttctgcaaaagttgtatttggcatcaattcttctctcttccatgtgccggtttctaaagcatcggtatcaaactctgctacaaaatagactttatacggagtgcggagtccacagaaatttcctccttctgcataaccttcacacttattcggagcagtaataacaattgcagcttgttcaataggagttgcagaaatacctccaccaatgattattgtaccatactgttgatctgccggatattcataactagccatacccgttcgctcggtcactgtcagttttgccttgatatcctcttgcaccatagcctcataataaccggcatgtcctttttcttcagatacacttatacgatagttgaggatgttatcaggtgacattttcagttttcctttcacagggaaagtggggaaatttcccatatgttcacaaccaccaccgctcaactgattgataacgaatcccgaccttttggaaaaataagatggagtaaattgtaccatcccataaggataagttgctcccggataaagatatccggaagtcagtccggtaccttttgttccaatcaacgtattgacttgatggacatagtcaccagccacagcttgtgttgcaaccattccttctaaaacaagagagaataataaaataaataagaatttatgtttcattccggatgttcttttagtagagtctgtttcgaataagaaacaggaataccactaatagtaccctgtttcgttattcggataaaatcgatcgtattattgaactttattctttgattctttattctttagacaaagagaaaggtgcagcatacttccaagtacatctttctttattaggctggcttcccatttcaaatttcaagactcctccttctgctatatcatcataatggatatagtttttatctaaaagtctgccattcaaagtagctgattgtatatacaaattttctttgctattttccggtgcttcaatcacaaacttattgccattttccatagttatggtagccttcttaaataatgggctgccaatcacatattcatctgtacccgggcaaacagcatatatacccaatgagctcagaatataccatgaagacataccgccttggtcttcatcacccggataacctttttctgttgaattatataatctctcaacaatctgacgtacccaatattgagttttccacggctgacctgcatagcaatacaaataaggcatgtgttgaatcggttgatttccgtgtgcatattgtcccatattagccaactccatttctttcatttcatgaataactccaccataagtgcccggtttaattatgttaggaatagtaaatacagaatctattttagtagtaaacttttcatcacttccaaacaagtcaatcaagccttgtacatcatggaacactgaccatgtataatgccatgcatttccttcacagaaaggccccccccattccagtggatcgaatggttcctgccatttaccatcaacaccctttccacgcataaatccgatagacttatcaaagacatttttatagttgtacatctgacgggcaaatacttcttggtaatgtttatttccaaccattttagcaagttgatatccgcagaaatcatcatatgcatattccatagtttgtgcactagaacccattgattcaggataaggaacatatcctaactggaaatattctttccagaatccacgtccgttagcacccccccaaggacctttattcattgcttcatgcgcataagccttcagtgctttttcaggatcaaaatcacgaattccttttgcccatgcatctgccagcaatgaaatagaatgattacctaacattcctcctgtttcacccggggaagaccatgaaggcaaccagccgcattgctcctgggctgccagaagagcattcatataacgtccctgcattgttggatgcaaaatgtttgttaaagggaattgtgaacggaatgtatcccaaaatccattatcagtatacatgtaaccatcataaatcttaccattatatgggctataataatacggttcaccattttctttgcgttcgtagaatttgcgagagaataagttagcacggaaaagacaagagtagaaagtcttcatctgttcgtccgtacatccttcaactacaattctattcagcacttcattccaagtcttctgaccgcgtgctttcgttacttccagattcttatccttaccaagttctttatttaaagttatcagagcctgctctgcacttatatatgaggaagctgctttagcctgaactttcgagccttttttaaatttaataaatgcaccatatcctttacctgctccatctaatttctgtggaaacacttcatccttttgattttcccatacaccgtaatcttcgaaaggtttatcaaattgaacaacaaaatagttacggaatgattttgaatcgttcacaaaacgttggttattgacccaaccggagatttgtcttttagccggatcaattttgatttcactcatatccgtatatccatctagtaccagataggcatctcctgtagtaggataggaaaaacgtaaatgtacaccacgagtagttggagccatttcagtagtgatgtcattatcgaatgttactttataataatgaggtttagctatctcattatcgtggctaaacttggtagcacgggcatcttgatttacaaccaactcacctaccattggcatgaaagaatatacagcataatcactcacccaaggactacattgatgtgattggctaaaagaacgaatcttatcaacagcatacatatacttaaatccatccccatttttacctgtttgcgcagaccacatatgcataccataaggcatacctgtagtaggataagtattaccgtagctcaagccaaaattagaatcggtaccttgtagcgtattcacatactgtaccagatcttttagctgagcattcatcacagtcggatacaaaaagaagataattaaataaactagtttcttcatggtttattattgaatatattaattaaataaagacttactatttattgacataagtaatacctttccaatcatcagtacggaaaggagacattggcagatccgcaccgttatacatattgcatatcggataatcagcccatgcataacgtactgcaactgggagggtaacttcaggtgaggaaacaacaaccgtatttccttcgatcacagcatctgcccaatgaaatttatggtctacaccagcaatggtaaatcctttcggcatctcgccattcgccgtcttcagaccaccatcaatatgatcaaagaagatacgaattttatttccttcaatcttataagatttatatattggaccggaataaggaatcttctcgccataagtctgcgcccgggccgctaatgccaagcgtctacccacttcttgcttgttcttcggatgaatatcaaactcctcacctatatcaatagccacagccatacctgtattttgcaaatgtaaagtccgagtttgagcttctctcaattccgcccaagtagattcaacaggagctgtttgtttcgctgtaaaactagctaactgcaccatatagaaagggaaatcatatccccagcgatttctccaatcagtaatcatcaacggcattaaatcacgatactgaaaagcctctcccgcatttgattctccctgataccagatggctcctttgatagcatagggaatcagtggataaagcatagcattaaataagaaagtaggagaattcggattccatgacatatcaataggcattggcgcaacctctctcatatctaaagaaacctgatatttccaattaccagccaactggatagcttctgtattggaaagatgaagtgaaatactttcaggacttccattgataccacccgtaccaccagtatccattacacgtacagcaatcaccgcttttcccttcttcacaagttctttcggaatcttatagcttctaggtgccatccatccttctgtatgtcctatctgtataccattgaaataagtaaaatcattatcatcaataacacctaaattcaagatcaaatcttttcctgcccaaccagccggaatatcaattgttttcctaaaccaaacaagtccactaaatcctggtaaatcttgttcttgcatcaaacctggaactttcatagatttccatgccgcatcgttaaaatcaggagctgcccatatagcctccccattaacacaccccttgtcaattctttcaacttcagctttccaagtctcaccatcttcttcaaactttttcttgcgtccttcctgagatgcaggcaaaccgaccaatgcttcgagtcttttcttcatactcggtatagtggatagtgcctcgttactggtccatgtttctataattgttcctccccaagatgtatcaatcaatcctattggcacattacggtatttattcaaatcacgtccaaagaagtaacctgctgcagaaaagtccgctacactctttgatgtgcacacttgccaaccattctcttttgctgtaatattctcaacaggtgtaggactcatcgcattttctaccagtaagaaacgaatattaggataattatttgcctcttctttctcctgttcatagttcttcaccttgccccaaccttctacctgcatttccatgttggattgtccggaacatatccagacttcaccaatcattacattagaaagcttcacctttttaccatcagaaattgtaatattataagggccacccgctactggggtagcaactttcgtactccacttcccttgtgcatcagcctgaatagtatattttttctgatcccatgaggtcgtaatttctactttcttattaggcttagactcgccccatataggggcttgcgtttgttgctgtaacaccatattatccgaaaatatcggaagcaatttcacttgtgcagagagtgtagcactccctaatagaaagaatagagagattacaaaattcttattcatattaactacttttttatagtatacaatttttcaatttactttatgacgaacaaatatacaataaccactaaactaacttcttaaaaaagtaaaagagaataatgtttttatagcaaacattattctctttttatctaaaccctacttatttactagaagcccaactgaactccaaagtttataacacgctgattcatataagcatcaccagctgtattggtcttaatttcagggtcttgctgatatttatcataaccggtaaaagtcagtaagttataagcatttacataaaaacggacattgtctaagaacttaggtaatgctgtcttgggaagttgatagcccaagtcaacagtcttcaaacgaatataccatgcattaatcagccaaaaatccgaattataagcagaagcactatttattgtaccatcttgcattgtcaaacgtgggaactcaatactttctc

SEQ ID NO: 4558 - DNA, 41131 bp, Unknown
  gut microbiota DNA sequence
tccgtcatcattcaataaaagaagaaaaaaaacgtgttttgaggtataatagtgcgataccaaatgtggtatatggtacaaggcaggtgcatttttctttcggaaaaagataaaaaacacgattgctataaaagactctatactgtatgtctcactactatccttttgatttcttgatatactccgtaggtaagcatccgaagtacttcttgaaactggtggcaaaatatgacggtgtattgaatcctaccatagtactgacttccgctaccgtatatcgtccgtctttcagtagcttggccgcttcattgaaacgaatcttacggataaagtcaatggttgattctccggtaattgcttttagtttcagatgcagattagaacggctcatgttcatttctctggcgaattcgtcggtagagaattcgatgttatccatattcttttccacaatcgccatggcacgtttcagcaaggcttcatccattgcattgaatgtgattttctcaggttctacttccaatgatttggcgtacttatcgagcatccgtctgcgtgtacgcatcatgttctgtatcttggttgtcaggatggcaagagagaatggtttggggatatagtcatccgcacccatttgcagaccttccatctgatctttgatatcggtctttgcggaaagaataataaccggaatatggcaagtccgaatattttgtttcacgttcttgcatagcttgataccatccataaccggcatcatgacgtcggtgacaatcacatccacttcgttgtctttcagtttttccagtgcttcttcaccgttcccggcttccagtgtgttgaacaaatccgccagtccgttattcaggtaacggcggatttcgttattatcttctacgatcagaattgttccgcgcttcttatcaccggattccacagattcgttttccactttctccgtgtcgatgaaatacattgctttcgaattggtagaatacacttgctcttcttcattctgttcgttattggaagctaactcggaaggtttgtaaaccgacagatcctgtggcagatagacagagaatgtactgcctttgttttcttcgctgtccagttcgatacgcccatgatgaagttctatcagacgttgtactaacgaaagtccgataccacttcctacgtgttcactttctatctgatagaaacgttcaaatatctttccctgtttgttgatagggatacctatgcctgtatcgctgacttgtagcaatagccagccgttctcctctttcagagttacggtaatgctttgcccgctttccgtatatttaaaggcattggaaaggaggttgtttactatcaattccagatagttggcatcaaaaagaacttctttgtcttccagttcagagtgtagagtataagtaatctttttgtggcgtgccagtttatcgtagaaaaggaagttgtcctgtatcagttgatgagcgtttccttttttcgcttttagttcgaacactccgagttcagcacggcggtagtccatcaattggttgaccagatgcagcaggcggtttgcattccgttggatatattccagttggttacgtgtccatcggtcgctgattttgttaatgatctcttgcaggggagtcagaatcagcgtcaaaggtgtacgaagttcatgcgagatgttgatgaagaaacgcatcttcatctgattgatttcttcctgatgttctttgtctctgcgttctatttcaagctgggcttccatacttttgcgcatccagaagaagcggaaaacaaaagtgatgaaacctgcgaaggttgcgaagaagatgagtagtgcccaccaggtcttataccagattggcagaacgataatctccaatgctgtagggataggattccatttgccatcgctgttggctgctttgacaaggaactgataggttccctgtggcaggttagagtaggagacggtgcggctgtccgtcagataataccattccttatcataaccttccagcttataggcgaaagtattatgttgtcctgagatataattggataccacgaactcaatggaaaaagcagtttgccaggatttcagtgtgatacttttcgtttcactgatgttcttggtcagaataccggtctcatcatccgggcggactaccttattgaacagttgcagtttggtgataaccaccggaggcgtataaggattgtcgagcaataattccggacggaaagtcgtgattccgttgataccgccaaaatacatttgtcccacagacgtacgacaataagaagcggtattgaactgattgctttgcaacccgtccgattctgtaaagttacggaatttttccgtttccggattaaaacaggaaatcccccggttggtacttaaccagagtcttccgaaggaatcttccaaaataccgtatactacgttattcggcagaccgttggtcgtgttataccgtttgatctgcttgtctttttcattgaaacaataaaatccttcgcgtgtacctacccagatgattccgttggaagcctcgtaaatacagttcgtaaagagcttcgtgacgttggaaaccggaagtatggatgctttttgtatatccagaccttcttgtttaaagactgatagtccctcttctccaccgatccataagcgtttatgggagtcgcggaatagtgtcgtgatttgtttggagacgaccggagtgccatctttctctttttcaattgtagtaaaacttcgttgttccggattaaaacgaaccagtgcactgagtgttcccaaccagagattcccttctccgtcgggaaggatggcatagacattctcatttaccagctggctgttgcgttggttaaagttttctacctgaccgctgttgcggtgaaggatactcagtccgccggcatgagtacctatatataccaaagatttcttttcgtctacatataccgccttgatgttgttggaaccgatgcctcttgcactttcatcctcttgcagtgtataagatgtaaatcgctgtgtaatcggattataaagattcaatcctccgtcattcgttcctatccacaggtttttgtctttatcttcgacaatacagcttactacattgtcgcttaacgagtttttataaggaatattgcggatattcttgaagcggttccggatagggtgataatagttcagaccaccgaaataagttcccagccacataccgccctgagaatccataaagatactgcgcaccgaacgttgtgacagactgccgttttctacggggttactgctgtacgaggcaaaagaatcagcaccttcatgataaatattcaagtcgttgaaagttccgatccataaacggttttgtgaatccattgccagtgagcggatgtaattggaactgatactcttcgggttggaaggagaatgcagataattctttatttccttcgttttcggattaatcaggaacagtccggctccttcggttgccacccagatgcgggtaggggattgctgaagaatagcctgaatctgtttagtccctaaaatggggattactttttcaaaagttttctgagtaatagagtaagtatagagtccgtcggtcgaagttccgatataaatttggtcaccttgtctgtaaagagtggaggcgattgtcttatgcatcgctgtgctgaaagaatcatctataaatttggattctttgatatcgaacatgatcagcccttccggagtactgataagtaactgttccggtgaaatctcttcgataccgttaacttgcaaatgtttcccattcttttcatagaagaagttctggaatatgtctttttcctcatcataacgggacaaaccatcacgtgtaccaatccatacccgtccctgactgtctgtttttacaatacgggagatgtcgttggcgatactgttcgggtcatcctcattatgctgataaaccgtaaatgcatatccgtcgtatttgttaactccgtcataagtggcaaaccacatattgccccttttatcctgatcgatggagaacaccgtactttgtgatagtccctcattgatggaaatataggaaaatgtgatttgttccggagtttcagaaaaggcggaatgcattcctaagcataggaaaaacaagtagattactatcttcttaagcttgctcattattagttcacgagattaataatgacgccaaagatagtaatttcctttaaataccccatgaataaagtacaaaagactgtattcttttggatagtttcgtagagataataaataagcccggcatcataccgggcttttatgcttacagaattcggttcagaaaccggggcttacttggataagtctcctatttcatccagattcttctgaatatcttcgtcagtcagtgcgtagttcactaaatcgcctgccagatatttgtcataagatgccatatcgatcagaccgtgtccggacaggttgaacagaatcactttctcttctcctgtttccttgcacgcctttgcttcgcgtatagcggcagcaatcgcgtgactggattccggtgccggaataataccttccgcctgtgcgaacagacagccggcttcgaaagattccagttgctggatatctactgcttccatcagattgtctttcagcaattgggagacgatgacgcctgcaccgtgatagcgaagaccgcctgcatggatatgggcaggagcgaagttgtgtcctaatgtaaacatcgggagcagcggagtatatccggcttcatcaccgaagtcatattggaatttaccgcgggtcagcttcgggcacgaagctggttcggcagcaacgaaacgcgttttctttccttccaggatgttgtgacgcatgaatgggaaagagatacctccgaagttggaaccgcctccgaaacaaccgattactacgtccggatattcgcccgccatttccatttgcttttcagcttccagaccgatgatggtttggtggagagtaacgtggctgagtaccgaaccaagagtgtatttacagttgggagtcatttgtgcaagttcgatagcttccgagatggctgtacccagagaaccctgataggtggggtgagccgtcaggatatcttttcccgcacgggtagacatagacggagaaggagtgacctgtgcgccgaaagtctgcataatgctgcggcggtaaggcttttgttcgtagctgatctttacctgataaactgcggcttcgagaccaaaaactttggcagcataagaaagggcggctccccattggcccgcaccggtttcggtagtaacgttcgtgacgccttcttctttgcaataatatgcctgagccagcgcagagttcagtttatgagaaccgatcgggctgacactttcgttcttgaaatagatatgtgccggagttccgagcgctttttccagtccgtaagcgcgtacaagcggcgtactgcgataatatttatacatttcgcgtacatcttccggtatttcgatccatgcgtcagtctggttaagctcctgatgacacagttctttggcaaagattggatacagatcttccgctttcagcggctgttttgttcccgggtgcaacggcggcattggcttgttcaccatatcagcctgaatgttgtaccagtaatgtggaatttcttcttccggtaggatataccgttttcttttgtcactcatgttattgtggtttattagttttctgctgccaaaagtaggcaaaatttttaatattcgtgtaattttgtcaacaaagaatcgaattcgattgttattttagttaagtttgcacggcatagcaaatacgacaataaaaaaatgtgatatgaagatttatcataaatttctgttatatcagaataagcttctcaagccctatgtacgtatcctgctggggttggtagaagcactcacttatctggcatctctgttgttgattgtcggagtggtttacgaacatggttttccattgtccccggtcgaggtacagcagatacagatcttgtataaagccgtatggattatctttttaattgatgtcaccctgcatatttcgctggaataccggaatacgaaaaagcaatatcgaaggctggcatggatattgagcgtattgctttacctaactttggttcccgtcatcttccatcgtccggaagaagagggagcaattctgcaagtctgggaatttcttcacgggaagttttatcatttaatattattgttggttttttctctgctgaacctgtccaatggcttggtgcgtcttttaggacgccgtacgaatccgtctttgatactggctgtcagctttatggctattattctgatcgggacgggattgctgatgcttccacgatgtacggtcaatggcatcacttgggtcgattctctgtttacagccaccagtgccgtctgtgtgacgggcttggtgccggtagacgtatccaccactttcaccactagcggacttgtagtcattatcctgctcattcagatcggcggactgggagtgatgacattaaccagtttcttcgccatgttctttatgggaaatacttccatttacaatcagctcgttgtccgtgatatggtcagttccaattcgttggggtcgttactgtccacactactatatatccttggatttacattggtcatcgaaggcattggcatggtgtccatctggttcagcattcacaatacgcttgggatgaatctggaagaggaactggcttttgccgccttccattccatttcggctttctgcaatgcgggtttctccacactttcaggcaatttaggaaattcgatggtgatgaccaaccacaactggctgttcatctccgtctctttactgattatcttgggcggtatcggttttccgattctggttaattttaaagatatcgtattataccatttgcgccatttctggacgtttgtgcgtacccgcaaactggaaagacataagatgcagcacctctacaatctgaatacgaaaatcgtattgatcatgactttcctgcttttgctgatcggtacactggccattgctgcttttgagtggaatgcctcttttgccggtatgtctgtggccgataaatggacgcaagcattctttaatgcgacctgtccgcgaacggctgggtttagcagtgtcgatctggcatcattgagcgtgcagacgctgttggtttatctcttcctgatgtgggtcggcggcggttcgcagtctacggcaggcggtgtcaaagtgaatgcttttgcagtggtagtgttgaaccttgtagccgtattgcggggaagtgagcgggtagaggtcttcggcagggaattgtctcatgactctatccggcgttccaatgcgacggtcgtcatgtcgctgggcgtattgtttctcttcatcttcatattgagcatactcgaaccgaaagcctctttgctggcactgacctttgaatgtgtttccgcccttagtacggtaggatcgagcctgaatctgacgcctcaattgtgcgatgccagtaaattgctggtatcgttgctgatgtttatcggacgtgtcggtctgattacgttgatgctgggcatcgtcaagcagaaaaagaatacaaaataccgttatccgagtgataacatcatcataaactaacatcatgaagtatattattattggtctaggaaattacgggcatgtacttgccgaggaattatcggcattggggcatgagatcattggagcggacatcagcgaaagccgtgtcgactcaatcaaagataaggttgccactgcttttgtcatagacgctacggacgaacagtcgttgtcggtgctgcctttgaatagcgtagatattgttgttgtggcgattggcgagaattttggagcatcggtacgtgttgtcgcgttgttgaagcagaaaaaggtgcctcgtatttttgcccgtgccattgatgcggtgcacaaggcagtgcttgaagcgtttagtctggagaagattctgacaccggaagaggatgctgcccgtagcctggtgcagttgctcgactttggggcgacgatggaagcgttccgtattgatcaggattattatgtcgtgaagtttactgttccgaagaagtttgtaggatactttgtgaatgagctgaatatggatgaagagtttcatctgaaactgatcgcactgaagcgtgcgaacaaagtcactaattgcctgggcatttctttgatggagcgtcatgtcaagaatgagttgcccggagatgaaaaggtggaagaaggagacgaactggtctgctacggtaaataccgtgattttcagtctttctggaaagctatttaaagatacatcacgctaaataataaatgaaatgcgattaaccaacttactatttacgacacttttactatttgtttccgtctttgcacgaagtcagaagagtaatgaatttacagtactgcaatggaatgtatggcaggaaggtacgatggtaccgggaggatatgacgctattgtcaatgagattgttcgcctgaaaccggactttgtaactttcagtgaagtcaggaattacaataagacgaatttcacagcccacgtctgtgcttcgctgaaagagaaggggctttcgtattattctttttatagttatgacacggggctgctgagcaaacatcctatcaccgattccctgactgtttttcccgagaaagacgatcacggaagtatctatcgcctgaccagttcggtaaacgggcataaggtagcggtttacacgtcacatctggattatctggattgtgcatactacaatgcccgcggctatgacggttctacctggaaggaaataccgttgccggcatcggtagaagagatactgaaagtaaacgttgcttcccagcgtgacgatgctatccgtttgtttatcactcaggctgagaaagacctggcagcagggtataaagtgattatcggcggtgactttaacgaaccgtctcactgtgactggatagaaaagaataaagatatgtacgatcacaatggcttcgttgtgccctggacggtaacgactttgctcgaagaagccggatttgtagatagttaccgcaagatatatcccaatcccttgacacatcccggctttacttatccttcggacaatccggcaaaaactccggagaaaatcacatgggctcccaaagcagacgagcgggaccggatcgactttattttctataaaggcgaaggactggatgcaaggaaggcggtcatcttcggaccgaaaggttctattgtccgcgcacagcgcgtgcaggagacatccaaagataagttcttattgccgcttgatgtatggccaaccgatcacaaaggattgttggttacgtttatctgtaaataatatcagtagcatctatattttcttcatcctatataaataaaaacaaatattatctgtcacctgtcactgttttagatgtaacaggttgatttttaggtataaatatggtgacggcaacgagtgacagcagtgtgatggcagaatttgccgtcacgctgttgccactcgttgtagtttatttagggatattctgtaaatgtccttattttctataaatgaataggataatattaatttttagagatttttctcttcattttttatatacagatctcaattattcttcctttttttttgataatattatttacatatctgtatcttacatcctgaaatcatgatgtaggggcctgccttttagcaggaagttaataaacttttccgtttttcatgtattagcgctgattatgccgccagccttttcttcttttctatcttatgattatacacacatgactatagctacacgttcaatctgatatacgtagtttcctaatgagaattgcgcattgggtggcaacgagtggcactaaatttacgttgaaaatactaatactagttaatcttgaagaagtaggctgtgttttatagcatgtactgcttatttattatatatttgcaatagttatttggtatgaatgattgtgaagaatgcaatgatatgcacatatactgtgaaatgaatgtttttatttaacgcattgctattgtgcttgctactcaattatttgattatagtgtgcaaatgtttaactatactagtgtctatataaatgctaccagatagatagctggttttcatttattggttctatatttaaatttttaatatggtcaaacaatttgtttatagggattctctcgaaaagaatcaatccaataatattttagataatataaaggtttgttctaaaggattttagtatataatgaatattgactcgtcctgcagacaaaccaatatacgcataatttaaattaatttgtaatcaccacttagactaattataaagcaattataaatgaaatcattatttttaattttgtttttatcagttatgtttatttcttgtaaggatgataataacctacgagaaattactgacgacgagaagatttttgaatatattggattaaaagataaagcaaatgtaatagaggcccaagaaaaagtttggaatacttatgggcgtccttatagaccgtctgttcaagtagttgatggatatatttacatagcaacgtggtcggggatatatcgaaagccagcgaagtcgttgaataacatggactgggaaaagtttgcgttctccggtcttccagtaatccagtttgttatgaagggggattctataattgcaattacagcttgcactgacgagaaggcatttgtgctttcaacagatggtggaaaaacttgtaaggcgataacgccaccggagtttttaattgaagagaatgagttaaaggtcataccttactcaatatctcaaaactcccaaaatgcgaattcactattggctttggtcgaacctattggagtagtgaaatcggtaaattttggaaaaagttggaagactatcagtactttttatggcggctatcagaattggtttgttggatttcatcctcaagacactacaaatatttacaatacaggggaaactatgatatttgaatcttttattaatgcttcttgtaatgatgggaaagattggataatacttgagaatgaaagaaataattgtatacatcatatagcttttgacccaactaatccaaatataatgatatattcaggggaatattttttaaagaaaactatagataaaggtcggatttggaatcctgttttgaaggatgatgtatatttttacaaaacaatttatgataagagaaatccacaaatactatattctactggagtcacccgtattcctaaagaagaacataaatttacaattcatcattctactgatggtggtgatacatggtctatactttatcaagccgatttattgggtgtaggtggaattattgatattgaacaatatgatgatattttaatactttatacttatactgatggtatttatatctatcgaatcaaatgaataatacttctcttggtcacttttatgcaaaatttcctagaggaaaatttacaatacttgcccgtgcaaagtacaatcagttaggcagagaagaaagatgctccttatctaagttataaatagtggcaaaatgttagggtgttcagtttgacattcttaatgcaattgttatcgtactgttaaattcttctctaaaatgagaacatcaaactgggcaccctagaactttagtaatataagaagaactgcgatccggcatttactgtaaatggcggattaatgataacagtttgaataagctgtaggcttgataagtttccactgcttgaaactagagttccatcggtgagaaactgtagtttcatcagtaagaaaccatagttccaaaggcttgaaaccaaaagtatcgagcgtatgaaaccaaagtttcaagcaatagaaactagagtttcaagcaatgggaactatagtttcaaatagggaaacgaacttgacttgatatcagtagaagtgcaggagggagctaagatgaaacagcagtgtgacggcaatacttgccatcacactgctatcacacgttgctgtcacggtcttatggtttaattatcagactattatcactcgtttggtgacaggtgacagcaatttttcaaatatatttctttatgtagaccgattatttcgtcagaagacggatacttcctgctttcactccgccggctttggcagtcagaataatttctccggctgtttcattcgtttgtacgatagctgtaagcattccgttgaaagcgtgcatcttcggaagatggaacaggtcgagactcgttgggtcaccattggctccggcacggtatgttccggctcctttgacggagaagttaatcaggcggttgtcggcagggcagaggtttccgtctttgtctactattttcacggttacataagcaaggtcttttccgtctgccgtcagttcattccggttgctgaccagttcgatgtgatgaggcttgccggctgtacggaccactttttctgctactgcttttccgtctttatcataggctactactttcacttcacccggttcatatacagcatccatccacatcaggcgataacggctcttcaatgaactgttgttcttgctttgtttgccatagcttttgccgttgataaacagttcggcagcagggtagttggtgtaaacaaatactggagttacttcaccttcgcgtcccggccatgtccaatgcggcaggatatgcagtgtttccgcttccttattccatatgctgcggtataagtaatagcggtctttgggcaaactggcgaggtcgataatgccaaacatggaactgtgattgggccaggcattggtatcgtaaggagaaggctcacccaagtaatcgaagccggtccatacaaactgtcctatggtccagtggtaatcgtctgccaatgcaaagtcctcgtcagggatatttgaccacgaacaagcctctacatcataagaagaacattgatggtcgtcgtatatcgcacttttcttatcctcaaccgggaatttgtagactccgcgtgaacttacggtagaagcggtctcactacccagaatgagattctgcggaagtttggagtatgcttcctgatagcggttggcgcggtagttcagaccgggaatatcgatcatggcggcaaatccgttggcaagcacacaagatacctggtccatgccgcaggtgacggggcgggtaggatcttcacgatgacagatgtcttgcaggaacttcgcaactttgtatccgacagggctgcattgggtgggaacctcattgccgatgctccacattaccacacaaggattgttgcgatagttgtgcagcatattcaccatatcgcgttctgcccattccttgaagtaacggtgatatccgttttcacatttggcgatgtcccattcgtcgaacggttcgatcatcatcatgaatcccatttcatcacacaattccacgagttcgggagccggcatgttgtgggaagtacgaatggcatcgcatcccatgtctttcaagagtgtgagctggtggcgaagtgccgctacgttgatggctgcacccaacggacctaagtcatggtgattgcataccccctgaaatttgcggtgttttccgttcagatagaaacctttgtcggcaatatattcaatgctgcggataccgaaacgggtagagtaggtatctaccagctgattgtctgcatacacgttggatacggctttgtagagagcggggctttccggcgaccagagttgaggcgcattgacgatgaagttttgttcaaacggctgcccgtgattgatgcgtcctttgttttctttacgtgtcactacctttccatccggtgacaggatttctgtctctatacggatttccgtcttttcgccggcattctctatctttgtctgcaggcgtatggcggcaaattcatcactgacatggggagtggtgatctgcgtaccccatacggggacgtggactttgtccgtcacaatcagatgtacattgcggtacaaacctgctcccggataccagcgtgaagactgcggacggttttccaggcgtaccgccagtgtattgttctttccgtctttattcaggaaaggggtaacgttgcaatgaaaagaattgtagccgaaaggccagaagcaagcctcctgtccgttgacgtatatacgcgcttcgctcattgctccgtcgaacaagagagtgacttccttgtcggcgggaacatcgaaactggtgcgataccatccggttccgacatatggaagacctccggtacgtccggttttcagtgatgcctttttctcaaagttctgtgtgactgctacattttgcaggtcgttgttcacatcgaaaggtccgaagatggcccagtcatgtgggataacgaccgattcccatttagtatcgttgtagtcagtctgcgcagcttccggaaaatctcctttactgaatttccagttcttttcgagtagcgtttcgctgcgctgtgcttgcagcatactggctgcgctcatcaaaagtacagttagcaactgtttttggtgtttcatgttcattttctctttttcaggtatataaattagggattcggggtaaagttatgaaaaggattcaataaatttatcgtttgaaggcattaaatgcagaagtcggcttgccgctgtcgtcaaataaacctttgtgataccctttccaaccaccgtagcactgaggctcccaggtgaatacgcccagacataggtctatttctttcgcttttgtcacgaagtcggtaaaaaatgcttctgcttcttcgtaattccagttaatgccgagttcgcacatcatgaccggagtattatagcgttcgatcagattttttatgttgcttatgcagtcgttgttcagcttgcgccagtcctgtgtctctggatcagggtagagtgacatgccgattacatcccatttgccaccgtctgctttcagtccgtcgaacagccagatatagcggttgggattgttgccttcgtcgatatgtacaatcacttttgcctgcggatagattgctttgacggcatcgtaaccggaagttaccagtttggcaaagttggcagtgtttccgctgctggccgctccgtcgggtttcagcatgcccgaacgtgtttcgttgcctacctgtacccattccacatcgatacctcttgctttgatggcactcagaacatcagtcgtgtggtcggctacagctttctgcaattcctcgaaagacaagtctgcccaggcagcaggtttttcctgtcgtcccggatcggcccagatgtcgctatagtggaaatcgatcatgatacgataacccagattgtgggcgcgccatgctttggtcacaacatcgtctttgtcgcaccagccttcgggattgaaatagccttcgttttcagaccatccctggtcggggtttacccatacacgcaggcggatcgagttcattcccagatcgcggagcagggacatgcattcgtggtcgttgccttcggcatcatagaacttgtagcctgatttctccatttctgtcagccagctgacgtccgctcctttggcgaagccggacatatcatacacattctcttgattttccggaaataccggcttttcatcgttgtcgtcgcaagcggtgaagaaggctccgcacaacagtgcggaagccatcaatatgtttttgaattgtttcatcattgttcttcgttatctaaaggttattgctgaacggcggaataagttccgtcaatcaggttcactgtaattgtataagtaccagccttcagcatgataccatcgccattgtaatatagcttgccgtcgcttcctccgtagaaagcagtccatgcattttctatatagaattgggctccccatttggaatctgttgccagtgtgatggtaccggagtattcgccggcagttccggtgcttgcaatcgggttgaagctgttgtcattctctattccgtagtaacaatagatattgtcgccaagagcatacgtcttataagtaagctctttcagagatacatcgaacagatacagtccggcatcgggagcaggaatgttatcgccttgtccgttaatcagcgtaccgctttcggctgtgctggcagcatcatccttggcgatggtgtacattctgctggtatcccactcattgcccgatgagaataaggtcatcgcatagtttccatatttggagttaacgtctacgatgccggcatacttctgttcttctttgtaatagacttctattttgtggtcgtatgcccactcagtgtccggaccgattcccggcagatacagatattgtccttcttccggttcgggttccggttctacggagccgccttcctctacggtagctgtccattgctgcggattactcaggtcgatgctcagtgtacattctcctgtttgcggaacattgacagtgatatctccggcagtttctccaaagctcaatgcagcgttgctgccactgaatgcgacaggggtgtccttggcttttgtatcgtcgatgtcataaccgccattgtcgttgaggttggcgcaggtatggtcatacagtttaccggttccgtcaatccggacggtgattgttccggttgcatccgcattgaatgtagcggtccatttccggctggtacggtcgaatgtcatggtggcattgatgtctccgctgacatttaaagaaggaatcagcagtccgttccattgcttgctgttggtatcaaatgtgatatagtagcaaccggcagttccggggaaccagcacttccagtcgccggctgtagtgagcaggaacggcattccggtctcgttgtcatttctccagatggtaccgtcggcttcctgtaccaagaagttgaaccagccctctacaccgacgaagcccttgtatataccgtcggtattggcggagaacagggtcattcctgtggcagtcgcattctggtcgagtacgttggcaaagcgcatatccagctcatacggggtgatggttactgcttctacgttgctataagccggatcgatgttgttacccgtcgttcctttcaggcggaaatagaattttgtggccacgttggcttccactcccagattattagcgacaatgttcagttcggcaccgttgtaagtcttcgaaagggaggtttcggcagactctacgatagtacccgagaagtcttcgctcaaagagacttgcatggcggttttcagcaaattagtcggtttaaagttcggattgctgatagccagtgtacggtctgtccatgccagcgataacacattcttctgtgcggtcgcttcggtcagtacgatgttgtctgtcgaagcaatgagttcattgcttgtcaggctcgacaagtaatatttatctccgtcttcttcgcaggcacccaatacgaagagggttgccagagagaggatcagactatttattgttttcatatatcgttcgtattagaggataattaataattttcattatacaggttcggattggctgtaagctccgtattcggtatcgggtagatattgtatttgctgtttacggctgtaccgcctttctcgccgcctttccactgccacagatatttgtcggttgtgaacatgccgtagcggatcaggtccgtacgtctgtgtccttcccagtaaagttcgcgggcgcgttcttttaacaagaagtcaagagtcaggtcagaatctgctattttgtgctcatcgtcaccgtatgcccgtctctgaagttcgttgatatagcccaataccgttcctctgtcacttcctgtgccgccacgtacaacggcttccgccatcatcagatatacgtctgccagacggaacaggggataatcggtgttcacaccgccgtcggctgtattggaagccgtttgaccattatctgtaaggttggtccatttcgttacaaaaaagccgtttgactgatcatctattttattcaggtattgagtctggccgtcggtaaagaataagtagcgttggtcagcttctcctgtaaacagagctggtatttcaccgcgtacgcggaacataccccagccgcttttcaccccatagtcttcgggtacttgcttgtcggaagtattacttaccgcaccgcaaatgatataggtggaagaaccccatgatacggtatgcgtagcatctaccggcagggtgaagataatttcattggcagtgcgcttgtcattatccgcattgaacaggctgctgtaatcgtcttccagagaatatccctgagcgattgcctgttggcaggcactgatacattcggtatatttggaagtattggtgtacacttccgcattcagatagagtttagccagtaaggtatatgcagctccctgtgaagcacgaccgtaaggacaattcgctttgtcgagcatatcattcacggtgctgttcagttcgctttcgatataactgaaaatctgtgcggctgtatagcgtggagggagataaccgcttgtcgggtcattctccgtcacaaacggaatgttacggtacaggtcgagtgcatgatagtagaacaacgcacgcataaaccgggcttcggcacggtaatgacggatttcactttgttcctgttccgtaaattgtgccagcttttcgtcggtagcgttgcggataaactcattgcacaatgcaatgttgtaataaatacggtaatacatatccgatacccacgggtcgttggcatcccagctgaggtaggtgaggccggtcacgttgtcaccggacaaccaggtagaggctacttcgtccgtaccgcattcctgcaggttgaagaagcaacgcatgtagtcctgtccgctgttgctgctcaaatccggatcaccgcttttttcttgtccggtagttaccattgccgtatagattttccctaacacggctttatagtttgcggcgctggtgtagatgctggcggctgtttcgtcttcatgcggatactggtccaaatcgcctatgcaggaacttagcagcagtgcgctgcaaaaatagaaggctgtataaaatatctttttcataatgcgcttttttaagtaattagaagttgaaacctacgttgagtgagaaggtacgtggacgcgggtagaaagagttgtctacgccgttgggtacttccgggtctacaccgctgtatttggtgatgcagaatacattttgtaccatagcactgacatttaggctgcatcctttgcagatttcacctaaattatagttcagtgagaggttgtccattttcaggaacgaagcattctctacatagtagtccgacaagtattgacgggactggaaaccggtcttcagatagctcgtcgacaggttgttcaactgataagagttgtagcttaccgtttcccaggctccggtgttcatcgccattgcattgtatacatagttgccgatgttggcacgcaggctggtactcaatgtccatttcttccagcgcagtgaggtgctgaagccaagaatatagtcaggagcaggagagtggtagcgatacaggtcttcggtattgatttctccgtcgccgttcaagtctacataggcaccttctaccggtttaccggttttctcatcatacagttggtggtaaacgtagaacatgtaaggagcatatccttcacttaatgtctgtacctgatagctgtcgatatacggacctacggaagtgttggtagcagcagctccggcagccagcgacaggtttttcaccttcatcttctgccaggtcatattgaaactgagatcccagttccagtcgttggtttgtatcggtgttgcgttcaggctgaactcaataccctggctgtctacatttcctacgttagtcgtgatgttacggtcgaaagtcgttccggctgcagcggggacggttgcaatcagatcttccgttttgcgggtgtagtagtcgaaactaccggtaatgcggtctttcaggaaaccgaagtcgaaaccgacattccatgaagtagtcgtttcccatttcaagtcggaaacatacgatttgggacggtaagtataaatgtaatcattacccatgatagattcggcaccattctggctgatagtatagatgggcagatagttgtagttgccgataccgtcttgctgaccggtcacaccgtagctggcacgaactttcaggttgctgagtactttgttgtttttaaggaaagactcttccgtcactctccatcccagtgctaccgaagggaaagtaccccagcgcacattcttggcaaaacgggaagtagcgtcccggcgtacggtggtagtcagcatatagcgtgagtcgaacgagtagttcagacgaccgtagtaggagagtagtacatggcgttcatcggttgctttcgaagttttcagcacttctccgagcgtattcatttcactgtaaagagggttggttgctttccagtactgatagtcataaccggctgtcacgtcaaaactactcttgatcggttccaccagtttattgtagttggcgtataaagtcagcagacggttttctttcttttgcggaccatagctgtaatccaggccggaagtggtgtagttttgtgcagcttctgctggaacatatacactccctttaccttgtgcgtaatcataacctatcgtagcatgcagtttcagatcggggaagaagtggacacggtaatccgcatcgatatttccgatgaagcgtctgacattactatgcgagtcgttcatttggatgagacctaccgggttcattactgctccgtttaccggtgcaccggtattgtctaccgcctctgtatatcctccgaaagtgtccaggtcggaataaaccggaatggtcggattgatagtagaagctgcccagatggcttccgtattaccgaacgtgttgttattgatggaaccttttgcattgatattcaacttcagatggtctttaaagaaagaagggttgagcgtaacacttccggtgtatcgttcggcattgtccgtacggagcagaccgctttggttgtagtaacctaccgatacgcggatgggccagttcggagcaatctttccggtaatgctcaggttgttgtccgttccgaaggcattctggtatatttcatcgttccagtcggtgcgggctgtccccaacaaggcttgttgggcagccgttccttgtgtccggatggtgttcacgaactggtcgtaactcaacatgtccgctaactttgtacgggtctgaatagagttggtagtgctgaatgtgattttcattttgtccgaacttcctttcttggtagtgataaggatgacaccgttggatgcacgcgaaccgtagatcgcggttgaagaggcatctttcagaatcgtcatgctttcaatatcattcgggttgatgaggctcaggaaattgccgtcattaccgctgatacctccttgttccagaggcacaccgtccaatacgatcagcggatcgttacttgcattcagtgaagctcctccacgtacacggatcgtgcttccggaagtaggcgaaccactgttggacatgatttgtacaccggagatttttccgttaatcagttgttcgggagaacttaccagtcccatgttgaagtctttgctgctgacattcgtcaccgaaccggtcaggtcacttttgcgttgcgttccgtatccgatgactactacatcactcagtacttgtgagtcgcttttcatttgtacattcagtacgttgccgtttgcggggatagctatcactttagtttcgtatcctacgtaagagaattgtagttccttactgtctttcggtacattcagagtgtagtttccgtcaaagtcggtcactgtacccgttgatgttcctacaatgagaatgctcactccgatcatcggttctttgttctcatcgatcacttgtccggtcattttcttgcctccctgttgggcaaaggcaggaattgcgcctccaagaaaggctgtacataagatgaatagtacagtcagatggcgtagatttaagatgttactgttcataattattgtgtaattgataatagatttattttattgaaatatcggttaatagtatcattccagccagatctctccaagctcgatctctgttaccggtctggcattgcccggcattgatatttccagcttttctgttttctccgcctggaagggtatttccgtttccggctggaagtactgtttcaggaagacgggataagctaccggaagcaatgccgtgtctgtctgacgcaaccggttcaaagggattcgtatgattccttccggtgagggagaaggacaagggcttttgtacgtgtatccgtccgatgtaacgaaaccggcactgattccttccggaagagccttcgcccggttaacccggatacagaggacggtacaatcttttattttgccttttcttccgtctatcttatctttgacaaatgtgcgaaggaagtattgcggattctctccttttgatgtaaaggtgaaccggagcaatggcttttctgtcggagatgaatcggttaaactccggtgaagctcgttccattcggggagtgtataggcttctatccggctatgggtatctgttacagtcagtaactgtatcgcactacctggggcgactacacgggtagtccagtattggctgagggtgtagtcccagtccagcggatttccgtttgtaccggaagaacttcctgtagcggaactccctgcaggataagtacgggtactgtcgccccggcagacgatgatgttatacctgaaataaccttcttttatctcttcggcgggtatcgttgcctgatatgtatagccgtttgtgcgctgcatcttgacggacggattgtgatcgttccagaaagagatcttgtcggtgtaaatgatgacggagtcgggaaattccggacctgttatctgtgctgtgatcttcaatggtttgttggcttccacagtggtggcaggtgtatgcataactcggtaactcgttgcccgtggtgcgggagccgcgtattcgcccagtctgatcgtattccattgcgaatcggctgtccagttttgcttcggcgcacaatgcttgcgttgcagcaggtaaacgcccggacggagggagtgaatcactccgtctttcacttcctcttttctgctgttctctctgtgggcggaggaagcaagtgttgaattggccggcgattgaatggcggaaagggtgaatgcatttcccaggttcggaagttgcaaggccatgtcccaggcaccgtaagcgatggttactacttctttctccagcgaaggtttggcgaacggatcattgacgatgattgcatcaggcatcacttccagtctccatactccgtcttccagacggtctatgaaataagcgcctgtaccttcgtagcgcacaacaggagaacttccacaccctgcgatggataccagttgtgaggcatctttgggttgcgtacgggtggtattggagtaatagaatttatttccgttgttcagttcgctgaggtcttctgtatagcttacccggaaaccttcaccgaacaacgtatcttgtggataacttccgtaagatgcgcctctcttcaggctttgtgctgcctcggaagctattttcatgctgattgccttgtgcggggtataggcgagattcagaaaatgtgtctgatattcggtattcgcgtaggcaatgtccatcgggtcatatgagaactgggtaatccattgaaagccggctgtgcggaaagtgcggaccatagccggatacatataagagtacatgatatccgccggatcaaattcgtaaatcattcgggctttcttatcgaagccttttactttatcggcaaatgaaatatcgtagcggtctacatagggaaggaagttcccttgttgtgtttgtccggatactagaccgatgggataccattggtaagtcgttcctttgatatcggtgtcatagtatgcctctactgtccattcgttatggcttacattgtagaatacaggcttccggttgccggctttgcgtatggctttcagcatccggttgatgtaggattttacttcttcctttgtgccggaatggcaaggttcgttatttatttcaaatcctacaatagacggatcgtccttgtaagccagtccggtgtagggattggtgtgtctcaccaaactatagagatatctttcttgtgcggcaatagcttccggttcggagtgcatgctgcatttgtcgtacttataagaaaagccgcttgtcggctcgttccgttcgggatatccgttcccgaagtttgtttgtgcggtaatcacgatatggatattccgttctttcagcttggcaatcaggtagtccatcaggtccagatgatcgttttctgaaagatttccttctccgtctgtcagttccacatcccataagtgaatacgataggcattgaatcccagtcgggaaagatggtacacatctttatctatagctgccttacggtctactcccaagtatccgagagcacggtaagcatgagcgaaaggggtagtataatttgcaccgaagaaggaagcttcccgatgagtgtcgctccaacgcatcactccgtttccatctatatatatagtaggtatggaagtcgttttcccttgtgtgccgacaaaggtaaataacaggcaaatgcaggtaagaataaactgtcttttcatgctatcaaatttactggtttgttgatagcggcaaagatagattacctgtcattttaataaaagcacagattggacatataaggataaaaataggacgaaatgccctgaaatgcccctacaactcatcattcaggtattggcgtggcgtttttccgaactctgcctgaaaacatttggagaaataagagtgattggaaaagcctaccatatacatcacttcggcaacggtgaatttcttttgttgcagtaacatggcagccttcttcattcggatagatttgatatattccaccggagacattccggtcagttgtttgatcttccggtaaatctgcttgttactgattcccgacagttcgcaaagtgcatttacattcaggtctgcatcggagaggtgatcttcgatcagacggatgatgttcgaaaggaatttctcatcctgtgactcagcttcgatcggtttaagtacaggaagagactctaactgctttttagactgtgcagccggtatttcatcctcttctactgcggtgaccggaatactcagtccgatggaagttccctttcctttttcggaagtgactccgttgatagagccaccatgcagttctgtgtaagtctttaccaggtaaagcccgataccggtaccttctttgctgccgctatgaggtgactggaagaaacgttggaaaatataaggaatatcctgttgcgggatacctgctcctgtgtcggatacgcaaatttccagcagaccgctttcttgccgatagaaaagggataaacggatatttccaccctcggaggtaaacttgacggcattcgacaatagattatccaatatcactcctagtttgatcgcatccatatcggcataaatctttgctttgtttgcttcgaaatggaaagtgaaccgtttgtcttcttcatatacagagaatagactgcggctgaacgataccagttcgatgcgcgacaggataagcaatgaatctttattgtcttcaatccggttgaagttgagtacctgatgaatcagcgagtttattttcatggcgttgcgctgaacctcttccagtgtttgcttctcatgcgcttcctctgtagccggaagtaattggctgatgggagcaataatcctgctgagaggcgtctttaattcattggacagggtggtgaagaaggccattttctggcgggactgctctagaatcttctctttttccctgcgttctgctttcaggcggttttttacccggaagaagttgattgtccatgcaatcaggctaagcagcagtaaaacatagatggcttttgcccatattgtatagtaccacggcggaagaatccggatattcagaatataaggctggtcggacggctgaccgtcttttcccagtttgctgataataagctgataatttccgtagctcagattactgtatgtaatgcggttgatattggatttcaggaagttccattctttgtccattccttccagacgataaacgaacttgtttttctcatccagtgaataaggaagatcggataattcgaatgacaggttattctgattatattttaattcgatcgagttggtatatcggatattgggcacgtcatctctggtgcgtggtgataccagttgattgttaatgtataaggcagtcaacaggatcgggcgttccggttggtgtatggtttgtatatcggggtgtgagataccgaagccgtcagctcctcccagataaatgcaattctctttcggatcgaatagcaggcttgtgaagcgcttgtctgtcatattctgcagccgggcatccattgttttccggtcgattatccaaagtccgttggtagtggacacccagatgtgattctttacggaagtcatggacaaaatctcgttgttgctgaaacttccgaaagagatactttgctggctctcgtctttgggattgatacgcatgacaccgccatgaaaccctacccagagcataccgtcctcatcacataacaggtagttggggcttttctctccgtttaattcgtcagcaaataattttgtcacttcccgtgtgcggggattaattttgtctatccctttattattgtagagcaacacccatacattgccttcattatcgggaataatctggttgataaacatgccggacagtccgttgtggacggagtaattctgttcggctacatattgtccggaggcagactgcatcagcctgtgcttgtctactacaaagattcctcccagacaggttgaaatccacagacgtccggcattgtcttcgaacatataataagtccagttggtgttatatgttcctgtactgtctacaatgttatagtgcacgaattggcgggttgcataatcgtagcggttgatgcttccgtcggtagctatccatagctgctgttccttatcttcgtaaatatgccggatacggttgtgtgataacggataagtcttgtcacccattctgtaccagatagcgttatgcttgtctccggcaggatcggtgaagcggattaatccgttggtacctccaaaccagtagaaaccttttgagtcgcggaatagggagtagaactgatttccgtctcccgtacctgtaatctgtgagatcggaataaattgcagggcgctgttgtagcgtgaaagggaaatgccgtagtcggtgcccagccagatgttatgttcctgatcggcaaagatattccagatgatgttattcgtcaacgactggatattgcgggaatcgtgaatgatgtgctgtagaggagtgacatcattgtgatagacgtacaggccgttgtccgtacctgccagcagatatccatttccatccagagccagtgatttgatcgagttgttatggaaggcttctgtctgcttcatctgtccggttgatggaaaatactggaaaaggtaaccttccgtaccgatccaaatacattggcggcccgtatcttccagcaaggaattgacgaacaggttgctttgactgctattgacgggaaggggaatcttttcgaatttcccgtttgaggcaatatagcggcacagcccgttgtaggttcccacataaatctgattgtctccggtgcggataatggagtagatggtattatggggtaatccgttgcgctttgtgccgagaggacttagcttccggttttgcagctgataggtgtataagccatttaatgcgcctatccacagggtatctccttgaagtgccattgtgcgtacatctgtcggaaagtctgttgccggttgctcgtagcggtcagtccggtaattgtagattaggattccgttgtccgtacccatatataaataggtgttatctataatgacaccgcaatagatacgggtgttattgatttctccgtaagtgaaatgctgctgtgtggaataaccgtcataactgaataatcccttgttggaacctatccatatcagtccttcgctgtcttgaaggaaacaactgaccaccgatgcttcagcaccgagataaatattgtcgaattgctgataatttactttttgtccataggcggtgctgctttgaatgcaacatgcacaaaggaaaaaaagaatggctatgattcgttgatacatgatatcaggtttgcaaggcattaaatctttaattgttgtgttaatattagcactcttgattgcaaatgtaggaaaaatgtcggttacacttgtaaatctccccgtctttttgttcctttgctctatatttataaaacagaatagttcggaatgaaaaagctaatttatctgcttttgttaccattggctctggcagtggcagcctgtgacggtaagaacggaagttcaaataaagaatcggtattggcaaggcaagacagtgtagatgctcacgggttgcagcgtatgcaaagttcaaaagctgaaactgatattaagtttaagggaagagactatcattcgctggtttcgcgtactcctgacgaaagtctgcctcacgtctccaatgagatgggggatacgtatgtagacaataaaatagtgttgcgcatcacccggggaagtgaaaacgtactcaacaagacatttacgaagaacgacttttcatcggtagtcgacgcgaaattcctttcaaaatccatacttgaaggaatcgtatatgacaagaccacaccggagggaattgtctacgccgccagtgtgtgctatccgcagaccgatttgtatgttccgctttccatcactgtaacggccgatggaaaaatgagcataaagaaagtagatatgttggaagacgattatacggaagaaacacctgaatagacttgtgaatggggatataagacgtttctgacagaagaattgcacaaatgtgaaagcatttgagacaaacgaaaggcagccgtaagggttgcctttcgtatttttgcaccgtcgataaacttaataccggatagaatgaaaaaatacattttggttatttatatgatggcggcaggatgcacgatgctgactgctcagactaaaaatacgcaaacactgatgccactcaccgaacgggtaaacgtacaggctgactctgcacgtatcaaccagattattgacggttgctgggtagctgtcgggacgaataaacctcatgccattcagcgtgattttaccaacctgtttgatggcaagccctcctatcgctttgaactcaaaaccgaagacaatacactggaaggttatgcgaaaggagaaacgaaaggacgtgccgagttttcatattgctatgcaacttccgacgatttcaggggattacctgccgacgtttatcagaaagcacagatcacaaagacagtttatcatcacgggaagggagcttgtccgcaaggaagttcccgcgactatgagttttcggtttttattccttcttctttagacagcaatgtctccaccatctttgcccaatggcacggaatgcccgaccggacgctggtccagactcctcagggcgaggtgaagaaactgactgttgacgaatttgtagaactggaaaaaacgaccttcttcaaaaagaatgtcggacacgaaaaagtggccagactggataaacaaggtaatccggtgaaagataaaaatggaaaacctgtatataaggcaggaaaacccaacggatggttggttgaacagggaggatacccgccattggcattcggattttccggaggactgttttatatcaaagcaaactccgaccgtaaatggctgacagacaaagatgaccgttgcaatgcaaacccgggaaagacgcccgttatgaaaccgctgacttctgaatacaaggcatccaccattgcctacaaattaccttttgccgatttcccgaaagactgctggattactttccgtgtccatatcgactggacggtctatggcaaggaagcggaaacgattgtgaaaccgggcatgctggatgtacggatggattatcaggagcaaggtaagaaagtgagcaaacacattgtcgataatgagaagattctgattggacgtaacgacgaagacgggtattactttaagttcggaatttaccgcgtaggtgatagtaccgttcccgtttgctacaatctcgcaggatattcggaaagataaataggtaaatagttaaggttaaaagttaaggtgaagagagagcgatccggatgttcctgagtgggcatccggatcttttttatggggtaaattcaagactgaaagttaaagaacacaaaaaagaatgtgatctctggttattcccaaatctttcctaaatctgtatcgttatttgcagtataaaacttatcagatatagtattaactaaaaagaataacgattatgaagaaaattttatctttgcttgtgatggctattgtagctatacagttctcatttgccggcgatgtgattacaaaggatatgaatcagctaccgcttccggcacgcaactttatcaaccgtcattttaccaaacctcaggtagctcatatcaagattgataaagatctgttggagtctgccaagtatgaagtgttattgacggacggtacggaaatagattttgatagcaaaggtaactgggaggaagtaagtgctagtaaagggcatgcagttccggtaagtgttgttccttcgtttgctgtcagttatctgaaagagcataacttcacagagcctgtgacaaaagtggagcgtgaccggaaaggatatgaagtggaattaagtaccggcgtttctttcaagttcgacaagaaaggaaaattcctgaaagcggatgattgatgattaaatgaaaatatgatataacctaaatcctaagaattaattatgttgaagtttaagtttggcgcatgggcagtcgttttaatgctgactgccttctctttcagcgcatgtgatgataatgatgatgaaacgtataatccgcctgccaatatcacagaggcattgaagcaactatatccgaatgcccagaatgtggagtgggagatgaaaggagattattatgtagctgactgctgggtgactggtgacgaactggatgtctggttcgacgcgaatgccaactgggtgatgacggaaaacgaactggatagtatcgatcagttagtacctgccgtttataccggtttccgtaattccaactacagttcatgggtagtgaccgatgtgtttgtattgacgtatccgcagcatcctactgagtccgtgattcaggtgaaacagggaaatctgagatttgcactgtacttttcgcaggaaggaggcttgttgcatgaaagggatatcaccaatggcgatgatacgaattggccggttatggagtagaattagttatgtacagaggaatgtggacagacactcctctgtagtcattatattacatttgttgataatctttggccagtcctccttcgctggtttccttatacagtgagggcaggtcatgtccggtttgtttcattacctgtaccactttgtcgaaagaaacacggtgcataccgtctgtaaaggctgaataaagattggcatccagtgcacgggcggcagcataagcattccgctcgatacaagggatttgaacgagaccgcatacggggtcgcaagtcatccccaggtggtgttccagccccatttccgcagcatattcaatctgtgccggacttcctccgaataattgattggctgctgctgatgccatcgcgcaggcaacgccgacttctccctgacatcctacttccgcaccggagatggacgcattgaacttgacaatgtttccaattagcccagctgtagccaaggcgcgaagaatccgcatgtcactgaagtcacggcttttttgtaaatgataaagtactgccggcatcactccgcaggaaccacaggtaggggcagtcacgatctttccaccggaagcgttttcttcgctgactgccagtgcgtaagagaaaacgagtcctctggattgcagagattgtttgtatccggtagcacgtatataataggtggaagcttttctacgtaagttcagcggtccgggcaatacaccttccgcttccagacctcggtggatagcgtctttcattgtgtcccatacttctgccagatagtcccatatatcctcgttctcacattccttgacatactcccaataactttttccggtacgttcacaccattgcaggatttcggtcatgttgttcatgccgtatacttccgggctttcgattgtcgggttgtcattattctctgccaaagctccgccaccgatactgtaaaccgtccagttttccaatatcttgttgtttgcatccagagcggcaaatgtcattccgttcggatggaaggggaggaaaactttgggttgccatacgatttctaccggagcggcaggttgtaaagtatctatgatagccacatccgtcatgtgccctttgcctgtagctgccaaacttccataaagggttactttgaaagatgcggcatccggatgacgttcaacaaacatttctgcagctttacgagggcccattgtatgactgctggaaggacctgtgccgattctgtataattcttttattgatttcatggatgggtgcgctttagttaataccatttcttttttctgaagtacaaatatacaataataccgataaccgccattataatccaggcaaataaatatccgtaccgccagtccagttcgggcatccatttgtaattcattccccacacaccgacaagaaacgttagcgggatgaaaatggtggatacgatggtcagccgcttcatgatatcgttcattcgtaaatcattgttcgagatatacaggtcgactaatgaagacagtgtttcacggcagatttcaatcgtttgtaatacaaattgtaaatggtcgttcacatcattgtagaaggcacggtttactttatgtataaggagattttctgcccgcaacaattttacatattgctctttaagcgggaggatggcctttttcatcagcatatattggcggcgcagcccctgaatctgaatgccgatgtcattctcattggtaatcatcagcagttcttcttccaggtcttcaagtgcatcgtcgatggaagatatcgttgaaatgtagttcgccatgatgctgttcagcaatacactgagcagataatccgtcagacggctacggattttcagtatatcgtttctcaatgcggcgttgatttcatcaaagaaatctgtttctttttcaagaaaggtaagtacatagttatttcccagaatgatgcagacttgttgttggagcaatccgtcgaggtcatcatcctctttatgctcattgggatagaatattttcaggatcaggacaatatatttgtcatgctcttctattttcgtcgggtggtcggcatttaatatgtcttgtaaaacgaggaagtctatttcaaaatgactgcaaatctcacggatggtttccgtatctttcagcccgtgtacctgcagccagttgattcgttcgttatccaatgtttctttgacgctttggaaggtgtcaccggaactttcctgcatctcggttgcattgtatgtgcagagatgtaaatgggtgggggtaaggctgtcccctgtgtaaataagcttttcgcttaacagattattcttcatgctttattctcgttttagaaaatcactgtaacacaaaggtagtggttttctaaatgagaacaagttcttcgatcgttttgttttcagattagtcaaaatcgactaccgtaattccggcacctccgaactggacatgctcgtctgcataatgactgacgcccggtacggtggacaggtattggcggatgagtgtacggagtattccggttcctgttccgtgaagaatacgtacacggtccatgccgacaaggatggcatcgtctacgaaataagtgatagcctgcagagcctcgtcaccacgcatcccccgtacatcaatatcttgcttgaaattaagcttcttctcgtacatctggtcatgtgtctgactgctgacaaacgtacttttggctattccttccgtcttgggggctgcgttgcttcgctccagacgatccagtttcaccgtggttttaatgcttccgaaagcgacggttgcatttttaccattgatttccatgacctgtccgacgcttgtctgtcccttgatctttacgttctcgccaacagtgataggtattactttaggggtagcggctgtctgtgatgcggcgtttttcggttcgtttttcttgtttttcttccgttcctgtttctctttcagcttctccattttgcgggcaatcttttcttcctgttctttggaagtcattgtttccagggaagtacggaaatcgttcagctcctggcgtactaggtgagtcttttctttttcggcctgagcttctttaatcgtacggatggtattttcgatgcgggcgttcgattcctgcaacattcgttcagcttcttctttagcttgtctgataatctccttccgtgatttttgcaactcttccatttccgtttgataacgggcgatggtgtcttccatgtgtttttcccgttggcggatcgtttgtcgtttcccttcccagtagcgcttgtcgcgtacaatgtcctgaagatatttatcggcattgatgtattcgcttcctacaatttccgaagcatctgcaatcacatcttccggcaatccgattttccgggcaatctctacggcaaatgaactgcccggatttccgatttgtagttgaaagagtgcctgcatcaaatggcggtcgtaaagcatggcaccgttgactactccttcatgatcttcggcaaaatgcttcagattctgatagtgagtcgttattactccgaacgttcctttctgattgaaacgtttcagcacagcttcggcgatggctcctccgatctgtggttccgtacctcccccgaactcgtcgatcaggatgaggctgcgttcattgcagcttttcatcatgattttcatattggtcaggtgcgaagaataagtactcaagtcatcttcgatggactgttcgtcaccgatatcgatgaagatactgctgaacatacctgcatgactgcgttcgtgcaaaggaatcagcataccgcattgcaacatatattgtagcaaaccgactgttttcagacagacagactttcctccggcattgggaccggaaatgataaggatacgctgcttttggtttagttctatatccagtggaacaacctttttcccatgtttggctaatgagagttgcagtaagggatgcactgccattgtccaatccaatagttgttccttttctactgtcggtttcaggctgttggtctgtatggcaaaataacttttcgcacggataaagtcgatctctgccagaaattcatacgattgaaggatgtctggaatagatggacgcaggatattggaaaactctgtaaggatacgaatgatttcccgtcgttcatccccttcaagttcgcgaatacggttgttggcttctacgacctctgccggttcgatgaatacggtctttccacttgccgattcatcgtgcacgatacctttgatctttcgttttaatcccggtgcgacaggaataacgagacggccgtcacgcatagtcggagctacgtctttgtctacatagccttcagattgtgcattgcgcaggatactgtttagtgaacgtgagatacttcccattgtgctggacagctcccgacggatacgggccaattcgctggatgcattgtcttttatttttccatatttattaaggataccgtctattttaccaatcagttgagggaatacggctatatctcccgccaaccgtttcaggctggggtagggtacatcgttttcctcctcttcttcattccggtgtagaaaacgtacgatatcacgaatagtctctaatgaacggcgtaggtcaaatagttcttgttcgtccaaatacatgccctctatccgtacccgtttcagtgatgggcggacatcgaagaagaattgatcgggaaatccgtcttcttcctgaatgatacgcacaaattcagttacctggttcagtttctcttccacttcttcaaattgctcggtaaagctcatgtctgaaacccgttcttcgcctaaagtgctgagacacttgtctttcagtaactgccttatttggtcgaatcctatcttttgctcaaaattttgaggatatatcatgtctttatacttattataggctgcaaaaatacgattatttcgcgaaaaaaatgtcagattgtttgcagatttaaaaatgattcgtacctttgcaccgctttcaacggaaagcacttctgataaaggagttttggagaggtggcagagtggtcgattgcggcggtcttgaaaaccgttgtactgcgaggtacccggggttcgaatccctgtctctccgctttaagaaaataaaaagtccctgtaaattaatgctttacagggactttttgtgtttatttcatagtcgtttttatttctctgccttattgtcagaaagatgtcggcaggataaatttatatgataatggtttgtgcgtttatctgctcttcgggtcttcagctctcccttctccttaaaaaaaaggagaggggggaggagagcttacagacttttgcaataacttcttctgattcggatggttattccggatttatattaataggtctttatttggcttgtttactctatgacaatcaccggtaagcgtattgcttcccgtacttcggtccaactacctgttttgagtctatacttatagcatacacagaaggtcgtagttgtcgggtcgagccggttgttgtagagtgcataggcgttatcacccggatgggctactttgacatccactgtttccacttccatttcttcaggatcataaggttctacagtcagggagttatcatcagctacttcgataacaatcgtatttttcttgatgaagtccggctgattctccggttctgccggtaatctcttagtaccgatattgattcttacccgatttttggtcagaggtaccattgttttggtgatgacaaagtatccgctgccttcataccctgatgcattatagcttgcaggttctgcggaactggtatatttgtttttcttttgtatctgtaataatgcatttcctttcttttttactataggataaggagttgcgtcggctattgctatgggaataaagtagattttatccgggtccagactttcaatgactgaaatgtctattttgataggtaccaacgtgtatggttctcctgtcggataagtaactgtgctgctttctatcgcatagtctttcgggtccatcttgagggcatatcggctataatcttcgataaagttcgtatagttatattcatccagaagaactgtgtcttctgtgagcgatattgtaaccggttcctctgtcggattggttccgctacacgcaatcgacagattgcgtatattaccgtctttgccatccaggtcgtaaaccaaattgtgtatattgttattgtcgctgacaatgtataccattttctcgtatcgttcatcttcaaagaacttctttctgtcactgcatccggcaagaaatagtaatgcgagtaacagcgacaggatgcttattttatatgttttcattcttattcttttaatttatattcaatgctaacgaattgtctcatagggtgatttgtttaatctccccagccgggattctgatccagaccatccacttttcttatttcatatttgccaataggtaggaataccattttacgatctactactctgtgtcttatccagggatggtctactactaccggatagaagtatccactcatctcatctttgctgaggtccatcccctgtatcgcttctttttcggactcttcgtagatgccccatcggcgcacgtcatagtatctttgattctcatacaagaattcaatagctctttctctttgaaggattttgttaaagccatccacgctggccaactcatcatctttcactccggggagtcctacacggtatctgattgggttgaacgcctgcttgattttgtatatgtcacggctttcctcgtagactttagtctctccgttcgatcccttcagttcgatggaataactgccctgaagattattgagtgcttcactataagccagcaggatttcagcataacggatgatagggaaaaatttttccattaatattcctccgggcgaagagaatgcatcgtcgtcatgcacgtatttggtgataacataaccggtggcggggtagtcgttcacattaccactggaggagtgcttcccatccgttacagaagagttgtcatatttaatcatctgctcctttttagcatcgcttccgctgtatgagcgggctttccagaaacggccggagaaaccgatgttggcatagaatctcatttcccgattacggtacatgttgaagactcctgacttcaatacatattcggagaaggtctcatcctcggtgctgaaatttgtattatcatatgttccgtcttctttgtatggctttgcatcttcgggatagttgtctgttccgtcattcatatagaacatgttgaccatcttttgtgttacgcccatcccattgtatccgtccatcgaatgtggaaaagattctctaatgcatagattaccggtcgttcttccccatatgaactccttgttttttctgccatctgtttcgccattgaacatatagctgtaagatttaagcgggtcaataccgcctactccgttgggaaacgcctgattctcgttggttggaggtacaaaagagtctttatctgcagggacagtatgcagttcataacgccccatgtccatgactctttcgcaagctgctgcggctaccgcccatttacgatcgtcgtattgctgggaaatgtagaacactccgtcactgctccgtttccagttcccgaagtatgtttgtccgcggccattgtataatgggctagcctgtatcaatcttaaccgtgcaatcagtgcgtaagccgctcccttggtgggacggccgaagctgctgttcggttgagtctctggcagatattgtgccgccaactcaaattgttcgcaagcatagtctactgattcgtcatacgtcgcacgtacgtttgcataggcttccggctgctcgttggagggatatacctgatctcctacaaggatgacaggaccgaaatccatgatgagatggtagtatgcgtaggctctcataaaataggtgtatgcccagatgtccggtttttccagattgctcatatcggtcacttcatccatacgtgagaggataatgtttgccttacggatgattttgtacatcgtgtcccattgataaatagattttttctttttagcatctttattggtgatgttttcttcgttaatggctcccgtgacgtatgccataccagtataggtttctgcattaaaagtttcaaaagcctcatcggtagctaacggtcctgctgtcgccggactattgagaaagtctccttcatcgggaaacatggatgctacgttccacatatatctttccaagtattctttacgggagaagatggagtcatatttcattgtatcgtcaaaccacttgtctacatccagataattacaggaagagatagaaaagacggacaacaatagaattgaatgcaatattagttttctcatataattcattttttgatagttagaatttgatgtatgcctgcaaagtcacgctggcaggaattggataacgccgtccgttgtataatgcttgttccggatcgcagatatcaatcttatcccatacgcaaagattgttgcctacgagtgaaaggtcgatagaattgattcccaaattctttatagtcttgggtacatttacactataattgatgtttacttctgatagccgcaggtattttgcattgtttttccaaaaactggatgtctgggaattgttttccaaatttccgtatgacatgcgagggaatcgggcattaggattttctgacaaagatggatctagccccatcttctcagcatattcacgggaaatccaacgattggcagggtttttgactatgctcagtacattaccagtctgtttgccatagaatggaatgtagccttcgtcatatagagcgccgtttgaagctggtacccccacatgataaacatcggtatttccggttcccttgaatagtacggcagccgacagtctcttatatctgaattcaactccgaatccatacatgaagcgtggagtactgctgaatgacaaaggtactttgtcatccccgtttacaacaccgtctccattgacatccttgtatttaatatctccgggcagatagctaccgaaagtctgtttaggactattagcgatatcctcgtcatctttgaacaatcctaatgcgatcagtcctttttggtatccataaggacgtccggtggcagaattatattcatatttggtatctgcctcttcaaaataattcaccctgttattactaagggtaaaatttcctcggaatgttaccgacatatctttgccaat

SEQ ID NO: 4559 - DNA, 38670 bp, Unknown
  gut microbiota DNA sequence
aacagacgcgccaacagcacagccagaaaaattccgatcgcataaatacttaacaacaccaaactcgcattgttcgggaaaaaagcccctaccaacaaaagataaatgggcagacgcgcgctacaagacatcaacgggttaatcaacatcgtaatcaaacggcttttccggttctcaatagtacgggaagccatgatagcaggcacattacaaccgaatcccataatcaacggaataaacgattttccatgcaagcccatcttatgcataattttatccattataaacgctgcacgggccatataaccggagtcttccatcagcgaaatacagaaatacagaatcagaatattgggcagaaagacgataacaccacctacaccgcctacgataccgtcaaccagcatatccttcaacggcccctccgacatgttattgcgaatcaagtcaccgatttgccccaccagccattcaattcccatcatcggatattctccgagaacaaacgttccctcaaacatcaagtacatgaaaaggaaaaagataggatacccccagatacgatgagtaacgatagcatccagcaccttcgtcgtctgcgcctgctccagatgattgtcagtaaatgtctctttcagcgcaccactgataaaaccgtatttggcatccgttatggcggattcgcaatcctcgttcatcgtttcctgaacgcgcttggccatcttgtcgcgaatacggaaaatctctcccgcattgggcagcgtccgtacaaagctctctatatcgggatcgttttccagcaacttgatagacagaaagcgggtagaatatttatggcggataaattcattcttggatacttcctcttttacagcgtcaatcgctttttccagatcgggaccatgattgatatggatatgacggaatacacgccctttccttttatgttcgcgcacgtaatcctccagatgttcttcctcatggttcttccggtcttccagagaatcatgccattcggtcaagtctttcagaacttccggattcatatttccctgcttgtcaaagaaatcgaccccttcataaaggttgattactacatgaaacaaggtatccagtccacgattcttcttgctgacagtaggcaccatcggcaccccgaacaatttactcaacaaatgataatccaatgtattaccgctggattccagctcatcgtaaatattcaaagccactaccatgcggacattcatgtcaatcagttgggtagtcagatacagatttcgttccagatttgaagaatcgactacattgatgattacgtccggtgtttcatcaacaatgtgacggcggacataaatttcttccggtgtataagctgacagtgaatacgttcccggcaaatcgacaatacggaaatgataaccttcgaaatcgaaatacccttctttggcatctacggtcacaccgctatagtttcctacatgctcatgagcaccggaagccagattgaaaagagaagtcttgcctgagttcggattcccgaccagagcaacgttgatagtacggcgcttacctaacgccaaccgtttcatatcttcttcttttacagaaacatcttcgggcaaaccttcgtgatatacagctttttcggcttgtttttttgcttcttcctcgctgactacttcaatcatttccgcttcctgacgacgaagagatatttcataacctaagactttatatttaatcgggtctttcagtggagcattcaacaacacttcaacagttttacctttgataaaacccatctccacaatacgtttacgaaagcctccgtgtcccaagaccttaacgatgacacctttttcacctgttcctaattcggataaacgcataactatctaaattttcggcaaagataattcataacttccgagcacgcaaattatttagaatgtttttaaatagcaggattttcgtatactgacggtatctaaataaccccatcaaaagtccaagccacaacaggtaactaattccctgcctacatctattgaatttacatgcaacaattagttcgtgccactatagtggtacgcaagaagtactatagttccccttacgtcctactatagtggcacgaaagaggaactatagtaggacgaattagaaatcgctaaagaaaaaaataatttatgggagttttttccttagtcagtccgataaaaacaattagcattcacttgagatacctcaataaactattatctttgcagatatgatacaacaacgggttatacgatatatagagaaagagcatttattctcgccgaacgataaacttctgattgccctgagtggcggagccgactcggtggccttgctacgtgtactccacacagcaggttatcaatgcgaagctgcccactgcaatttccatttacgcggtgaagaatcaaaccgtgacgaacggtttgtccggcaactttgccaaaaatacggcatccgcctgcataccatcgacttcaacacgactcagtacgcaacagaaaaacggatctcgatagaaatggcagccagggaactccgctataactggttcgaaaagataaaagaagagtgcggagcccatgtaatcgccgtagctcaccaccaggacgacagtgtagaaacgatgctgctcaacctcattcggggtacaggcattaccggtttattaggaatccgcccccgaaacggagcaatcgtacgtccgttgctctgcatcaaccgggaagaaatcatccgctacctgcaacagatcggacaagacttcgtaacagacagcaccaatctggaagacgaatatacccgcaataaaatccgcctcaacctgctcccactgatgcaggaaataaatccgtcggtcaaaaacagtctgatagaaacaagcaatcacctgaatgatgtagctactatatataataaggtaatagacgaagccaaaacacggattatcactccggaaggtatccgaatcgatgctctactggacgaacccgctcccgatgctttcttgtttgaaacattgcatccactgggattcaattcggcacaaatcaaagatatagccaattcgcttcacggacaatcagggaaacaattcgtcagcaaagaatggcgagtcattaaagaccggaatttgctgctactggaaaccatccagccggaagacggccctgcccttccctatcaattaataaaagaggaaagagaattcacacccgatttccggattccacgggaaaaagaaaccgcctgtttcgatgcagacaaattaaatgaggaaattcactgccgcaaatggcaagcgggagatacattcatccccttcggcatgacgggcaagaaaaaaataagcgattatctgaccgaccgcaaattctccatcagccaaaaagaacgccaatgggttctctgctgcggtgaacgcattgcatggctgataggcgaacggacagataaccgcttccggatagacgaaacgactaaacgagtgattatctacaagatagtctgaggcaatttctgtttcttgaaacactcggacagcaaagaagcgaaaggagtatcatatttccttgccttgtttgcacatgctttcacacaggcgcagcatttgatgcatttttcagcattcgtgttcagttcatcccctttggtgatcgctcctgccggacaacgagccgcacagataccacaatgagtacacaagctctcatcttctatccaaggggtacggggaagcggagtaccacttttgcgcagcttgattaccttcctcaaaaagcggaataaggggaaaaacggctgactggggcgtttaatggcacgcacatccacctggtaaagagtatcgggtccatcagctgcctgaattttctccattatcttttttccgaaatcttccgcataatccaaatcagattcattcggacgaccgtctgcgatgggacatttatcggtgctatatgaatgttcacctatgaaggttgctccggcaatcaccttcaatccgtgagggatggcaaaagcgtccagttccatcaacgccttctcgtaggcacggtttccgtaaaccacgaccaatacggcaggagtatccagaccgcgaatactttccagacgttccatagccaaaggagccacatgacctccatatacaggcactacgataacagctaatgcagacgtaggaataacagtttcctcgacagtctgcaatgtgagattcatcgaaacgacattttttataccggttccgtgaacaattgcttcggctacttgttttgatgtgtgtgtaggcgaaaaataaattaaacgagcttcatttactgtcatactattttcttttatacagcaaagatacgtttttacgctgaaaaaagtgtttgattgttcatgaaaccaaaaatatttattatctttgccccgttgaaacattctacgattcaacacatacatccctaattcataattaaaaacaaaacatatgctcgcatatctgcggttattacgctgtagtaatgctgtccatatttcatcaagacagaaattttaataacttaccatactatatgtataacattatccaattgaacgacaaaaatctgtcggaacttcaagttattgccaaagagctaggcatcaaaaaagcagactcatttaagaaagaagaacttgtatacaagattcttgatgagcaagccatagccggagccactaagaaagttgccgcagagaaattaaaagaagaacgcaaaggagataaaaacaagcgttcgcgcacagccgcacctaaaaaagaagagaaagtagcacctgcagccaaaaatgtggaagttactaaaaataaagaaaatgctcctgcagccaaacctcagcaacggcctaaagaagaggctgccaacaaagccaaagaagctcccgttgctgaaccgaaggcagagaaagctgctcctaagcgcaaagtaggccgtccccgcaaagacgccaatatcgctgaaaaagcagaaaacaaggaggtggaaaacgcaaaaccgatagtgaaaccaacagaagaaaaagctgttgcggaaaaaacggtagttgcaccggcggctgaaaaagcaactccgacacaggagacagaaaagaaagtaaaagaaaacaaacctgccgttgcagaaaaaccggtaatagccaaaccgcaaaagaaatcggcaccggtgatcgacgaagaaagtaccatcttatccagcgaagacgatgatgactttatcccaatcgaagacctgccttctgaaaaaatagagcttccgaccgaactcttcggcaaattcgaagcgaccaaggcagaaacagcacaagccgcccccgagcaagctccacaaccacagcaacaacagcattcacaaccgcaacaacgccagcgcattgtccgcccgcgcgacaacaacaataacaacgccggcaataacaatgcaaatgctaacaacaataataatttccagcgtaataataacaacaaccagcgtcctccgatgcaacaacgtcctgcacaacagcagaacaacgctgccgagaaccttccgcctgtacaacaacagccggaacgcaaagtgatcgagcgtgaaaagccttatgaattcgatgatatcctcagcggagtaggcgtactggaaatcatgcaggacggatacggattcctccgttcttccgattacaattatctttcttctccggacgatatttatgtatcacagtcacaaattaagttatttggtcttaagaccggtgacgtggtagaaggcatcatccgtccgccaaaggaaggagaaaaatatttcccgttagtaaaggtgtcaaagatcaacggacgtgacgcagctttcgttcgcgaccgtgttcctttcgaacacttgactccgctcttcccggacgagaaattcagactctgcaaaggcggttattcagactccatgtctgcccgggttgtagaccttttcgctcctatcggtaagggacagcgtgcactgatcgtagcacagccgaagacaggtaagaccatcttgatgaaagatatcgccaacgccatcgcagccaatcatccggaagtatatatgattatgctgctgatcgacgaacgtccggaggaagtaaccgacatggcacgcagcgtcaacgcagaagtaatcgcttctacttttgacgaaccggcagaacgccacgtaaaaatcgcaggtatcgtactcgagaaagcaaaaagactggtagaatgcggacacgacgtagtgatcttccttgactctatcactcgtctggcacgtgcttacaatactgtatctcccgcatccggtaaagtactttccggtggtgtggacgccaatgcacttcacaagcccaaacgcttcttcggtgctgcccgtaacatcgaaaacggcggttcgctgactatcatcgctaccgcactgatcgacaccggttccaaaatggacgaagttatcttcgaagaattcaaaggtacaggtaacatggagttgcagcttgaccgcaacctgtccaacaagcgtatcttccctgctgtcaacatcaccgcatccagtactcgtcgcgacgatctgctgcttgacaagacaacactcgaccgcatgtggatattacgcaaataccttgcagatatgaatcctatcgaagcaatggatttcgtaaaagaccgtctggaaaaaacaagagacaacgacgaattcctgatgagcatgaatagctgatcaagaataaacgatcataaataaggaacggtgaatatactggacgatgaataatcgcagtttattcaccgttctttttatgatttccattaattcttttcatttattattcatcgcggtcttcgctgttcctcatgaatcgttcatcgcatatttcatttttgtacaaattactttcatttacgtccaaaaccactcccccgcccttttttgctttttgttttttcctacttttgctacccaatcaattacttaattctagccaagaatgaaaacaatttatccattcatgggattagccctttgtggcgcagcagcccaggcacaagaaaagccgaacttcctgattatccagtgcgaccatctcacacaacgtgtcgtaggcgcttacggacatacacaaggctgcacacttcccattgacgaagtagcatcaagaggagtaatcttctctaacgcttatgtaggctgccccctcagccaaccttcacgcgcagcattatggagcggcatgatgcctcaccagaccaatgtacgttcaaattccagcgaacccgtcaacacccgcctgccggaaaacgtacctacactgggtagtctcttctccgaaaacggttatgaggccgtacacttcggcaagactcacgacatgggctcactgagaggcttcaaacataaagagccggtagccaagccattcaccgatcccgaatttccggtcaacaatgacagtttcctggatgtaggaacctgcgaggatgccgttgcctacctcagcaatcctccgaaagaaccttttatctgcattgcagattttcagaacccgcataatatctgcggattcatcggcgaaaacgcaggggtacacaccgaccggccgatcagcggaccgctgcccgaattgccggacaactttgatgtggaagactggagcaatattccgactcccgtacaatatatctgttgcagtcaccgccgcatgacacaggctgcccattggaacgaagaaaactatcgtcactacatcgccgccttccagcattacaccaagatggtgtccaagcaagtagacagcgtactgaaagccctctactccacccctgccggaagaaacacgattgtcgtaattatggcggaccacggcgacggcatggcatcccaccgcatggtgaccaagcatatcagcttctatgatgaaatgaccaacgttccgtttatctttgccggtcccggcatcaagcagcagaagaaacctatagaccatctgctgacacagccgacgttagatctcctgcccaccctttgcgacctggcaggcatcgccgttccggcagaaaaagccggcatcagccttgcaccgactctaaggggagagaaacaaaagaaaagccacccttatgttgtctccgaatggcacagcgaatatgagtacgttaccactcccggacgcatggtgcgcggaccgagatataaatacacccattatctggaaggcaacggagaagaactgtacgatatgaaaaaagatccgggtgaaagaaaaaatcttgccaaagaccctaaatactccaaaatactcgccgagcatcgtgctttgctggacgattacatcacacgttccaaagatgattaccgcagtttgaaggtagatgccgatccccggtgcagaaatcatactcccggctaccccagccacgaaggtcctggggcacgggagatcctcaaaagaaaataattctataaaaaagagtgaagattgcttgccagtcttcgctctttttatttcttttgcacatcaccatacgagcaaacaaaatagtgaatagtaatttacagcatataatagcactcattgcagccatattcatatcggcggctctccatgcaacaaacctgaacaaagaacgacttaccttactccagccacttgtcgagcatgatctttctttcaatacaaatatcgatattacaacggacagcatcatcttatgggaaaaactcttaagccccgaacttgaaaagcagcaagaatatcatattctgtttccattgaaaatgatggcagttcaggcattaattacggaaggaaatatcagtctggcagtcaacaacgccaactcaatgtatcagcaagccaaagctatagattatcctttcggaacggcactggcattgcgtgcccttgcagacacctaccaaagttcgggaaatccccagtctgctatagagtcttatgaggaatccttgaaaataatgcaaaaaattccggcaagtattccatatcttaagacaagcatgtttcatttgatcctgagcaaactcaaatacaggcaaatgacagatatcgaaaaagattttgcctatctggagtctctttaccataaagaatcaggtttgcccgatgacttctatctgccttgcagctatgcctattattatatacagacaaacaaccttccaaaagcactggagtatctgaaacagctggactccatctacgaaaaatatccgtatccctactattcttcaatcagcaactatatgtatgccggctatcatattgagtcaaaagaatatgataaagcgctgaaagaatatgaagaattactcaccataacaaagaaaacggctttattcagacatgttcagttattacaggaacgcgccaaagtcctggtacttatgaatcagaaacaagaggcgtgcaagatttatgaggagattaatcatctcaaagattcattggacgcccaaagttatctcagccagataaacgaactgcataccctgtatcagatagataaaagcgaacttaattatatcaacatacaaaaaaatctctattattggagtctgtctgtgatcttagtgatcgtagtactgatcatcattgccattttccgcatcaagcgcaccaacaatcgtcttctgcaatcacaacaggaacaggaaaaagccaagaaacaagcagaaaagtctatccacaccaaaagcctttttctctccaatatgagccatgagattcgtactccgctcaatgctttatccggtttttcagctattctgacagaagaatccatcgacaacgaaacgaaacaacagtgcaacgatatcatccagcagaactcagaactgctgctcaaactgattaatgatgtaattgacttatccagccttgaaattggaaaaatgcaattcaaattcaacgagtgtgatattgtagcgctatgcagaaatgtcatcgacatggtagagaaaataaagcagactcaagcggaagtacggttttccacctctctcagttcactgaagctgaccacggacagtgcccgcctgcaacaagtactgatcaatctgcttatcaacgccacaaagtttactgcacaaggcactatcaccctggaactggtgaaacaaacggaagatacggcccttttctccgttagtgataccggttgcggaatctccaaggagaaccagaacaagatattcaaccgcttcgaaaagctcgatgaaaacgcacaaggcacaggactcggattatctatctgccagcttatcatcgagcaactgggaggcaaaatatggatcgacccggactatgacaaaggagcacgttttctgttcacacacccgatttgccatgcgcagataaagaaggaggaaacacgatgaaacgactgatattactgatcatcacctgctatggcctactgtcgggctatgcaaacaccgatacagcctcagacagtctgctgcaagtgttgcaaacgctgccgcatgacaccacacgcctctctaccctgaacgacattatcaagatagagcagaacaactacaaatgtatccagtattcggattcgctgatgcaggaagcgttaaaactgaaaaatgacaagtatgccagtttagccgcttattatcatttgttgtattattacaaccgttgcgaacaggatagtgtagccaaatggatagtcaagatggaaccgttggtacaaaaatccggtttatgggattatttcttcgacgcccgacactttcagattgacctatacacctttaccgaacaatatgagcttgccatcagcgaagcaaacaagatgaaacagaaagcccttgatattgacaataaccgtggaacggtagctgcttatcagtgcctgtccaacgcatatatcggcagccagcgctgggacgaggggctcaaagcattggaagaagcctacaggctacttccaaagaatggcaatgcggtagtccatatctccgtcctgtcacagctcatatccgtaaccaaagaaatgaaggacaattacaggcaactaaaatacctgcaagagttggaaaatgtactccgtaaattcatcattgacaatccatctctaaaagacggatttgcagacgtattcattttcaatgagattttctatgcgcattattacctgaataccaatcagccccaaattgcttattcacatatagaaaagtctaaaaagtatctgactgaaaatacctatttcatgtataaggtgctctactacgacatctatgcgaaatactatcagagtatcaaacaatatcagcaggcatcagcctacatcgacacgacattaactatgctcaagaaagatttcaccagcgactatgccgaacaactgctgaaacaggctaaaatatgggtggaagccggagataataacagagcgacaactctctaccaacaggcactggccatcaaggactcggctgccatggcactctccaacacccaaatggagcaaatcaaaaaaagctataatctggacaagatagaactggaacaacaaaagcagaccaaccaaatacgtctgatcagcctgatcgtaatcagtgccattctgatcgtattatttatttccctattccggctctccaaaatccgcaaagccctgaaatattccgagagcgaaatacgcaaagcagcggaaacggtacgggtaaccaacgaaataaaaaatcgcttcctgtcaaacatgagttataacatccggaccccgctcaacaacgtggtaggtttctcgcaactcatagccagcgaaccgaatatagatgaaaaaacaagagaagaatactcggcgatcatccaccaaagctcagaaagattaatgagactggtcaatgatgtactcgacctgtctcgtctggaagccaaaatgatgaagttccagatacaagactatgatgccgtcgcactttgtaacgaagtatgctacatggcacgcatgaataatgaaaagacaggcattcaagtccgcttcactccggaagtcgagtcactgtcccttcgcacagataccacccgattgggatacgctctgctcagtaccctgacctatccgcatgaacatgaaacagagggacaacaggaggaacagattatccgctttacattaagccggaaaggcgaaatgctttatttccgcattctcaactctccattggcggacgaggctttcacctcacaggagaccggcatcaggcatgagatcaaccagttattgctggcttacttcggaggaagctatcaggtaaacgcccggggaacagaaggcccggaaattgttttcacctatcccattgcttcagaatcggaataaagcgctatctttgcaaactgtaaacttaaacgcttaattatgtataccaacaaacagatttggagtgtcagttacccgatactactcagcttgctggcgcaaaatgtcatcaatgtcaccgataccgcattcttagggcacgttagtgaagtggccctgggagcttcggctatgggtggactattttatatatgtatattcaccatcgctttcggattcagcacaggatcacaagtcattgcacgacgcaatggagaaggacgctacagtgatgtaggtcccgtaatgattcaggggattatgttcctcctgttgatagctatattgatgttcggcttcaccaaagcgttcggaggaaatatcatgcggttgctggtttcttccgaatccatctacgaaggcactatggagtttctggactggcgtatttacgggttcttcttctcgtttgtcaatgtcatgttccgtgccctgtacatcggcatcacacgtaccaaggtcttgaccatcaatgctgttgtcatggcattaaccaacgtcatattggactatgcactgattttcggtaaattcggtctgccggaaatgggaatcaagggagctgctatcgcttctgtactggcggaagcctcttccattctcttcttcctgatctatacatatatcagtgttgatttgaaaaagtatggtctgaatcgtctgcgctcgttcgatccggcattgctgatgcgtattctcagcatttcttgcttcacgatgcttcaatatttcttatcgatggcgacctggttcgtgttctttgttgccgtagaacggttgggacaacgggaactggccattgccaatattgtccgtagtatctacgtcgtactgctgattccggtgaatgcactggcaacaacgaccaacagccttgtcagcaatgccatcggcgcaggaggtatccaatacgtcatgccgcttatcaataaaatagcccgattctcgttcttcatcatgctgggactggtgggattgtcggttttgtttcctcagttcctcctctccgtatataccagcgaagcagcgttaatcaccgagtccgtgccttcggtatacgttatctgctgcgccatgctcattgcatcagtagccaatgtcgtattcaacggcatctccggaacaggaaatacgcaggcagccctgttgctcgaaaccatcacgattgccatttacggttcctacatcgttttcgtcggaatgtggctaaaagcaccgattgaaatctgctttacgattgagattctgtactataccttgctgttgataacaagctatatttacctcaaaaaagcaaaatggcagaataaaaagatataaatacaagagatttttgtacatttgcaggctcaaataattaattcgtaattaaacaactatgttcgataatttaagtgaaagactagaacggtcattcaagattctgaaaggtgaaggcaaaatcaccgaaattaacgtggcggagacgctgaaagatgtacgtaaggcattgcttgatgccgacgttaactacaaggttgcaaaaactttcactgacacggtgaaggaaaaagccatcggtcagaatgtacttacggctgtgaagccaagccagttgatggtgaagattgtgcacgacgaactaacccagttgatgggtggcgagacggtagaaatcaacctcgaatcccgtccggcagtaatcctgatgtcaggtctgcaaggttcgggtaagactactttctccggtaagttggcacgcatgctgaaaacaaagaagaatcgcaaaccattactggtagcttgtgacgtttaccgtccggcagctatcgaacagttgcgtgtactggcagaacaaattgaagtgccgatgtactcagaactggacagcaaaaatccggtagagattgcacaacacgccattcaggaagccaaagccaaaggatatgacctcgtaatcgtcgatacagccggacgtctggccgtagacgaacagatgatgaacgagatcaccgctatcaaagaagcgatcaatccggacgaaattctgttcgtggtagactccatgacaggacaggatgccgtcaatacagccaaagaatttaacgaacgtctggacttcaacggtgtggtactgaccaaattggatggtgacacccgtggtggtgcggctctttctatccgttcggtagtcaacaaaccgattaagtttgtgggtacaggtgaaaagctggatgctatcgaccagttccacccggcacgtatggcagaccgtatcctcggtatgggtgacatcgtttcgctggtagaacgtgctcaggaacagtatgacgaagaagaggccaaacgtctgcaaaagaagattgccaagaatcagttcgacttcaacgacttcctcagccagattgcccagatcaagaagatgggtaatctgaaagaacttgcatccatgatcccgggcgtaggcaaagctatcaaagatatcgatatcgacgacaatgctttcaaaagtatcgaagcgatcatctattccatgactccggcagaacgttctaatccggaaatattgaacggctcacgccgtacacgtatcgctaaaggtagcggaacaacgattcaggaagtaaaccgtttgctgaaacagttcgaccagactcgcaaaatgatgaagatggtaaccagcagcaaaatgggaaagatgatgccgaaaatgaaaaaataaaaagaattttattctgtttcagatagaaggaggaggcttaggcttcctcttttatttttggtattacagatttcactttcctataccaatcagccttttacctggcaacttcaacttttcaagttttcactttccacagactcttgtagtgattactcccgccatgataaacccaatataaaacactgcgttttacaaggtataaagctatgctttagggagtgaaaagcgcagctttataccttgtaaagcgcagctttagcttccatatccccgctcctttcgccaacaactacactgaaagattatcctaaaaccatattaatatcactatttacttgtaatgattacaattttacaaaggttttatatgaatattcatttttatttctttactttgcaaaagataacaaaacagaagcacgaatatgtactatgtatatgtagcaggttacattttattagcagcagccatgcagctgttcacaggaaactttcctgtttcttttctcgcctttccgctgaatatcatctttgcggcgatctggcttttcctgttatggatactatataaagaatataataatctaagaatcacccgttttctcggttcatccaaagccagcgttttatctatcagcctgtttatcggtggttgcctgatcataggacttttcccccaactatctgaaccggaagcagaaatgcgcaatggaatatcagcctcattgggatgttacaatttcatgacttcatggatattcatttctatactcttattattattaagcaatctggcgatgatcaccatccacgcctgtcggcatcgcaaacaagcacgctggcgctttattctgaaccatacaggtttatggctggctctgtttgctggatttctgggtagcagtgacacgcagacattacgcatacctttatataaaggtgaaccgacacacgaggcattcgacatgaatggcacatcttactatttagattatgatatggaactcaattcgttcgctgtagaatattacccgaacggacgtccttcccgcttttccgccaatgtacgtttggggaatgagaacgttctgctggaagtaaaccatccctattcctaccgactgggggaagacgtctacctcaccggatacgacgtaacaaaaggcaacgaaagcaattactgcattctacaggtcgtaaaacagccctggaaatatgtgatggtagcgggtattctgatgatgcttgcaggagcagttcttttatttataaacggagctaaagcgtatgataaactgggataacttctatgtatttgcagcagtatccatctgcttatggttggcaggagctgtatttgcccttcgttcatcatcgaagagtaaggtggcaatcgtttttacttccggcggcattattatattgggaatatttattgccggattatggatattcctccagcgccctccattacgcactatgggagaaacccgattgtggtattcattctttatgggaatagcaggattgctaacctatatcagatggaagtatcgctggattctctctttctcgacgttactttctacagtttttgtgatcattaatttgatgaagcccgagatacacgatcagtcattgatgccggcgctgcaaagtgtatggttcatcccgcatgtaaccgtatatatgttctcttattccgttctgggatgtgctttcatcatcgccctgaccggactgttccgtcataaagaagaatacctgcatacagcagacaatctggtctacgcaggcgtcgcttttctttccatcggtatgctgctaggttctctctgggcaaaggaggcttggggaaactactggagctgggaccccaaagaaacttgggcagccatcacctggatgggatatttgctctacatccacctccgcctgttcagaagaaccggacggaaaacactctatgccctgctcatagtctccttccttgctttacaaatgtgctggtatggagtcaattacctgccggcggcccaacaaagcgtacatttatataatcgtaataactaacctcaaaaaacaaatgtgaaatgaagagaagtacaaaactaatcgtagcattattggtagtcgtggcggcattggtagtcatttaccgactgatgcatcgggtgccttctgccgatttggaagcaaacgtgcagatgcaacagattattacggatgcaggatgcctgagatgccatacctcgacgccggaactaccgttctatgcaaatatgcctgtagccggaaaaattgtaatggaagacgtgagcaaagcctatcgcgctttcgacatgactcagatggagaaagacatgaaggaaggacgccctctcaatccggttgatctggctaaagtagaaaaagtaatcctcgacggaaagatgccgcaggcaaagtattaccttgtacattggggagcttctttcaatgatgcaaagaaagaggtagcactgagctgggtaaaacatcaccgcatgggactgtataccgatgtggcagtagcacctgatttcattaacgaaccgattcgtcctattgccgactcgatctcagtcgatgtacgcaaagtggtcttaggaaatctgttgtatcacgacacccgcttatcggcagacaacaccgtttcatgtgccagctgtcatggtctggataccggtggcgttgacaacaagcagtattctgaaggagtaggcggtcagttgggcggcgtcaatgccccgaccgtatacaatgctgcctataactttgttcaattctgggacggacgtgccggaactctggcagaacaagctgccggccctccattgaatccggtagaaatggcttgcgagtcattcgatcagatcatcagcaaactggcagaagacaagaatttcgtagtggcattcaacgaagtatatcccgacggattgaacgaaaagaatatcacaaatgctattcaggagttcgaaaagacattgctgactcctaattcacgtttcgaccgttatctgaaaggacagaaagatgccatcaccgcagatgaaatcgccggatacgaccttttcaagaaatatgactgtgcgacttgtcatgtgggagaaatcctcggaggacaatcttatgaactgatcggtgtacagcatgattatttcgcagaccgtcaggcagaaatgactgaagaagacaacggacgattcaagcagacaaaagcagagcgtgaccgtcaccgcttcaaagtgccgggattgagaaatattgaactgaccgctccttatttccacgacggcagcatggctactatggatgatgcggttcgcgccatggccaaatatcagttaggcatcgacctgccacaaccggaagtagataagattgtcgccttcctccgtacattgaccggagagtataaaggcaaattgctgacaaataagaacatgatctgacaagaccaaacagaggctccatttcacccgaacagagcctctgattgatgtaaacagagcctccgtttcacctaaacagaggctctgtttttcttgcctgaaaatcagagctttcccttgtactttttaccttctttcctactcgcattccaatatgttccgctgtcccctctccacaaaaagtccattccttttggagagttcagttatttattttacttttgtccatcaccaataaatactctgaaaatatgactctgatagacggaaaagccatttccgaacaagtgaaacaagagattgcagccgaagtagccgaaattgttgctcgtggcggcaaacgcccgcatctggcagcaatccttgtaggacatgatggtggcagcgaaacgtatgtagccgccaaagtaaaagcctgcgaagtatgtggattcaaatcctccctcatccgttacgaaagtgacgtgaccgaagaagaactactcgccaaagtacgcgaactaaacaatgacgacgacgtagatggatttatcgtacagctcccgttacccaaacatatctccgaacagaaagttatcgaaacgatcgactatcgtaaagatgtagacggattccaccctatcaacgtgggacgcatgtctatcggacttccctgctatgtatccgccaccccgaacggtattcttgaactgctgaaacgctatgagatagagacgtcgggaaagaaatgtgttgtactcggccgcagcaatattgtcggcaaaccgatggcttcactgatgatgcagaaagcgtacccgggagatgcaaccgtcactgtatgccatagccgcagcaaagacctggtaaaagaatgtcaggaagcagatattattatcgctgctttgggacaacccaacttcgtgaaagaagaaatggtaaaagaaggtgcagtagtaatcgacgtaggtactacccgtgttccggacgccagcaaaaaatccggcttcaagctgacaggcgatgtgaagtttgatgaggtagcgcctaagtgctcattcatcactcccgtaccgggcggcgtgggtccgatgacgattgtatcattaatgaaaaatacacttttagccggtaaaaaagctatttacaagtagaatattgaaggacagtgaaatgtgtttcactgtccttttccttcccttaatctgacagttatgaaaacaattacgactctccctctcttattatgtccgtttcctgcctaagtaacaatcattctcgaaaagacattataatcctcttgaacgtatgaaagaactattagtatcccttcttctggttacacaattctcttgtatcagcaaagcgcaagaaaatgatactaccacacagatactgacaactgacagcctgcaaacagacaccctttcgcttctttttgcaggggatcttatgcagcatcaaggacaaattaacgctgcacgtactgcgacaggaggctacgattattccagctattttgaatatgtcaaagacgaaattcaaagtgctgactttgccatagctaatctggaagttactctcggaggaaaaccgtacaaaggctatcccgctttcagcgctcccgatgaatatctgaccgctatccataatgccggattcaatgtactgataaccgccaataaccatagtctcgaccgtggcagaaaaggcttagaacgcactatacaattaatagactccttaaaaattccacacgccggaacgtacctcaacgctgaagagcgtgaaaataaataccctcttttattagaaaaaaaaggcttccgcattgccatactcaactatacatacggaacaaacggaatccctgtcactccgcccaacatcgttaattatactgatacgaccattatatccaaagatatcgaagcaagtaaaacaatgaaccccgatgcaattattgcttgtatgcattggggaatcgaataccagtcactccctgacaaagaacagaagtttctgaccgattggctgcttcgaaaaggagtaaatcacataatcggttgtcatcctcatgttgtgcagcctatcgaagttcgcgaagacagtctgacaaacgggaagcatctggtagtatattcactggggaattatatttccaatatgtccgcccgtcgcacggatggcggcctgatggtaaaaatggaattagtaaaagatagtaccacccgactcaaccattgcgaatatagcctggtatggacagcccgtcccgctcaatcaggaaaaaagaatcatcaattactaccaattaatttccccactgactccatttccgtaaatgcacgtaactctctgagaatctttgcaaatgatgcgcgatccctcttcagcaagcataatcggggaataaaagaatatcttttttataaaaaaaagtagcagaatcttttggagatttaaagataatatctatctttgcaccgcgttagagaaacgcagacatggtggatgtagttcagttggttagagcgtcagattgtggttctgaatgtcgccggttcgagtccggtcttccaccccaaagaaattttaaaagacaagtcctgtaaagcgaaagatttacaggacttattttttattaatacaatcgctttatggaaaacaacaaaaaactaactcgttccagaaaggaacgaatgatagccggagtatgcggaggtttagccgaatacttcggatgggaccctactttagtaagaatagtctatgcactagccaccatcttcactgcttttgcaggaattattatttatcttattctatggatcattatgccggaagaaaggtatagcgacggatacggtgacagaatgaatcaacgtttgcattagtattgctttcatagccatccggagcatttactttaaagatccggatggaaatcttatagaaatcagtacattaatataattcgagtccgaactcatctttcagttgcatcagcgcctgattcttctgtgccatcatctggaacttctcgacacgaccaaccgcccgaacagtttctgcaggttcacttacccgcactgtcatcgccactttgctgttcttcaatcttccacgaagataagtctgtaattccggaatcaaagctgtaaaatctttagcagcaatctcattatcgaccactacttcaaaagtagtcgaattattcaacaataccggacgtatcacttgcatacgctttgcaatggccacctgttctttgggtaactgtcccgcatattcctgccagtaataattcaaatctctgtcattgaaaataaagtcttcttccggctgtgtttgcacctgagcaacattggttttggctgtattctgagcagcctgatcacgttgcggatttttgatagatactcccaaactagacatcttcattacaggaatcttccgttcctctttggaaatcgaagagattccaacactctgtgacggcgcggaagcagtatttgccggagcagcagcccccgaagcaacagatacctgcggttgacgcacagcagtattagcggcagacggcgcaatagccggagacggagcagtatgaacagtagtctgttgagcagacggtgcagaagcgacctgcggctgctgagctgcggcaggttgggtgaatacgggttttatggtctgcttagggccacgcccaccacttacgtcatccccctcggtggtaagctgggcaacctgtatcaaggtcagttccaccagtaagcgcttgttcttgctggcacggtaattcaaatcacaatcattgcaaagcttcatcgcacggtaaaggaactgcaacgggcatttctgcgcctgttcctgataacgctgacgtatgctcgcccctacttccagtaatggcaaggtagctgcatccttactgaccagcaaatcccggcaatgagaagataatccggtgatgaagtgactaccgtcaaatcctttattcagcacatcattgaaaagcaacaaggcatcacttaccctgttttctagaaaacaatccgtcagacggaaataatattcgtaatcgagaacgttcaagttctcaataacactcttataagtaatattccctcccgtaaaactcactacctgatcgaagatagacaatgcgtcacgcatacctccatccgctttcattgcaatgacattcagcgcttcgggttctgccgtaatattttcttttgcagcaacgtacgacaaatgattcaccgtatcttcgacactgatccggttaaaatcataaatctggcaacgggaaaggatagtcggaagaatcttatgcttctccgtcgtagccagaataaagatagcgtggcggggaggttcttccaatgttttcaggaatgcgttgaaagcggaagccgagagcatgtgcacctcatcgataatatataccttatatttaccgatctgtggcgggatgcgcacctgttccaccaattgacggatatcatccaccgaattgttggaagcggcatcaagttcatggatattatacgaccgctgttcgttgaaagccacacacgattcgcattcgttacaggcttcaccatcggcagtaggcgtcatacagttgatggttttggcgaagatacgtgcacaagtagtctttcccaccccgcgcggtccgcaaaacaaataagcatgagccaatttctgggtagcgattgcattctttaatgtagtagtcagcgctcgttgtcccaccaccgattcgaatgtggacggacggtacttacgagctgatacaatatagttctccatatccgggattctctctgttttttttgatttttcgctttcagtgcaaatgtacacaaaaaagtgataagtaataaaggatagagaaagaagttttgaacctaaagcggtaagtttttaagttattagttttatctttgcggatataaaaaagagaagttatggataaactgatcactatctggagtttcatatgccgacgtaagtatcttatcaccgtcgttgcatttgctgttatcattggttttctggacgagaacagcctgttccgccgtctgggatacgaacgcgaaatcagccagctgaaagaagagatagaaaaataccgagcggactacgaagagaacaccaaacgtctcaacgagttgaacagcaatccggatgctatcgaacaggtggcacgtgaaaagtatctgatgaagaagcccaacgaagatatttacgtttttgaagataataaatgaaacaattagtacccgcacttttcgccgtaggcgcaatcatggctctcacaggggctgctgtatatatcaccggatggaactatgctccttatatttataccatcggagccggattcattgctctggcacaagtaaacacaccggttaaaggaaaaagcaaaatattaaagcgtctgcgcatccagcagatattcggagcacttgcgctgatactgacgggagctttcatgtttaccacccatggaaatgaatggattgcctgtctgactatcgctgccgtacttgaactttacaccgctttccgcattccacaggaagaagcaaaagaagagaaataaaaaaacctgttcaaagcttctcagtcttgaacaggcatcaatttattaaaatcatgaatgcccttaggaaacccaagggcctaaaaaagacgttttttatttcttagcagatgaatatctggcattcaatccatctacaatttcttttgtgatattatatgcactatcagcataaagcagattatcgaaacctgtgttgctgaagatcaggctatatccacgagtcttattatattctttcaggaaagcgttgatagaatcacggaaaagcaaactgttagcattattgtcttccatcagaccattttgaagtttgttgctcaattcctgcaaatcctgttccattttagccaaacgattgtattcctgctgagctctttccggtgacaggaaagcattgctttcatatttcttttggaattcctgtttttctttgttcaaagctgtcatcttctggttcagcgtcatgcgaacattttcgctcttctttaccatagcctcattcaagtcaatacagaaattgtatttagccaacaaggtatctatttcaacataagctattttcattccagacaattctgcattagccgaagccggagtagttgcaacttgattatcagctttgccggcgcattgtgagaataaaacgataaacgcaagtgcagctaaaccgttcatgaggtagtttattctattcataactctaaaatattgtttttaattaattagttcatactatcgttcaaggctttttccaactcatcaatagaaaaacgtgatttcttttgtgcttcacgatcctgcgactgcgcacaaccgattcctttcttacgcaactctttattaccgctcacatgaccattcgggaactttccccccttcgtaaagaatactttcacccccaataatagcagggaaatagcaactattaacaaagttatcagtatagtctcaaccatttctattaattttgtgagtgcaaagataggctttaatgagaaatgagttcagataagtcaagcaaattaaccatatttagcaataagaggaaccaaaatgaacctcctattcctattataaaagaaaaaagcatggaaaaaaaagaccttaagccggctggcgtattcaagtattttgaggaaatctgccaagtgccgcgtccttccaagaaggaagagaaaataattgcctacctaaaggcattcggagtaaaacataacctggagaccaatgtagatgaagcaggaaacgtactgatcaaaaagcccgccactccgggcaaagaaaaccttcagactgtcatattgcaatcgcacatcgacatggtgtgcgaaaagaacaatgatgtacagcacgacttccttaccgaccctatcgaaacagaaatagacggagaatggctgaaagccaaaggaactaccctcggagctgataacggtatcggtgtagctaccgaactggctatcctggcggatgacaacatcgagcacggcccgctggaatgcctgtttaccgtagatgaagaaaccggtctgaccggagctttcgagctgaaagaaggtttcatgagcggtgatattctgctgaacctcgactccgaagatgaaggagaaatctttatcggatgtgccggaggtatcgactccgttgcagagtttagttataaagaagtagaagtccccgcaggatactttttctttaaagtagaagtaaaaggactgaaaggcggtcactccggtggtgatattcacttgggacggggcaatgcaaacaagatactgaaccgattcctgtcccgaatggctaaccggcaggacctgtatctctgcgaaatcaacggaggtaacctgcgcaatgccatcccccgcgaagcatacgccatctgtgcagttcccgaagatgccaaacatgacgtccgcacggaactgaatatcttcaccagtgaagtagaaaacgaactggccgtcaccgaaccggacctgaaactggttcttgaatcggaaactccccgtaaaatggctatcgaccaggatactactacccgcttgctgaaagcattgtatgctgctcctcacggtgtatatgccatgagtcaggatatccccggactggtagagacttcaaccaaccttgcttctgtcaaaatgaaaccgaatcatattatccgcatcgaaaccagccaacgcagctctatcttatctgcacgcaatgacatggcgaatacggtgcgtgccgtcttccagctggcaggcgctgatgtgaccttcggtgaaggttatccgggatggaagccgaatcctcattcagctatcctcgaagtggcagcagaatcttacaaacgacttttcggtgtagaggcgaaagtgaaagcaattcacgcaggactggaatgcggtttgttcctcgacaagtatccgactttagatatgatctctttcggacctactctcaccggagtacactctcccgacgaacggatgcacatcccttccgttgagaagttctggaagcacctgttggatattctggcacatgttcctgccaagaaataacagtcaggtaagatatcatagaaaagatgatggtgatagcagaaaaagatttgctatgaccgtcatctttattataatgctctttttcgtgccctcttatatcatagggcaaacttcttttgcaaagcaaacttcccttaccgaaaaagaatcgttcagcaataaacaatctgtttcccagaagaagtcttccgccgaagaacgaattccctttcgtgtcatgagctggaatgtagaaaacctctttgacactcaccacgatacactaaagaacgataatgaatttctccctgacgctatccgtcactggaactacaccaagtacaagaagaaactggctgatatggcccgtgtcatcactgccgtcggtgaatggaatccacccgcccttgtaggtctttgtgaagtagaaaacgacagtgtactacgtgatctcacacgacgttctcctttaaaggaactgagttaccggtatgttatgacaagttctcccgatctgagagggattgatgttgctttattatatcaacgtgacctattcaaattattatctttccggtctatccccatcccctcattcaagcatcatcgccccacaagagatttactgcacgtcagcggactattattaaccggagatacacttgatgtaatcgtctgccatctgccttcccggtccggtggagccaaggaatccgaaccttaccggctacacgctgcccgaatactacgcacagaagccgacagtctgctaaatatccgccttcatccacaactggtcatcatgggagattttaatgactacccaaccaataaatccatcaaagagatattagaagctactgatccccaacagtcagtcaccttccccaatccccggaaactctaccatctgcttgcccgaaaagcaacatcccgccattttggctcctataaataccacggaaaatggggattgctcgaccatttgatcgtatccggcaatttactcgatacttcctctaaattcttcaccggtgaagacaaagcaactgttgcccgcctcccctttctattgacagaagacaagaaatacggtgatgatgaacctttccgtacctataaaggaatgaaatatcagggaggaatcagtgaccatcttcctgtttacgcagattttgaactcattttatactagccgaaatacaaggaggttataaatccactgtcaaccactccgccggacatagccggaaagaaaaaaaagagttttttatgttaataaacggggttcgatacaaaatttacttatttttgcagggtttacagcatttacaaaaaatacccccaatggaaacctttgacgaaaaacaacttctgaaggctattagcgaaggagatgagaaagcctttaaaactttcttcctatactactatccccgcatcaaagggtttatcaacggactactgcaatcgcaagaagaggccgaagatttatcgcaggacatctttcttacgttatggaacaaccgctcatccctccataccatcaataaccttaaaccttatcttttccgcatttccaaaaatgcggtgtatcggcacatcgaacgcacactactgttcaggaactatcagcagaaagaaaccgaaaagtatatcccgccactggaaagcaacgaaaccgatgacaacatccacctcaaagaactcgaactattggtgacaatggttgtagaaaaaatgcctccgcaacgacagaaaatatataagatgagccgggaatcaggaatgaacaacgaagaaatagcccgcgaactaagcatcaacaaacgaacagtagagaaccacctttcacaagcacttaccgacatccgaaaagcattattcataacctttattctatttttctaaaaaaaagtagaatagaggctgtgcgttattaatctgttacgtatcttatatatgtaaccacacctaaaatgcgctaatatgtcgaacgctcataaaataattaaaaactttacttccgataagttcagtccggaacttaaagagaagttatggaaatggcttgtcgactccagtgaacaggcggagaaagatgaagcattgatggaattatgggaagatcagaatttcaaagccgatgcaagtactgaacgttcctatcagaacttccgcaggaaaattgcgccccaacagcggaaggcaactgcaaggtataccttgcgcaaatggctacaggtggcggctgtattactggttcccctgctctctatggtggcatcctacctatatatacaatcgaatgaagagcatacagaacttgtcgagtactatgtgcccagaggcgaacaaaaacaggttaccttgcccgacggcaccacagcatacctcaactcaggaactttactggtatatccgcaaaagttcaccggggatatccgttcggtatatctgataggagaagctaattttgacgtaaagaaagataagcaacatccatttatcgtcaagaccaaccatctgaaagtaaaagtattgggaactaaattcaacgtacacgcttatgcagaagacgagaagacaaccactactttggaatcgggttccgtagtcgttcagaaagcaaacaatgaggatatcatcaccctcacaccgaacgagcaactggaatatgacaacccgtccggagaatttaataaaaagattatcgacgcctctgtctactccggctggaccagaggcgagctgaactttgcggcaatgactctcagcgatattttcattacgatagagagaatatacgacatacacatcatcgtccctccgcatctggctaccaccgatgtatataccatcaagttcaaacaaaaagctcctatcaaggagatcatgaatatcgtgaccaaaaccataggaaacatagactataaagtcgaagacgagaacattctcttaatttattcacccctaaataagaaaggaggccgatagacagaaaaaagggagtcgatatttcgcggataccaactcccccaaatcaaaattacttcatttaaattagttgtgtacacttaaattagtattaatgattaactcacaaaagtatgaaattttataaattgtcgggcataggttatcccgtaaaaattcataaattttatatattgttattcgctttatgtttttataacatagcctatgggcaaaatcagccaataacggtatctatgaaaaaccaacctctattaaaagtattcgaaatcattgaagatcagaccgattttagtatcgcttataatcagacgaaactggacgtgaaacaaaaggtcagcgccaattttgtcagagaagcagtctcttctgttctgaactccgtactcaaaggaacaggattcacttacagacaggaaggtaagcatattattatcattcctgtcccggcaaaggcagaagcagcccccaacaacactacttctacccagcagtccataaaaatacggggaaccgtaacagatgcgcagggcgaacctctgattggagcaaatgttctggttgacggcagcaaacaagcgaccattaccgacatgaatggggaattctcactggaagtacctgccaacagtaagttacgggttacttatatcggttacgtcacacaagaagtaacagtcaaaaacaagacacttttcaacatacagctacaggaagatacccagactatggatgaagtggtagtcatcggattcggaacacaaaaaaaagtgaatatgaccggcgctgtagcctctgtaaatatcaaagagtcgttgggcgaccgcccgattaccaacgtttcggctgccctgcaaggagtcgtgccgggactaaaaattgaatcgacaacgggaactccgggagacgacatgacgtacaatatccgtggaacaacctccatcaacggtggtgagcctctcgtattggtaaacaacgtaccgatggatatcaacatgattgacccgcaggatattgaatctgtctctattttgaaagatgccgcttccgcagctatctacggtgcccgcgcagcttttggtgtgattctgattacaacgaagcaaggtaaaaaggacatggctcccagattcaattacaacaacaacttctctttctcgaaagcatcagagcttccgcagaaagcaagtccgctggaatcggtactggcgtacaaggaaatgggatgggcaaacgatacctatgtagacggaaaaaacatcacccaatgggaaggctacatacgagactatcaggcgaatccttccaactatccgaacggatatattttcgacgatcagggcaacctgttccttatgcgggagaatgatatgtttgccgatatgatggataacttcggattcatgcagaaccacagtttctccgtatcgggaggcagccagcgtaccagctaccgactaagcctgggatataccggtgaggacggcattctggtaacggacaaagacaaatttgaccgtatcaatatgtccagcttcctgagtgtcgacgtaaacaaatggctaactacccaactggatatcagatatgcaaactctacccagaacaaggtggagcaaggcggacgaaacggtgtctggggaagtgccatgcacctgccgtcctaccacaacatcctgccgtacgaacaagacggcatcgaatatcctgccgaaacgtccgctactttcgtacgctacggagaaccgagggtgatcaagaagaccaacctgcgtactttgggacgtgtcatcatctctccgctgaaaggactgaaaataacaggtgaatatacctacaaccggatcaccgagtacaaccggatgtacgtcaacaaatacaagtatataggattcaactttacagggctgctgaacaatgtagagaactcacgttatgccctgacgcaaggtttcaccaattacaacgctattaacgcattcgccaattacgacttttcaataggtaaacatgatatctctattatgggtggttacaatcaggaagagagtcataaggaatcgcaatggtcgcagcgcacggacgtattactggaaaatctgccgtcgctctccggttctaccggaacggcatccgtcaccgacagtttcgatgaatatgctatcagaggtttgttctaccgtgtcaattacacttacgacggtaaatacatgttcgaagccaacggacgttacgacggtacatcccgtttcccgaaagacagccgtttcggtttcttcccttctttctccgccggatggcgcatttcggaagaagcattcatgaagaataccaaaagcttcctgtcaaacttgaaactacgtgcctcatggggctctatcggcaaccagatcatactgaagccggacaacactccggaaaactatccctacatcccttctatgtcaccttacctgacggaatggctggtggacggacaaaagacgactacactgaatgcaccggcaatggtcagcagcagtttctcgtgggaaaaggtatatacactggacttcggagtcgatttcggattcttcgacaaccgctttaacggtactttcgactggtatcgccgcgacaccaaagggatgctggcacccggtatggacctaccgtgggtagtgggagccaccgccgccaaacagaacgccgctgacctgaagacgtacggctgggaactggaactgaactggagagaccgcatcaacaaggactggagctaccggatcggattcaacctgtacgactcacaaagtgaaatcacgaaatacaataatgagaccaacctgctaggcgacaagatttaccgcaaaggcatgaaaatgggagaaatctggggatatgtcaccgaccgcttctacacggaagacgacttcaacgcagatggtacactaaaaccgggaatccccattccgaaaggagcaggaaaagtttttccgggagacgtgctgtataagaacttcgatgacgataccgaaaccatctggagcggcgaaggaaccgccgacaatcccggcgaccagcgtatcatcggtaactcgactccgcgtttccactacggcatcaccgcaggaatcagctggaaaggactcgacctctctatcttcctccgaggcgtaggcaaacgggattattggcgcaccgaccagatcgcatggcctaccggaggctggggaagcctgttcaaagaaactctcgacttctggactccgactaacaccaatgcctattatccgcgtgtgtattccaacgacggggtaaacacaagctacaaccactggaaacagtcgaagtatctcgccaacgcctcttacctgaaactgcaaaacatcacgctttcctataccttgcccaaagtatggtcccagcgtctctacttcgacgatgtgaaagtattcttcagcggagagaacctctacacgtgggatcacctgccggaaggattggaaaccgatatgctgtcaaaaggtgcctgggaatatccgttcatgagaaaattctctttcggtatcaatgttacattctaataaccaatgtattatgagaaaatatttaatctttatatgtacagttttgttagcaagctgtctcaataacgatttcctggaaaggtatcctttgggagacccgactgccgaaacggcttttgaaacatacgacaatttcaaggcatacgcctggggattgtatgaaaccctgccttcattgggctatggctcggaaaattctacggacgacatctcgtacaaccagacaagaggaaccagcgaaagcaactggatcagaaaactggtgaccatccccgacaagaaagacaatacttcctggaactattacagctatatccgaagggtcaacctgatgctcgaccgcattgacggttcgaaaatgacggatgtagaaaaggcgaactggcgttccgtcggttactttttccgtagttaccgctacctgtctctcctgtcggcttacggtggcgtaccctggattgatcatgtgctgagcgacgacgaaacagaactgatcaaaggccctcgtgcctccagagatgaaatagccggtcacattctggaagacctgcaatttgccgaaaagaatatcaacgtgaacggagaaggcagaaacaccatcaacaaggcttgtgtacaggctttactctcccgcttctgccttttcgaaggtacctggcgcaaatatcacggactcaacaacgccgaaacttatctgcgggaatgcaaacgggtatccgctgaactgatacagacttatccgaacgtggcggactgctacgacgatctgttctgttcactggaactgaaagatgttaccggcgtcattctgtacagagaatattcggatgctgtcggtgtagtgcacgctgtcagcatcgggggaacgaccgccacctccttttacaatccgacccgcgacttagtggacagttacctgtgcacggacggaaagccacgctggacgagtgacgcctatctgggtgacaaggatatatacgacgagttcagcaaccgtgaccatcgtttgtggctgcacgtcactcctccttaccgggtagaccgttcggcttccagcacagcctgggacaataaatggaaatttacggataactccaaagaccgcagttttatcgacagcctcaccgtccgcatgggaatcgggtacggcaccagcaaggaacgacagaagttattgccattccgtcaaggatatgacggtggtattttgggtgcatcgcctcactttgacttctatctggagaaccagccgtggtacaagtctgccttcggatataacaactggaaatactattgctgctacctgagcatgggcagccaacgaaatgaagagacggatatgcctattttccgcatcgaagaagtcatgctgaactacgcggaagccatgtgcgaactcggcgagtttgaccagacagttgccgacgtcacaatcaacaaactgcgcccgcgtgccaatgtaaaactcatgaaagtctcggaaataaactcagccttcgacccgaaacgtgatctcggaaatccggattatcccaacgactacgaagtgagtccgctattatgggaaatacgacgggaacgacgcatcgaactgttctccgaaggattccgtttcgacgacctgagaagatggaagaaatgccactatgcactgaagaagaaactcggacaatacgtacgtgcatccgacttcacggcaggaaccaatgtgactatcgacggcggcggctccgaaggatatctcgaattccatccgaaacagaatcatctatggccggattactattacctcaaccctattccacgcaacgaacgggtactgaatccccaactcgaacagaatccgggatgggaggaaggaaattaaccggtaatccatcaccaaccggataatccggaactaaccggaagaggctgtggcaaatattggctcttcttgacagtcatcccaatgacaggacaagcatttcgtcattagcgtggctgaaagaccttgatatttgacactgcctcttccctttttaactgtattgatttcgtaagtttactcaaaagaataattgagtatttgaaatttattcgtatttttgagacatcagactaatacgggtaatccttttgccgactcttacaaaatctaaataaacacactgtaccccatgaagcacctaatttttacagctctctttcttctatcgtacacagtcgccgtccgcgcccaaatcgtatttcctacccccaatcaagtggaaatgcagacaggcaacctgattttagggaaaaaggtttctatgtacgccgaagacactaccgctttttatctaaacctttttcgagaagaagtactctcccgcactcccatcaaatggcaaaaaaaagaatccaaagccgatatctgctggataaccgactcatccctgccccccgaaggttaccggatcaagattcatccgcaacagatggtaatcagcgcctccgacaaaggaggattcacctatgccgtacaaacgctacgccaatgggcagccggttcagcaggatctatcacctttgcctgcgcaagcgtgacggactatccccgcacacagtggcgctgcttcttactggactccggacgtcagttccagaagattgccaccatcagaaagtatatcgacatggcttcactgctcaaaatgaactacttccactggcatctgacagaaggactgggatggcgcatcgaaatcaagcaatatccgcacctcacccggactggcggttcggtaggcaaaggagaagaacagcagggattctatacacaggaagaaatacgggacatcatcgaatatgcccgtcaacggaatatcaccatcgtccccgaaatagatatgccgggccatgccgaagctgctctctctgcctatccggagctcggttgtttcggattgccggtagagataccgcaaagcggatttacccagaacatattttgtgcaggaaaagacggaactctccgtttcctgaaaaacgtactggatgaagtatgcgccctctttccttctccctacatacatctgggcggagacgaagccccgaaaggcaactgggatcaatgcccggattgccggaaaaggattaccacagaaggactcaaagacagtcacgacctccagctatggttctctgcgcaaatggcaaactatctgaagtcgaaaggacggaaagccatcttctggggcgacgtagtctatcatgacggctacccgttgccggacaataccgttatccagtggtggaactatcggggacacaaagacctcgcgctcagaaacgccgtcaaacaccattatccggtcatttgcagttccaactactatacgtatctgaacttccccgtcaccccgtggaaaggatatacggaagcacgtacgttcgacttgaaagatgtctatctgaacaacccttccgacaaagccatcagcgagaaaaatccgctgatacttggcatgagctgcgcattatggaccgacgacggagtcacggaacgaatgatagaccgacgacttttcccccgcatcctcgctctgtccgaacagatgtggcacgagggggaagcgcttgacttcgaccggttctaccggaacatccttcaccgcaaagcatggttcgaagaagctggattcgaattcggaccggctctgaaagaagatgtaacgaaagattataaatgggattaaaaaaaagaacatcatgaacaaaagaaatttattgatcgcaatacccgccctgtgcagcggttacctgcacggacaaacccaacccgcatctcccaacgttatctatattttaatggacgatctgggatatggagatatcggttgcttcggacaagacaaaatagaaacaccccatatcgaccgtttatgcagcgaaggcatcaaactgacacaacattattccggttcccccgtatcagctccggcacgctgcgtactgatgacaggtatgcactccggtcatgcgcaaatccgcttcaacaatgagttagccgaacgcggagcagtaaacaactacgactcggtgtacgttcataaagagctggaagggcaattccccctacaggcgaacacgatgactatcgggcgaatgatgcaacaagcgggatataccaccggatgtttcggcaagtggggactggggtatccgggttccgaaggaactcccaacaaacaggggttcgaccgattctacggatacaattgccagcgccagtcgcacacatactatcctccttttctgtataatgacgaagaacgtgtctacctgtccaacaaagtgacagaccctcaccgaagccctctggataaaggtgccgatccgaacgatccagccagctacgctaaatatacgcaaaaggaatatgccaacgatctgatctttgatgaactgatgggatttgtcgatgccaataaacgcaaaccgtttttcctgatgtggaccactcccctgccgcacgtctcgcttcaggcacccgaacgctgggtacagcattatgtaaagaaattcggggacgaaaagccttacaccggacaagcgggatatctgccctgccggtatccgcatgctacctatgcggctatgatcagttatttcgacgagcagatcggccaactgatcgaaaaactgaaagcggaacatctgtacgaaaataccttgattgtgtttacttcagataatggtcctacgttcaacggaggcagcgattctccctggttcaacagcgggggacttttcaattcagcatacggatggggcaaatgtttcttgcatgaaggaggtatccgtgtccccgccattatcacatggcccggcaaaataaaacccggtacgcaaagtgaccacatctgcgcttttcaggacgttatgcctacgctggcagaactggcaggcatcacttgtccgccaacggacggaatcagctttctgcccacattgctcggcaaaaaagggaaacaaaaagaacacacttatttatattgggaatatcctgacccaaggattggcaacaaagcaatccgcatgggaaaatggaaaggaatcatcacggacatccggaaaggcaatacgcaaatgcagctttataatctggaaacggacatcagagaagaacacgatgtggctgcgcaacatcccgatatcgtaaaacgcttcgaacgactgatgaaagaagctagaaacggtccggacttttaacgaccttccttgctaactaacgggacataccggagcatcatccgtaacatccctgcgaaagacttgtgccaacgctttggcacaact

SEQ ID NO: 4560 - DNA, 9608 bp, Unknown
  gut microbiota DNA sequence
ctcctccttcctgaaggaggagagtttagttactattgacttttggcatatcttcatggggtctttttcgtctcgctgtccaatctccttcagctcgctgctcaattcctttcgcctcgctgctcagtccttttcagctcgctgctgaatctgcgttggccccgaggtgaattcacttcagtccggtgtctggttactacaggggacagtcataaaaaaactcccggcagaaatagttccatcgggagttttttatgcagattgtttttaattcttagaacggcaggtcgtcttttgcgtcacccatcgtgaaatccggggtagcagacggagccgggggaggaacgggggcacccggagccataggagcacctgcgcctacacgttcaactttccatgcacggatactgttgaaccagcggtcgttccactgacgggcgtcaacgtcgaatgatacggtcagttcttcgcccatctgaatgttgaactgttcgattttgtcggcgccaaatacgtcgaaacacattttgcgcggatattggtcatggttttcgattacgaactcttgtgatttccactcgttgccgctagtctttgaaactccacctctcggagggaggatagcgatgatttttcctgtaaattccattgcgataattttaaattctgcggcgaagttacaattttttaggaatatccctcacacaatgcttgttttttctttcgttttcttgggcagcacgaatcttttttcgtaactttgtgcgatatataattcaaaacttaaatactcgaaaatatatgaaatttatcgtttcaagtactgctctttccagccatttacaggctatcagtcgtgtaattaactcaaagaatgcgctgcctattctcgattgttttctcttcgaattggaagacggaacattgtctgtgactgtttctgacagtgaaacgaccatggtgacaaccgttgaggtaaatgaaagcgatacaaacgggcgttttgccgtagtagcgaaaacattgcttgatgcactgaaagaaattccggaacaaccgttgacattctacgtcaacacggacaattatgaaatcaccgtgcagtatcagaacggaaagtatagtctgatgggacagaatgctgacgaatttccgcagtcggctgtgctgggcgaaaatgcagtccgcgtggagatggaagcaggtgtactgctgggtggtatcaaccgttcggtattcgcaactgccgacgacgaactccgtccggtaatgaacggtatatatttcgatattacaacagaagacatcacgatggtggcatcggacggtcataagctggtacgttgcaaaacgctggctgccaaaggaaacgaacgtgccgcgttcatccttccgaagaagcccgctacattgctgaaaaacctgcttccgaaagaacagggaacagtaaccatcgaatttgacgaacgcaacgctgtgtttatgctggaaagctaccgcatggtctgccgcctgatcgaaggacgctatccgaactacaactcggtaattccgcagaacaaccctcataaagtgactgtagaccgtcagcaactgatcggagctttgcgccgcgtgtctatcttctcttcgcaggcaagcagtttgatcaaactgcgtatgcaggagaatcagattgtgatttccgcacaggacatcgatttctccacttctgccgaagaaacacaagtttgccaatattcgggtgccgctatgagtatcggattcaagtctactttcctcatcgatatcctgaacaatatttcggccgatgaagtggtaatcgagcttgccgacccgtcgcgtgccggagtcattgtgccggtagaacaggaagaaaatgaagacttgctgatgctgctgatgccgatgatgctgaacgattaattaattatttaatggataattgagaatggataatggataatgagctgcgctgtcagtggtcaggagttatccattttttatgtttcctatccattatcaattctcaattatccattatccattaaagaaagaaatgaaattaaatttgaaaaacccgattgtgttcttcgatctggagacaacgggaaccaatatcaacacagaccggatcgttgaaatttgctatctgaaagtatatcctaacgggaatgaggaaacgaaaacaatgcgtatcaatcccgaaatgcatattcctgaagcttcttctgccgtacatggcatttatgacgccgatgtagcggactgcccgactttcaaggaggtggcaaagaatgtggcccgtgacattgaaggctgcgatttggcaggattcaactctaaccgcttcgatattccggtattggcagaggaatttcttcgtgccggtgtagatatcgatatgacgaagcgcaagtttgtcgatgtacaggtgattttccacaagatggagcaacgtaccctttcggctgcctataagttctattgcgaaaagagtctggaagacgcccatacggccgaggccgatacacgtgccacttatgaggtgctgaaagcacagctcgaccgctatccggatcttcagaacgacatcgccttcctcgcagaatattcaagtttcagcaagaatgtggactttgccggacggatggtgtatgacgagaatggtgtggaagtatttaatttcggaaaatataaaggaatgtctgtagccgaggtgctgaagaaagaccccggatactacagctggattttaaacagtgatttcacgttgaataccaaggcggtgctgactaagatccgtctgcgtgaaatgagtaatttgattacaaaataatgctaaaaggaaaaaagataattcttggaataaccggtagcatcgctgcttataaagcttgttacattatccgtgggctgataaagcagggagcggaagtgcaggtagtcataactccggcgggaaaagaatttattactcccatcactctttcggctttgaccagtaagccggtcatcagcgagttctttgcccaacgggatggtacgtggaacagccatgtggacttgggtctgtgggcggatgccatgctgatcgcacccgctaccgcctccaccattggaaagatggcgaacgggatagcagacaatatgctgataaccacttatctttcggccaaagctccggtattcattgcaccggctatggacctcgatatgtatgcacatccttctacacagaagaatctggatatattgcgttcctacggcaaccgcatcattgagcccgcaacgggtgaacttgccagccatctggtcggcaaagggcgtatggaagaaccggaaaacattatccgagtgctggacgagtttttctctgcgagtgccgaacttcagggaaggaaaattatgataactgccggaccgacttacgaaaagatcgatccggtccgttttatcggcaattattcttccggtaagatgggatttgctttggcggaagaatgtgcccgtcgtggggcagaggtgacgttgatcgccggaccggtgcaactgaaaacgcagcattcgcgtatccaccggatagatgtggaatctgctcaggaaatgtatgaggcagcgcaaacctgtttcccgacttccgacgtggggattctttgtgcggcagtcgccgatttccgcccggaaacggtggccggcaaaaagatcaaacgggagaaggaagaagaactgaccttgcatcttcaggctacgcaggacattgctgcaagtctgggaaagatcaaaaaagacaatcaactgttagtggggtttgccctcgaaacaaataacgaacagcagaatgccgaaggaaagctcgaacgtaaaaactttgactttatcgtcctcaactctctgaatgacgcgggagccggcttccgtcacgatacaaacaagattagcattattgatcgcaaaggtcgcgaggattatcctctgaagcccaaacaggaagtagcgcaagacatcatcaaccatctggttgccgttttgactcactaatctttattttttaggtttaatttttaatttacagaaggtgttacgttcactttatattcagaattacgcattgatagaaaaactggatatcggttttgaaacaggcttctcggtcatcacaggcgagacgggggccggaaaatcgattattctgggagccatcggtctgctgctcggacagcgtgccgatgtgaaagcgattcgtcgtggagcttctaaatgtattatcgaagcacgttttgatatctcggcttacggtatgcgcccgttttttgaagagaacgaactggaatacgacgacgaggaatgtatcctgcggcgcgaagtgcaggcgtccggcaaaagccgcgcattcattaatgatacgcctgcttcgctggcacaggtgaaggaattgggcgaacaactgattgatgtacattcacagcatcagaatcttttgctcaataaagaaggtttccagctgaatgtactcgatattctggctcataacgatgatgcgctggagaagtatcatttactgtataatgaatggaagctgctcgaccgtgaactgtccgagctgacggcacttgccgagcaaagccggacggatgaggactatcttcgtttccagctggaacaactggaggaagctcatctggtggaaggggagcagagtgaactggagcaggaggcggaaactctgagtcatgctgaggagatcaaagcagggctttaccgcatcgaacagtcttttttctcggacgaaggcggactgctttctttcctgaaagataatctgaatacgctgaataatctgaaaaaggtgtatcagcctgccggagaactgagcgaccgcatggaaagtgcctacatcgaactgaaagatatttcgcaggaagtctcagcgcagggagaatccatcgagtttaatcctacccgtctggacgaagtgaacgatcgtctgaatctgatttactccctgcaacagaagcatcgggtacagacacttgaagaattgatggccttggcagaccaatatcgcagtaagttgtccgagatcacctcttatgatgatcgcatagccgaactgactgcccgcaaggaagcccagtatgaacgggtgaagaagcaagctgccgtgctgacaaaagcccgtgcggcagccgcccgtgaagtggagaaacaactggctgaacggctggtcccgctgggtatgcccaacgtccgcttccaagtggaaatggggttgaagaaagaaccgggcatacagggggaggatactgtcaacttcctgttctccgccaacaagaacggaacgttgcaaagcatatcttccgttgcttccggaggtgaaatcgcgcgtgtgatgctttctatcaaagcgatgatcgccggtgcggtgaaactgcctacgattgtatttgatgagatcgataccggagtttccggtgaaatagccgaccgtatggcggatatgatgcaggaaatgggtgactgcaaccgtcaggtgatcagtatcacacatctgcctcagatcgcagctcgcgggcgtgctcattataaagtatataagaaggacagcgatacggaaacgaacagccatatccgccgtctcaccgatgaagaacgggtagaggagatcgctcacatgctgagcggagccacattgaccgaggctgccctcagcaatgcgaaggccctgttggcccgtacttcataatccataattcaaaatttataattcaaaattacaatgaccgataaaagtgaaatgattttcggcgtccgtgccgtcatagaggccattcaggctggaaaagagattgataagatcctcgttaagaaagacattcaaagtgatctttccaaagagcttttcgcagcattgaaaggattgctgattcctgttcagcgtgtgccggtggaacgtatcaaccgcatcacacggaagaatcatcagggtgtggttgccttcatttcctctgtgacctatcagaagacggaagacctcgttcctttcttattcgagcaaggcaagaatccgttttttgtgatgttggatggcataacggatgtgcgtaactttggtgcgatagcccgtacctgcgaatgtgccgcggtggatgcggtgattattcctgcgcgtggcagcgtatcggtgaatgccgatgccatgaagacttccgcaggtgcgttgcatacattgcctgtctgccgtgaacagaatctgcgtgcgactttgcagtatctcaaggacagcggtttccgtatcgttgccgctaccgagaaaggagattatgactatacgaaagccgattatacgggaccgatgtgtatcatcatgggagcggaggacaccggtgtatcatatgatcatctggctctctgtgacgaatgggtgaagataccgatgctgggaactatcgaatctctgaatgtttccgtagctgccggtattttgatttatgaagctgtgaaacaaagaaacaacgactgatatgaagaaacttttaatcttacctttagcgcttttcctcttggtacagagcggtctggcgcaaaccccgaaatgggtggagaaggcgaaacgtgctgttttctcagtaataacttatgataagaatgacaagatgctgaataccggaaacggatttttcgtatccgaagacggactggctctctctgactacagtctcttcaaaggggctgagcgtgcggtgattgtcacagccgaaggcaagcaaatgccggtcagcctgattttgggagcagatgatatgtacgatgtgatcaagtttcgtgtggccatcaccgagaagaaagtgccgtcactggtagtggcgactactgctccggctgcaggcgctgacgcatggatgcttccttattctacgcagaagagcattgcctgcgtttcgggtaaagtgaaggatgtatcgaagattgccggagaataccattactataccttgagtatgcagatgaaagacaagatggtgagttgcccggtgatgaatgcggaaggccaggtgttcggtatttcacagaagtcctccggtgcggatacggtaacgacttgttatgcggcaggggcagcttttgcaatgtcgcagaagattagtgctctgtctttgggagacgttgctctgaagaatatcggtatccggaaaggattgcccgaagcggaggatcaggcattggtgtatctgtttatggcttccacgcagatgtcggctgatgaatatgagaaattgctggacgatttcattcgccagttccccagcagtaccgatggatatatccgtcgtgccaactattacgtagcaaaaggtaaggatgaccagtcttattttgacaaggctgtagccgactttaatcaagccttgaaggtggcggctaaaaaggatgatgtgtattataatatcgccaagctgatatacggttatcagctctcgaaaccagaaacgacttataaagactggacgtatgatacggctttgaagaatctccgtcaggcgatggctatcgatcctttgcccgtttatacgcagttggaaggagatatactttttgcacagcaggactatgcaggtgctttggccgcttatgagaaggtgaatgccagcaatctggcttcagcagcctcattctttagtgccgccaagacgaaagaattgctgaaggcagatgccaaagaagtgttggcattgatggacagctgcattgctcgttgtccgcagcctgtcacggcaaattttgctccttatctgctggaacgtgcacagatatatatgaacaacgatcaggcaagaaatgcaatgctcgattatgatgcttattataaggctgtgaacggacaggtcaatgatcttttctattattatcgtgagcaggctgcgctgaaagcccgtcaatatcagcgtgcattggatgatatcgtgaaagcggttgaattgagccccaaagatttgacttatcgggcagaacatgcagtggttaatctgcgtgtaggacgttacgaagaatccatgaagatactgaatgaaattctgaaagacgagccgaaatatggggaagcataccggttgttgggcctttgtcagatacagttgaagaagacggacgaagcttgcggaaacttcaataaagcgaaggaactgggtgatccgaatgtggatgaacttataaaaaaatattgtaaataagcggaggtgcttggaaagaataacgtcttactttcttttcggactccttagtagtaaaaataaacccctgccggcttctacagtcggcaggggttctcgtttttggggacgtttgtaaaatactctctctctctaatttctccccacttgtcaagttcaggtttcaggtcttaatatgatatataggtttgattctttttttctcccgtttataagttaaatgcagcagtttatagaatactgcatcctttctttattttttttctcagaatagttattttttttctttttatggtaaaatcttctgattgaggtggagcttttaattcttttttaagggatgggcaatgaaaatatcgaatatttcattgttcgtaaatggtataataaataggtgttgaaaatgaaacaaacagatatttccctctaattatggtcgtttaacgaaaatattattgttttttatttgcgtatattggtaaatatggtcatctttgcaccgttattcgtttctgtttgttaaagaataacgaataagtgtggggtaaatagatgatttttagtaaaaaagacattcaagaagttctgccggcagatgtgactggcaggagcgtagcgcaccctaaacgttggttagtggctttagtacgtatttctcatgagaagaaaacgagtgagcgactatctaaaatgggtattgaaaacttccttcctgttcagcaagaagtacatcaatggagtgatcgtcgaaaggtagtcgagcgtgttcttcttccgatgatgatatttgtgcatgtcgatatgtatgaacagaaagaagttttgacattgggctctatcagccgatatatggtattgcgtggagaaagtactcctgctgtcattccggatgaacagatgcaccgctttaaatttatgctagactattcggacgaggcgattaatatgagtacgactcccttgtcaccaggaaccaagattaaggttatcaaagggccattatccggacttcagggagaattggttacagtaaatggaaaatcgaaagtagcagtccggttaactatgttgggatgtgcttttgtagatataccagtagggtgtgtagagcctctggagaaataagggtttaaatataagtgaaacaagcattaagtgaataaaaggggtatggtgagttttttactacaagaaaatattgatgaactgcaacatctggcagatcatttacttcacatcggtgataaaaatgggtatgtatacgccgatgacctttctgcattacaacaatcaatccacgaaaagataaacgatttatattcacaacgggggaagacaccggagcaggatgctaccctgtgtttggccatccttcag

SEQ ID NO: 4561 - DNA, 19092 bp, Unknown
  gut microbiota DNA sequence
ctatattatatattaagcctggaatttattttatatttctaagaacttccacccataattctcctctttttctttcttttttctcgcaggaaagaatatatttgtatcctagtttaaacgaaaaccagtgtatgatatgataacaacccagttgcttcgtcccgagagtatagttgtagtaggggcttcgaataatgtacataagccgggtggcgctatattgaagaatctgataaacggaggttatcagggagaactccgggctgtgaacccgaaggagacagaagtgcagggagttcctgcctttgcagatgtaaaagaattgcctgataccgatttggctgtgttggctgttccggctgtgatgtgtccagatatagtagagacactggcaagcgagaagcagacgcgggcatttatcatactctctgccggatttggtgaagagacacgcgaaggagcgttgttggaagaacgtatactggaaactgtcaacaaatatggtgcttcactgattggtccgaactgcatcggactgatgaatacatggcatcatagcgtcttcagccagcctattccgaacttgaactcaaaaggagtcgatctgatctccagctccggtgctacggcggtctttattcttgaaagtgcggtgacaaaaggattgcagttcaattctgtctggtcggtaggaaatgccaagcagattggtgtggaagatgtgctgcaatttatggacgagaattttgatccagagaaagattcccgtatcaagttactctatattgaaagtattcacaacccggacagattgctcttccatgcctcttcattaataaggaaaggttgtaagattgcagcgataaaagcaggaagttcggaaagcggaagtcgggcggcttcttcacatacaggagcgattgccagttccgattcggctgtagaggcgctgttccgtaaagccggaatcgtgcgttgcttttcccgcgaagagctgactaccgttggttgtatcttcaccctccccgaactgaaagggaagaactttgccatcattactcatgccggaggtccgggagtaatgctgacggatgccttgagcaaaggcggactgaatgtccctaagctggaaggtgaactggcggaagaactgaaagcccaactctttcccggagcttccgtaggaaatccgattgacatccttgccaccggtacaccggatcatttgcgtatctgcattgactattgcgaagaaaaattagacaatatagatgctatcctggctatcttcggcacacccggactggtgaccatgtttgaaatgtacgatgtccttcatgaaaagatgcagacctgtcacaagcctatattccctgttcttccctccatcaatacagcaggagcggaagtggcggcattccttgccaaaggacacgtgaacttttccgacgaagtgactttgggaactgcactgtcccgcattgtcaacgccccgaagccggcggtgcctgagattgaactgttcggagtcgatgtaccgagaatccgtcgtatcattgattccatcccggagaatggatacatcgaacctcattatgtgcaggcattgctgcacgcagccggtatttcattggtcgatgaatttgtttccaataaaaaggaggaagtcgtggattttgcccgtcgatgtggattcccggtagtagccaaagtagtaggtcctgtacataaatcggatgtcggcggcgtagtactgaacattaaaggggaacagcatctggcacttgaatttgaccgtatgatgcagattcccgatgcaaaagcgatcatggttcaacctatgctcaaaggcacggaactttttattggtgcaaaatatgaagaaaagttcgggcacgtggtactttgcggtttggggggcatttttgtggaagttttgaaagatgtatcttccggcttggcgcccctttcttatgaagaggcttattcaatgattcgctccttacgcgcctataaaattatccagggaactcgtgggcaaaagggagtaaacgaggataaatttgctgaaattattgttcgtttgtctaccttgctccggtttgcaacagaaatcaaagaaatggacataaacccgctcctggccactgagaaggcggttatagcagtggatgcgcgtatccgaatagaaaaataggactattctttcattcattgagacatattttctatctttaggcagtaattttgcctacatttgataactcaaaacaaaaaggtagaaaatacgtatagtatgaagaaagctttagtactcctggtaagttttatatgctatcaaatcgtctgtcatgcacaagtgatggatgagcattattatttcaaaaacctaagtgtacagaatggattatcccaaaatacagtaaacgctattttgcaggataaacagggctttatgtggtttggaacaaaggacggactgaaccggtatgatggtttgtcatttcgtcagttcaagcacgacggtcgcagtcagagaagcattggcaataatttcataacagcgctttatgaggatgcggaaggaaacatttgggtaggtacggatgtgggactctatatctattatccggagaatgactcgttccggcattttgaagaactgagtgcggaagaaaccaagatagaacacactgtgacagcgattgtgggagatgaccagggatgcgtctggattgcggtagagtctcagggactcttttgttatgatttggagaaagagaaacttcagaattttaccttgaaaaactttcctttcatttccactaatgtccagtcttttgtctttgataacagcggaactctctggataggctgctatggtgacggactcttttattcaaaagaccgtctgaaaacacttcaaccctacatctctcccgtcgacaataaggaaactttcgagaacgatgtcgtaactactcttgtaaaaggtgcctataattgtctgtatatcggctctttgagaggtggggcaaaggagttgaacctaacttccaacaaattacatgatttgctttccgttgatgaaaatgaagaaccggttctttgtcgtaacttgctggttgcttctgataatgaattatggataggggcggaatccggaatttatatttataaccttcgaatgggcaaatatgtccatttgcgcagttcaatcaatgatccatattctctctctgacaatgcggtctattcactatgtaaggatcgtgaaggaggcatatggattggttcttatttcgggggagtgaactactatccccgtttctatacttactttgaaaagtattatccgaaagggacagataatggtttgcatggaaaaagagtacgtgagttctgtcaggacaatcaggggatcttgtggatcggtacggaagatggaggattgaaccgctttgatccgaaaacaaaaaccttctctttctttactccaagtaatgcgttcactaatgttcatggattatgtctgattggcgatcatctttgggtaggaacttttgcgaaaggagtgaaagttattgatacacgtacgggagcgattgtgaaaacatatcagaaaaccgattcgccacgttcattgatagataatagcgttttttctatttgtcagacaacaacgggagatatttatttgggtactttgtttggtttgctgcgctataataagcagaccgatgattttgaccggataccggaactgaacggtaagtttgtatatgatatcaaagaagattccggcagtaatctatggctggcgacctatgctaatggggcctattgctataatgtcaatgaaaagaaatggaccaattacttgcacgatgaaaacaaccctagaagtctgccgtatgataaggtattgagcattttcgaagattctcaccgacaaatctggttaactacacaaggtggaggtttctgcaagtttcatcccgaaacagaaacttttactagctatgattcccgtaacggattgccgaatgatgttgtttatcagattgtggaagataaagaaggccttatgtggctgacaaccaataatggtctggtgtcttttcagcctgccacgggagcgatgaaagtatatactaccgccaacggtctgttgggcgagcagtttaactatcgttccagctttgagacggaagatggaacgatttatctgggcagtattgacggctttgtcgcttttaatccgaaaaacttctctgaaaataagtctcttccatccattgtgattacggactttttgttgttcggaaaagaagtatatcctggtgatccttcgtctccgctgaagaaaagtattaatttcttggatgagctggttcttcagcctgatcagaattctttttcatttcgtgtcgctgctttggatttccaggctccgcgaatgaatcagatcatgtataagttggatggctttgatgatgaatggctgcccgttggagagagtcctgtggtatcctattccaacttgtggtatggcaattataccttccgtgtgaaagcttctaacagtgacggagtatggaacgaaaatgaagtatctttgatcgttcgtatacttcctcctttttatcttactatctgggcttattgcgtatatgttttgctgatcataggctgctccctgtatgctgtgtggtatttcaagcagcgaagtaactataagcatcgcaggcagatggagaagttcgagcaggaaaaggaacgcgagatctatcatgcaaagatcgacttctttacgaatgtagctcacgagatacgtactccgctgactttgattaaaggtccactagagaatattattcttaagaaaaaggttgatgcggagacgcgtgaggatctgaatattatgaagcagaatacggaacgtttgctgaatctgacgaaccaattactagacttccgcaagacggaaagtcagggattccgtttgaactttgctaaatgcaacatcacggaggtgctgaaagaaacccacctgcggtttacttctcttgccaaacagaaaggactggaatttaccctgcaactgcccgagacggatttttatgctcatgtcaatcaagaggcattcaccaagattatcagtaacttgctgaacaatgccgtgaaatattcggaacattatatacacgtatctctggaggtgaccgagggggatgaaagcaatgtattccgtatccgtacagtgaatgacggagtgattatccctcgtgagatgagggaagaaatattccagccttttgtccgtttcaacgagagagaagacggaaaagtgaccaccggaacgggtatcggactggctctttcacgctcattggccgaactgcatcaaggaacgctggctatgggggaagaagaaaatagtaataccttctgcctgacattgcctatcgttcaggatatgacaattactttgactccggaaacaaaagcggaaccggaacctgtaagtgaggttccggtggaagtggaacaaggagaaaaaaaagacaatcgccctacagtactggtagtggaggataatccggatatgcgagcctttgttgtccgccagttgtcgaaagaatatgccgtactgtcggcagtcaatggggcggaagccttgaaaatgttggatggcaattatgtgaatttggtagtgagtgatgtagtcatgcctgtgatggatggctttgaactctgtaagacgattaaatcggacttgaattatagtcatatccctgttattctgctgactgcgaaaacgaacatccagtctaagatagaaggcatggagctgggcgcagatgcctatatcgagaagcctttctctgtcgaatacttacaagcttgtgcctctaacctcattcagaacagagaaaaactacgccggacttttgcgcagtcaccttttgtggcagccaacaccatggcattgaccaaggccgacgaagactttatcaagagactgaatgaagtaattttggctaatcttaataatccggagttcagcatggatgatatagcggacagtttgaatatgagtcgttctaacttctatcgtaagataaagggagtactggatttgagcccgaatgagtatcttcgtttggaacgcttgaaaaaggctgcccagttgctgaaagaaggagaagggcgagtaactgaaatctgctatatggtaggattcaactctccgtcctattttgccaaatgttttcagaagcagtttggagtgttgccgaaggactttgtggattgaataatcagttagccttgatacggaaactgaaataaaatacgagaatttaataaattaaataatgaaagatacacctattagtagacgagattttctgaaaaatatgggaatagccggggctggagcatttcttgcagcgagtccctggctttctgcattttcggaggtgacgaacacgtctagtgaaaaatgccgtctggcaattatcggtcccggttcgagaggacgatttttaatgagtttccttgtgaaaaatccgaaggtggatattgtagcgttgtgcgatatttatcagccttcgattgatgaggctttgaaacttgcccctaaggcaaaagtatacggtaactataaggaggtgttggaagataagaatatagatgccgtccttgtggcaactcctcttagtgctcactataaaatagtgatggatgcttttgatgccgggaaacatgtattctgcgaaaagtcaatcggttatacgatggaagagtgttaccatatatatcaaaagcatcgcagcaccggaaaaattttcttcaccgggcagcaacgtctctttgatccgcgctatatcaaggcgatggaaatgatccatgcgggtacgttcggcgaaatcaacggaattcatactttctggaaccggaatggcgactggagacgttctgttccttcaccaagtttggagcgtctgataaactggcgtctctataaggaattctcgaagggattaatgacggaacttgcctgccatcagcttcagataggtagctgggcattgcaaaaacttcctgagaaggtaatggggcacggagccatcacttattggaaggacggacgtgaagtatatgataatgtaagttgtatatatgtattcgatgatggcgtgaagatgacattcgattccattatttccaataagttctatggtctggaagagcagattatgggtaatctcggaacggtggaaccggaaaagggacgatactactttgaaagtgtggctcctgcaccggcattcctgcagttggtcaatgactgggagaacaaaatgtttgattcactgccttttgcaggtacaagctgggcaccggaaactgccaatgcgaatacaggagagtttattttgggcgaacgtccgaaaggtgacggtacttccttgttgctggaagcattcgtagaggctgtgataacacaaaaacaaccggaaagaattgccgaagaaggctactatgctagtatgctctgtctgttgggccaccaggctatggaggaagaaaaaacgctttactttcctgatgaatacaaaattgactatctgaaccatcaatccaaaacactcgaaacagtatgaaagatacagtcctgaccgcacgacggaagaaaatagaaataatcactttacttgtatgttttgtgcttgccaatctggtgaatctttatgcaatcatcacatatcacagatccatgatggagatgatcacctctattttctatataatcatttttgcttttgtactctatgccgcatgggcgcttctgcgcctccttttctatggagtgaaagcgctattcacaaagaagagaaacaggctgtgagaacagacctgaacgaatatacttaatcaatatcaatgaataatttatgacaacacgaagagattttctaaagacaatgtcactggcctctgccggattagcactgggatccggtgaactgctgaatgctcaaactatttcatcgaaaaaaggaagaaatgaaaaggtaaaaatagcctatattggcattggaaaccgtggagagcaaattatacaggattttgcacgtacgggtatggtagaggttgtggctctgtgtgatgtagacatgggagctaaacatacacgaaaggtgatgggcatgtatcctaaagcgaaacagttcagagacttccgccagatgtttgacaaggctggtaacgagtttgatgctgtagcaattgctactcctgatcactctcacttccctatcagtatgctggctctggcttccggcaaacacgtgtatgtggaaaaaccgctggcccgtactttctatgaggcggaactgttgatgcaggctgcccttaaacgtccgaacctggctactcaggtgggaaatcagggacactcggaagcaaattacttccaatttaaagcttggatggatgcagggatcatcaaggatgtgacagctgttactgctcacatgaataatccgcgtcgctggcataagtgggatacgaacatttataaactaccttcaggccagcaactcccgaaggatttggattggaatacctggctgggagctgttccttatcatgaatattgcaataagtatgatcagggtgaatggcgttgctggtatgacttcggtatgggagctttgggcgactggggagcacatatattggatactgttcacgagtttcttgaactaggcttgccttacgaagtgactctgacacatcaggaaggacacaatgattactttttcccatattcttctacgattcttttccgtttcccgcagcgcaaaggaatgccaccggtagatgtcacttggtatgacggtctggataatcttcctcctattcctgcaggttacggtgtttccggactggatccgaacattcccaagactaatcagggcgatgttcctcctgccaaactgaatccgggaaagattatttattcaaaggaactgactttcaagggtggtagtcacggaagtactttgtctatcattccagaagaaaaggcaaaggaaatggcagataagttgccgaaagtgcctaaaagtccgtccaatcacttcgagaatttcttgctggcatgtaatggcattgaaaagacgcgttcaccgttcgagattaacggtgtcttgagtcaggtattctcactgggagtaatggcgcaacgtctcaatacccagttattcttcgatccccgcacgaagcagattaccaataatgaatttgctaattcaatgttggccggacttccgccgcgtaaaggctgggatgagttttataagttgtaaagaccggtaggaaatataaaacagaataaagtttgattataataacaatataagtaatgaagaaaaatatcgtattgactttacttttgttctgtgccgcttctttgtcagcacagaattgggaaccgcttttcaatggtaaaaacctgaaaggatggaaaaaactgaacggcaaggctgagtataaaatcgtagacgatgccattgtaggtgtatcaaaaatgggaactcctaataccttcctggcaaccaccaagaattacggagattttatccttgagtttgactttaaggttgatgatggcttgaattcaggagtacagattcgcagtgaaagcaaaaaagaatataacaagggccgtgtacacggttatcagttcgagattgatccctccaaacgtgcctggtcgggtggtatctatgacgaagctcgcagaaactggatttattctttgaactggaatccttcggcacgtacggctttcaagaacaatgcatggaataaggcccgtatcgaagcgataggcaactctatccgtacatggatcaacggagtggcttgtgctaatatctgggacgatatgactcctgtcggatttatcgccttgcaggtacacgctatcggcaacgctgctgacgaaggcaagacagtaagctggaagaatatccgtatctgtacgacagacgtagaacgttatcagacaccggaatgtcaggctgcacccgaaagaaatctgattcctaacacactctctccacgtgagaagaaagaaggctgggcattgttgtgggacggcaagactaacgaaggctggagaggagcgaaactttctactttccctgccaaaggctggaagatggaagacggcatccttaaggtagtaaaaagtggcggtgcagaatctgccaacggtggtgacatcgtaactacccgtacctataaggactttatcctgactgtagatttcaagatcactgaaggtgcaaacagcggaatcaagtatttcgttaatcctgaaatgaataagggtgccggttctgctatcggttgcgagttccagattctggacgatgacaagcatccggatgctaaacttggcgtgaaaggcaacagacaattgggttcattgtatgacctgattccggctcctaagaataaacctttccataagaaagagttcaatactgctatgatcatcgtcaaaggcaaccatgtagagcactggctgaatggagagaaactgattgagtatgaccgtaacaatgaaatgtggaatgcactggtagcttatagcaagtataagaactggcctaactttggaaatattattgaaggtaacatccttctgcaagaccacggagatgaagtatggttcaagaacgtgaagattaaagaattgaaataagaatatattgtagaagaggagttgtgccggaaatctcattttgttgatgaatgctgcttcgagcacagctcctttcttttttgatagatgaagactgccattcaacatttgtacagaccatcccatgagggcgacggattactttacgtctggttcccgtctatgcatacacgcgtagatattcttttgtgcagtcagaaatcagaagaagaactgctgtctgttgctgaacgtattcatgaagctttaagctgcctggagaagacagccaactattatgatcctgccagcgaactggctgtcgtcaaccggaccgcttctgtatctccggtagttcttagcagtcaactttatgcaatggttgatctgtgtctggaatatcacgagaaaacatcgggatgcttcgatgtgacagttcattcggagaattataatcaggatactattcattcggtatgtttgtcggcagaagaacaaagtattttttaccggcaaccggggataacgatcaacctttcaggatttctgaaaggatatgccttggagacaatcagagacatattgcactcctgttctatagaaaatgcgttgatcaatatgggaaacagttctgtacttgctttaggcaaccatccggccggaacgggatggaaagttaactttggcaaccagtcggagacggaaaagaccggggagtctcaaagtatactcctttataatgaatgcctcactacttccggaaacgagtcggaggggcgcaggcatattatttctcctcaaaatggcaactttgttgaaggtctcaggcagatagcggttgtaacaaagaatggggctgtcggagagatactgtctaccgctctgtttgccgccggtccggaacagcgtgaaacgttgcttgccagtctccgccctttacttgtcaatcacttccttattggttattaatcgaccgcattatttcttctttctggcgataaaacacgtctggaatggtcttttgaccatattattccatttatcggtctatttcttttattacttctgttgatttttggttttctttgtagcgtcgattatcaatctaacttttatatgaaaaataagattttattagtagggctgttttgctgtagccttgtatcaacagaagcacaagtattattggataagaacgctggtaaaaacagttttcccatcgtttcaccggctgccaatgtcgttgtttgttttgatggcaaggatgaaactgtcgttcgtaagagtgtgactttatttgcagacgacgttcgtcgtgtgacgggacaggacctgaaaacacaagcaagtaatccgggtgatgtctcggctcgttatgccatcatcgtgggaactgtcggaaaaagcgcatggatcaatgcgctggtagcccaaaagaagatagacacaactcccatcaccggtggatgggaacgttatatgatagaaacggttgataatcctgcaccgggtattaagaaagccattgtcgtagctggtagtgacaggcgtggtacggcttacggacttctctccatatctaaagcgataggtgtgtctccctggtactggtgggccgatgctccgataaaacaacagaaaaaactggctgtcaacgttcataaattcatttcaaaagaacctgctgtcaagttcagaggtatctttatcaatgacgaagactggggactttatcgctggtcaaagaacaattatgagaaagaacgtggaaacttcggaccgaaaacatacgcgcagatttgtgagttactgctccgtcttcaggcaaattatctgtgtccggccatgcacgatgcgtctatggcatttcatcgtataccggagaatagattggtagcagatagtttcgccatcgtgatggggtcttctcactgcgaaccgctgttgttcaacacggcaagcgagtggaaacgtgacaagatgggcgaatgggattacatcaacaatagagcgggagtagacagtgtgctgagagcacgtgcgaatgaatgtgctccttttgagaatgtgtacactctggctctgcgcggattgcatgacagagcgatgaatgcgagcaatgatatggcggatagaaaacagatgctccaagatgcattgatggcacaaagaaagatgctgattgatgcgacgggtaagcgtggcgaagatatcccgcaagcctttactccttataaagaggtgctggatgtatacgacgagggactggaactgccggatgatgttacgattatatggccagacgacaactatggctatatgaagcgtctgagcagtccgaaagaacagaagcgttcgggacgttcgggtgtttattatcattcttcctatctgggcaagcctcacgatcatctttggatgaacaccacttcacccacgctgatgtacgaagaacttcgcaaggcttatgacatgacggcagaccggatctggctgctcaatgccggtgatatcaaatcatgtgagtttgctgtagatttcttcctgtcgatggcttatgatatcgattctttcaattttgacagagcggctacttatcgcacggaatggttgtgtggtatgctgggtgacgaataccgcaatgagtatcaggatgtgatcaactcattctacaaactggcttttgcccgcagaccggagtttatgggatggggctatcagtgggctaccgataagcatggaagagaacggaatacagatactgatttctccttggcgaattacagggaagtggattcacgcctgagtgaataccgccggatcggaagcattacagagaagattctgaataagctgccggaagagaaaaaggcctgcttctaccagtcattgtattatccggtgaaaggatgtgagttgctgaacagaatgatactggacggacagagaaaccgttggtactccattcagcaaagagcgtctaccagcgaattggagaaaaaagtgaaggcttgttatgatagtctgcaagtcattacccaaggatataattcgctgctcggtggcaaatgggatcatgtaatgacaatgaaacagggatttgccgctgcttactttgaacttccggcattaagaaagacttcactggcatctgacgctacactgggcgtaatggcagagggagaagatgtgctgaaaggtctgaagagtttccactccttgccttgtttcaatacttacctgcgtcagtcatattatgtggatgttttcaataaaggggcaagcccgttgaaatggaaggcatctgttacggacaactggattttattgagcaagaaggcaggcgaaacggctacggaggaacgtatcgaagtatcggtagactgggcaaaagtaccggttggagagaaagtattcggggtattggaaattacttccgaccggggcgagaaagagaatgtttacatctctgtattcaatccttcttctccatcccttgccgaaatggatactttatttgtggaacataacggatatgtctctatcgatgcggcaagtttccaccggaaagtggaaaataaggcgatcaagatgagaaccattcctaatctggggatagagaatacggctattcagttgggtgatccgacggctgccccacaacgtactgcaggccgtagcacaccacgtttggagtatgatttctatactttcgagcaaggttcggttgatgtctatacatatgtgttgcctacattcgtgacaagcaaggacagaggctatgctggacacgaagcaacgaatatcgaaaccaaatatggtgtatgtattgacgaagggccggttttgaatccgtctacatcttcttttgaatatgcgcaaatctggtatgagagtgtattgaagaactgtagaatcaataaaacaactttgcatatcgacaagccgggtaagcataccgtgaaaataatctgtggagatgccggaactgtattgcaaaagattgtattggactttggaggaatgaaacgttcctactttggaccacaaccgacaagaaaatagagttgtttgatgaatatgtagttaaagattgccatggttgtatatgaccatgggtgatagggttaaccatgaaaaaacactttttacttttagtcttcctgctctttgctgcgattgttgaggctgctaatccggtaaagcaaatgttggaacgtcttcaggaagggctttccgaccggtttaagattgagatctgttcttcttctgatgaaggcgactattttgaactgtatggtggcgggcgcaaagtcacagtgcgtgccaacaattatgtaagtgccgcctttggcattaactggtatctgaagtattactgtcatgcccatgtctctttctgtggagaccagttacctcaattgcctgttgatctgccacaggtgaaagaacgtcatgcgactaaactatccgataatttttacatgaattattgcacatttagttatactacagccttttggaactggaaacgttgggaacgtgaaatagatctgatggctttgagcggtatcaatatgccgatggctatggttggggtggaggctgtatggcggaatacgttgttgaaattcgggtatacgcttccggaagtgaaggagttcttgtgtggaccagcttatttcggttggttgctgatgggtaatcttgagaatatcggtggcccgttgcccgatgaatggtttaaggagcagatagtcttacagaagaaaatacttgcccgtatgcgtgaatatgggatgaagcctgtttttcagggattttttgggatggttccttcctcgttgaaagaaaaatatccggaagcccgcttggtggaacagggactgtggaactcgcttcaacgtcctcctgtgctcgatcctgccgatccgttgtttgaaagaatggcaaaggtgtggtatgctgaatatgagaagctttatgggaaagcggacttgtttggcggtgatctctttcacgaaggtggaaagaccggaggcattgacgtaacagatgccgcccgtcgggtacagacagccatgaaacgatataatccggatgcgacctgggtgattcaggcatggttgggaaatccgaaaaaggaattgctggcaggactcgacagaaagaatacgctgatcgttgatcttgctgccgagttttgggataactggcggaagcgcaagggctttgatggcttcccgtggttatggtcgcatatttccaattatggaggtaacattggtctgcacgggcgtctggacgctatagctaccggtccggtagatggtcagaaggattcggcggcatcaccgagcatgaaaggaaccagctctaccccggaaggcatcgaggtgaatccggtagtatttgatttgttgaatgaaatgcgctggcgttcggagcatttggatctggatgtctggttgaaagagtattcagtgcgtcgttatggtgtggaagatgaaaatctgaaagaggcgtggactattttccaccgtacagcttatggtacttataccggtcatcgccgtccgtcagagtcggtcttttgtgcccctcccagcttgaaaagagataaaatcacggcttctgcctggagtcaatgtcggattttctatgatccggagctctttgcccagggagtaggattattcttgcaaagtgcagaccgtctgaagcagacgtcaacttatcagtatgatgcagtcgattttgtccgtcagtatcttgcggatttaggacgggaagcatattacaatctggtggatgcttatcgggcgaaagatacgaaacagtttgattactggtcggagaggtttctgcagctgattaaggatcaaaatgagttactgtccactcacgaatgcttcttcgtgggacgctggctggatatggcccgttcgaagtcaaagcagcctgaattgcaggatttgtacgagcacaatgcccgtatgctgatcgggacatggacggagacacttagtccggtgcgcgactatgcccacaaggaatggggcgggctgctgaaagactattatctgcctcgctggactaattacatcgcttatcttaaaggtacattggagggacgttcacttactgttccggactcgtttcaagtggagaaggcgtgggtaaatgcacataataagtatgtgcttgagactggtgttgatccagtggagacagccaagagaatgtatcgtaaatatcatatttaatcattactcaaaaatagtactatgaaaggattattgaaaacagctgtattgttggttattttctgcgctacagccatggcctgtggaggtggtggagaggatgcattggatcataagggaggtgatggtggcggaactggtaataagggcgatcaagaagaaccggaacaaccatttgttgctcatattactcctgtcgacaaactcaatcaaggtgtcccggtgattaattcgcacgctgatgtaacttcgcgttcgtccttgaagatgaactttcggacgtattcacaattaggagagagtgtactaaaatctgccaaacctaattatgtacgggttaagaaattggctaatgatggttatatcatgttctatcacaacaatcagattggtgccagttgttcttatgcgaccagtatggactttaaaacatggagttataaaggcaagctgtttaccaattacagtattatcgacagtaaaggtgaaaagaatgaccggcgttattcaaattgtgatgggctggtactttccagcggagatattctggccgtagcctcctatagggctaataatgggtatagagacttgcctaaagatgcaggtattgaaatgaggcgtagtaccgataatggcgttacgtggagtgaaccggtctcagtgtatcagggtgtcaactgggagccgtatttgctggaattgtcttcgggagaaatccattgctatttcacggacagtagccgtacgggtattgaaggcaaagacaccggaactgcaatggtcatatccagagatggcggtcaaacgtggacaccttcatttggtagtatcccttactatgtgatacggatgaagtgggagcaagacggaaaaacatacttcaatcaccagatgccgtctgttattcaacttaaaggtagcgatgaactggcggccgctgtagaaactaataaccgtggaacatattatatatcactggcttattccggcgaagatggtgaatgggatcatcttgatgcggatcaggaaggaccggctgatagcgacaatctgtcttttttaggcagcgctccatatttatctcagtttccatcgggtgagactgtgctttcgtataaccaatcttctactttctatatgaaaatgggggatgccaaagcgcgtaattttggaagtgcttattcaccattttcaggtaaggggtattggggaacgttgaatttggtaaatccgcatcaattggtgggagcgatgcctgatacttctaatggaacaatcatgttatcacaatttattcttaatcatcgtatcaatgcagtacgccgtaacgtaaaggtggatggcaacaataaggaatgggtgaatacggatcatgcgctttttgtcggagaaaaatcgcaagtgcagggaactctccgctgttcgtgtgatgacaagaatgtatatttcctggtggaagtacttgaccggagcttgctgagaggtgattatgctactgtttatctctctccggatgatagtaaaagtttgacgaacggtgctaaacggatacaagtatcaatggatggattgaaaagtaccgaaacttatgccggcaagtggaacaatgcggagatgggggtagaagtgaaaacttatgtgtgcaatgacaccaatgaagatcgtattgacaactatggttatattgccgaaatctctgtcccccgttccagcctgactatttcttcgggacaggtattggtcaatttctctattaccgacaataaagaagaggaagcagtcagtgatgtgtcttctataagccgctggataccggtggcgggattgtaatctgataataacgtgaataattaattatatagaaacaattgtaatgatgaaaaagaactattatttaatttgtgtattgttactggctgctttctgtacaaccagtattgctactgctcaaaattattttggagattttcctgtaaaagcagatcctaagactgttggtaataaattgagcagacgcttgatggaaactaaacatcagctatattttgatagaggaat

SEQ ID NO: 4562 - DNA, 44490 bp, Unknown
  gut microbiota DNA sequence
atgtattctctatttgggcaactaggtttaagcctatttctagtaaagtcccaatacttaacaggaatagaaattcccaaactctgatacttcttcttactatctttacagatacgtaacattaatggtacttctccatttgcaagcgtcttccacttacaacatacgacgttaatagttgcattcatgacaaattttggttgaactcttggttgaactttagtcagttcaaccaccgtttaacgtcttattctataaacaaaaatcaggtagtcattttaagataaccacctgattttcaaaagagcggtaaacgaggctcgaactcgcgacccccagcttgggaagctaatgctctaccaactgagctactaccgcaacttgtatctttcataaaagccttatgaaatgttgatgcaaaggtaaacataatttttatatctcaaataaatttcttcaaattttagcagaggaaaatctataatataatttctattccagatgaaaaaaagaatcggatatgaaaaatcgtatattcgattgctgtacaatttaaaatatacagatagaaataaaatgattcgataaaattctctggatttctaatcagatattttcaaaacttaatattattggatttaattcttatcaatatgcgtgattttatctgcctatactaacaataagttaatagaatggctgctaactgattcaatctgaaagattaaaatgattgagatattagtcgtatccaaaacaaatgacctgttttacttgtgttttattcgttccttttaaaggagcagaacgttcctcaccgaccaacgtcccgttggtttaaaaccaagtaatcgttcctttaaaaaggaaatagctcaaataacgttctttttctgtataatccgataatatatatgcaaaaacatattgaaattctttatattattacgcgtttttatgcataatttctgctgtttgatgaaatatgtatggggctattctttgtgtaatcttaaatatagaacatttttttaagattctttctctgtttgccaaagtgaacaaacccgtcctctcatctgttagaaagtctcaattttagatttaacctaaccagcatgaaaaaaaataagatactttttgtactatgggctttgtgttttttcgtcattcagacaaatgcacagacaccgttaagtttcgaagaatcgttgcacctgcttaatcagggaaatcagagcttgaagatagctgataaggggatagagattgccaaggcagaacgtgataagctcaatgctttttggtatcctaccttgcagtctacaggtgcatttgtgcatatgtccgagaagatagaagtgaagcagccattgtctcagtttactgatccggcaaaagactttgtacattcaattattccggatgaccagataatctcagctgttctggataaaataggagccaatactcttgtctttccactaactccgagaaacttgacgactgttgatctgtcggcagaatgggtgctcttttccggaggaaaaagatttcgtgcaacaaatattggtcggacaatggtggatctggcgcgagagaatcgtgcacagactgctgcaagccagcaaaacctgttggcagaaagttattatggtctgcggttggcacaacaggtcatagcggtacgtgaagaaacatataaaggtctgcagaagcattatgaaaatgctttgaaactggaagctgccggaatgatagacaaagcaggacgactgtttgcccaagtgaatatggatgaagcaaaacgggcattggaagctgcacgaaaggaagaaacagtggtgcagagtgccttgaaagttttgttgaataaaaaagatacggatgagaatatcgttcctacttctccccttttcatgaatgattcgttaccacccaaaatgctttttgatatgtcggtcaacagtggaaactatatgcttaatcaactgcagctgcaagaacatatcgccaaacaggaagtacggattgcccaaagtggatacttgccgaatatagccctttttggaaaacagaccctctattcgcatggcattcaaagcaatttactgccgcgtaccatggtgggaatcggctttacatggaatctctttgacggactggatcgggagaagaagatccggcaatcaaaactaacccagcaaacactggcattagggaagatgaaagcacgcgatgaccttgctgtcggagtggataaactctatacacaactggagaaagctcaggataatgtaaaagcactgaatgcgaccatcgaactgagtgaagaactggtacgtatccgaaagaaatcctttactgaagggatggcaacctctaccgaagtgattgatgctgaaaccatgcttgccaatgtaaaagtggctcgtctggcagcatattatgaatatgatgtggcattgatgaatcttctttcactctgtggcacaccggaacaatttgtaaactatcaacctaaaccctaacaaacaatgaaaccaactagtagaaccctttcttgggcattcgtcattattatgctggcagtcggtatttttactgctctgggaataatattgatgcacaaacaaccgctcgtcctgcaagggcaggcagaagcgacagaaatccgtattagcgggaaacttcccggacgtatcgatacctttttggttcaggaaggtgactgggtacgccaaggagatactctcgttgtaatcaacagccccgaaatacatgccaagtatcagcaggtgaatgcattggagcaagtagccgtacagcagaataagaaaatagatgccggtacccgtcgacagattgttgctaccgcgttgcaactatggaacaaaacaaaaagtgatcttacactggctaaaacaacttataaccgtattcttaccttatataaagacagtgttgtcacttctcagcggaaagatgaagtggaagctatgtataaagctgctgttgcagccgaacgggcagcctatgaacaatatcagatggcggtagacggtgcacagaaagaagataaagaatctgccgccagtatggtgaatgctgccagaagtacggtggaagaagtttcggcactattggtcgacgcccggctgacagcacctgaaaacggtcagatagctaccatctttcctaaacgtggggaattggttgcgccgggaactcctattatgaacctggttgtcatggacgatattcatgtagtactcaatgtacgtgaggatttgatgccacaatttaagatggagggcacctttgttgcggatgtgcctgctattaataaaaaaggtattgagtttaaaatctattatatcagtccgttaggaagttttgctacttggaaatcaacgaagcagaccggaagttatgacttacgaaccttcgagattcatgcccgtcccactcagaaagttgatgacctgcgccccggtatgtccgtattactgacattaaatgaatgatagaatgagttcatcacaaacatattctccttttcgttccgtgctgctcagggagtggcgacggatgacttcacgatgcctttattttggtgtgtgtatcatcctgccgctatttacccttttcttcatggcaactatcttcggcaacgggcagatggaaaacattcccatcggtattgtcgatcaggacaatactgcctcttcacgagcaatcgcccgaaatatatctgctgtgccaacatttaaagtgacaaggcattttgtgaatgaggaagctgcccgaaaggccgtacagaagaaggaaatttatggctatctctccattcctccaaaatttgagcaagatgctatttcgggaaagaatgcgactctctcctattattatcattatgcgttgctttcggtaggcggcgaattgatggctgctttcgaaacgtcgctggctcctgtgtcgctctctcccattgtgatgcaagctgtcgctctcggagtggaacaagacaagatcactacattcctgttgcccgtacaagccagcaatcaccctatatacaatccaagtctggattattcggtttatctgagccaaccgtttttcttcgtcttgtttcaggtattgattttactcattactgtatatgcagtcggaattgagattaaatttcgcactgccgatgaatggctgtttgttgccaaaggaaatatggtaacggctgttttgggaaaactactcccctacactattatctttattctgataggatggctggcaaattatgtgatgtttggcattctgcatattccttttcaaggaagctggttattgatgaatatgctgacagcgctttttgtcgtggcaacgcaggccttgggattattcctgttttcgctatttccggctatctctctcatcataagtattgtttccatggtcggctctttgggagctactttatccggtgtcacttttccggtgaccaatatgtatcctttggtacgagatgcctcctatctttttcctgtccggcattttacagaaatgatgcaaaatatgctctacggagggagtggttttatctacctttggccatcggttgtgatactatgtatctttccgttgctggcttttgtgttgcttcctcatctgaaacgtgccatagaaagtcataaatatgaaaaaattaaataagttacaacagttatcgttcatcatccgacgtgaatattgggctatcagtaccagctatgctgtattactggtactgatgggtggaatcttcgtgtacggattactctataattatatgtatgcccccaatattgtaacggatgtcccggttgccgtagtcgataactcacatagcgagttgagccgtaatttcatccgctggctggatgctacgcctcaagcggaaatttatgatcaggctatggattatcacgaagctaaggaatggatgaaagctggaaaagtacaaggtattttatatctccctcatgattttgaggaacgggtatttcgtggagatgaagctgtgttttctctgtatgccactaccgatgcttttctctattttgaagccttacaaggagcttcttcacgtgtgatgctggctatcaatgacaaatatcgtccggacggagcagtctttctgcctcctcagggattattggcggtagctatggcaaagcctgtaaatgtagcgggaactgcactctataactatacggaaggatatgggtcttatctgattccggccgttatggtcattattatttttcagacattactgatggtcataggtatgctgaccggagaagaacatatgacaaaaggtatccttgcctatactcctttcggaaaaagctgggcagtcgctatacgtattgtagcagggaaaacgtttgtctactgtagtttgtatgctgttttttcattctttctattagggttgcttcctcatttctttagtattcccaatattggaaacggattgtatattgtattgatgatgatcccctacttgctggcgacttcttttctggggctggcagcctcccgatatttcactgattcggaagcaccattgcttatgattgcatttttctcggtaggactgatttttctttccggtgtttcctatccgatggagctaatgccttggtattggaaagctgctcattatatttttccggcagcacctgctacacttgcctttgtgaagttgaactcaatgggggcaagtatggctgatatccaacttgaatacattactttatggattcaggtgattgtttattttgcattaagtatatgggtttataaacgaaaactcagttgacagatatacttttagttgcagattttaaacaataattactcaaaactataatatttcagccaacgaataattaactatggaaataaaatgttttttgttgaacattttacttgattatctcgtccttttttatttattttgttaactattatttggagataggctatagtactactttaaatgtaaacatctatatgaggaatattatactatttttatttttgttgccgttgatggcatatggacaaacatacaaatatattggagtagaggatggtttaagtaaccggagaatatacaatattcagaaagatcgtcagggatatatgtggtttctcaccaacgaaggtatggaccgatacaacggtcaggatataaaacactataaattaattgaagcaaacagggagctaaattcggacatagatctcggatggctgtatgcagataaaaaagggggaatatgggtgattggaagaaaaggacgtatctttcagtatgaagagaaatatgaccgttttaagatgatttacaaattgccggaagccactgatgttatcagctacggttatttggatcgtaacagtaatatttggttgtgcagcaatgattctatcttgttgtataatacggaaacagcacagactttacagtttcctaatgtattggatgagaatatcacagtagtagaacaggcggatgatactcatttctttgtggcaacagaaatgggggtccggtatactcagttaaataaaggagctttgcatattattccttttgaaacgcttgataatgtctatacgcaaataaacgggctttattatcaccgacaacttcaaaggctctttattggtactttcagtgatggtacttttgcttatgatatgtcaactcaacaaattatcaagccagatactgctttgggtgatgtaagtatcactcatatcagaccgctgaatgaaaaggaacttttagttgccacagagggaatgggagtacacaaaatagatgtaaatacctgtaaaacttctccatacattgtagcaaactatgaaagttataatgaaatgaatggaaataacattacggatatttatattgataaagaaaaacgaatctggcttgccaattatccggcagggattacggtagtcgatccccgttataagaattatcattggataaaacattctatcggtaataaacagtctattgtcaatgatcaggttcatgcggtcattgaagatagtgaaggtgacttatggtttggaacaagcaatgggatcagtttccatgattccaaaacaggtcaatggcattctttcttaagttcttttgataagcaactgaaagacaaaaatcatattttcatcaccttgtgtgaagtttcgccgggcattatctgggcaggaggatatacgtcgggcatttataagattaataagaagacattggctgtagagtatttctcgcctttcctgcttagttctgtcaacatacgaccagataaatatatacgggatatgattaaagattcaaaagggtatatatggtcgggaggatattacaatctaaagtgtattgatccgagaaagaatactgtccgtctgtatcctggagtaaatactgttacagctattgaggaaaaggatatcaattctatgtgggtgggaactgccacaggactatttctgcttgatcgaaactctggtgagtatcagtatattttaatgcctgtggagtcgacttatatcaatacgctttatcaggcaaatgatggatcactgtacatcggtacaaatggttcgggagtacttatatataatcctaaaaataggagtttcgaacactattatgccgataattcggcacttgtttccaataatatctatactattcttccggaaatggatggacagataatgatgagtacggaaagcggaatcaccagcttttctacggagaaaagatcattccacaactggagccgagagcaaggaatgatgtcggcctgtttcaacgctacttccggcgttttacgcaaaaataaaagttttgttttcggaagcgttgatggtgctgttgaatttcccgcaggcatcaagttaccggattatgaatactcaaaaatgatattcagcgattttcatatttcttatcagcctatttatccgggggataaggactctcctctggagaaagatattgataaaacagatgtattgaagctgaaatacggtcagaataccttttcattccgggtttcttctatcaattatgattttccttcccattctgtatattattggagactggaaggttcttcatataatgaatgggtgcaattgaacagtaatagtctgattcgtttcaccaatttaagccctggcaactataaactttatgtgcgtgctatatctaaagaagagcctagtattgttttcgaagaacggcaggtcgaaataataatagcgcagcctgtatggtttagcggatgggctatattcatttatatacttgtgattgcgtttctattcggtattgctttccggattatgattctgaaaaagcagaaaaagatatcagatgaaaagacacatttctttataaacactgctcatgatatccgtactcctcttactttgataaaggctcctttagaagaatttgttgaagaggaaacattgacagagatcggttcgcagcgtataaacacggcattgagaaatgtaaatgcccttttacggctgagtactaacttaattaatttcgagcgggctgatgtttattcttctgaattgcatatttccgaatatgaactgaatacgtatatgaatgaaatctataatagtttttgttcgtatgctaacatcaagcatattgactttacatacaaaagtgactttaattatctgaatgtatggttcgataaagataagatggattctatcttaaagaatctggtatccaacgcgttgaaatatacacctgaaaatggaatggtcagcatatttgtttctgagactaaagaatcctggaggctggaagtcaaagatacgggaataggcattccggcaaacgaacagaacaaattacttaagatgcactttcggggtacgaatgctattaacgcaaagataaccggtagtggaatcggactaaaactagttggaaaattagtgagtcttcatagtggtaagataaatatagagagcattgaacaacaaggtaccactatcactattgttttcccgaagggtaataagcatttccgtcattcgaatctgatagatccggagaaacccggcagacaggaagcagtattggatgctccaattatatccgaagcggctgtaaagacaaacgatgagaatctgcaacgtattcttattgttgaggataatgatgaactacgcgcttatctggtcaattcattatcaccaatgtataatgtgcaggcttgcggtaatggtaaggaagcattgatcattgcaaaagaattttggccagagcttattctttccgacattatgatgccggaaatgcggggtgatgaactgtgtattgccattaaaaatgatatagaaacatctcatattccggtattgttactcactgctttaggagaagagcagaatatattggatgggcttcatattggcgctgatgaatatattgtaaaaccattcagcgtaagaattctgaaagcaagtgttgctaatttattggcaaaccgtgcactgttgcgtagcagatatgccaatctggaaatagaagataccaaagtcatgacaccattggcgaatggaatgaatagccttgattggaaatttatatcggatgtgaagaagagtattgaggataatattgataatgccgctttttccgttgaagtgctcaatgatttgcatggtatgagtcgcaccagtttttattgtaaactgaaagcactgacagatctctctccccaagagcttataaaatcagtccgtttgaaacgtgctgtacagttgctaaaagaaggcaagcataatattactgaagtttcagaactatgtggattttcagagtccaaatatttccgacaagtattcaagaaagaatataaaatgagtccaagccagtatgctaaggaatatggtacttcttccgctattattgaagatgatacctctcaggacgattcggataaataaaataagtatagataagaggtagcttttcccttgtagaagaagctacctcttatctattcaataaataggaatattatttgcgtatcaagtatttaataaacaaataacctcctaatacttgcaggcacattcctggaatcccaatacggaaatcctgaacagctttgtagaaatttcctatatacatccactctcccaatgtgccgatgatctgataaaacaagactactcctgctaatacagggatagaaatgcgtccgaagcgttgcgcagcccatccggcggcgatagctaataatacggatttcaatagaatggcaggcaatactgcgggcactggcataccaaagagcaaagaatttatgactggagacaggatagcagttagcaaaccgaccttccagccatatttgtaagcaccgatcagagtgaagaaataaataggcagccaggttaatccacctagtggaatgagatgaaagagtctgggaaaaaggatattgccaacgatgaataacgaggttgctaaataggtcttcacattactgtaattcagtgaatagagttttactgttgtttccatatctttattcttttagaaattcaaattaataccacccataaatgttgccttgggcatgggataccctatatttatttcgtaacgttgtgccaacaggttttcacctttcacaaagatgttggcaaaattacaaatacgataacttcctcgcagattccataaaacaaaactatcctgttgcttggtgcctttattattaacgattacagaagtgtaaagtcctttaatatattgaattcctgttgatacagtccagcgacctgcggtatagtctgctccgacatacaatttgtgttcaggagcggcgagaaccgggttttccatgtgcaaccaactatagttggcattcacattccaatgagaattaaaccgataaccgatattcgcttcaattccccagttttctatttctccggaattgacgttcagcggaggtatcaagccattgctcataataatattgtcaccgttaatataatacaggttcagtccgtaatataaggctccttccaataatcgttgagaataggaaagttcataactgaccagtttctccgggttcagttccggattggcaggagcaaacatatacatctcccgaatggtagggttgcgatatcctttgctcatcatcgctttgagttctgcgcttttgggaagatgaaaagccagtcctccctgtggaatccattcagtacctacatgagagtgatgatctacacgaacacccgcatccaatgacaaccagctatttatatcttggcggaaatcgacatatcctgcaaattcatccatttgcttgtctactcccagtttccgctctccggtagccaagactttgttccatgatttgcctccgaagtgctgatagtcaaatcctatcgtcaaacgattgcctgtgaagaacgtagcgctctgataccaggaaatgccgaacatcttgtctttagaattaaagtgtgatgtttgcggctgttctcctgttttatatccgtcattgattttatgccgtccccaattatagaaaaagctcaaagctcctgatgtcttctcataatggttttccaaggcaagcgaggtcataccacgtgtaatacgcgaatcattgtcgataagtggaacttgtatcgttcccggattggaagcattgaaatgggttacatttacatctccccagaatttccaggaagagctgaaatcatatcctaattttgcgtatcctccatattgttcaaactccatatcggggcggtgtccgtccgtacgattgtaagaaccggtaacgatactgctgaaacgtcctttctttacacggttggaaaattccgtctgcaaagtgttgtatgagccataccctacctgcatattcgttcttactccctcatcttgctgtttgcgggtgactatattgattactccgcccattgcattcgagccatagagtacagaggcagggccgcgcaagacttccactttctctgtcaacatagactgatatgcatccgcaatcggatgtcccatcaatcccatatattgcggatgtccatcgatcaaaaccaataaacctgctgtcgggctgcctccgataccacgcagactcatgccacctgccgcacctgtggacacaccatatcccatgataccacggctggtagtaaagaatccgggaacctgttccgtcaatagcggcaaaagtgaaggttcatatcttttctctatttgttgccttcctactactgaaatagtcatgggaaggtgacgaatatccgtctcgttccgtgttccggtaactacgacttcgtcaatagtatagtttcttttgacttgtgtgctgtcttttccgggttgtgccattcctgaaatggaaagcaggctgccgaacaaaaacaaacaaactgtatttgttttcatattctgtttcgcgcttttatttctcctgcaactttttaccacttcttattttttcgaggaaatcacgaatcagcggcaatatggcttctgctgattcttcttcgctacacatcgtttctaccggacaccagcctgtgtgatcacgattccatataaaaggtacttcttgtacgaaatggacttttatatccgagcttcgtaataaatccaacgctttcgaactgatgatgtctgtatgaagttcccggatacctcccaaaatcatgagggcggcagcccccttccctactactttgtcggctatcgaagctcctttcaggaaatccggttcctgtgtcagcaaatcatataaatccgctacgccacgttgagtaaaggtgcgtatgttgtctccattggcaatcacacaggaatatcctcccgagtgtaataagttgattaattcttccattataaggttccttgtttcagttgttctacaaattggtctatccggtgcagttctttgggtatatctatgttttgaggacagtgaggtacgcattgattacatccgatgcaatgactagcctgacggagcttaggtacactgcggtcatatcctacaagaaatgcccggcgggctttgacataattctcatcctgtccgtttttaggaacattgccttcattgacacaacggttataatgtaataagacagccggaatatccagaccatacggacatggcatacaatatttgcagtcattgcaagggatggtaggatacttcagcattaactgtgccgtgtcttccagaaaatccatttcttcgtcagtcagcggttccaatggagaataagtacgcaggttatcctgcaaatgttccatatatgtcataccgcttaatacagtcaatatatcggggaacgttccggcaaagcggaaagcccatgaagctacgctactttccggacagcgttgtttgaggcgtgccaccagattgtcattcagtttagacaagcgacctcccaaaagcggttccatgataatggatggaatcccccttttatgtagctcaccatacagatattcggcatcggtattccgggcatttgtctctttcgcatgcttccagtccacatagttaagctgtatttgtacgaaatcccactttatctcatcgtgtcgggaaagcagataatcatatacttcgatgtcgccatgataggagaatccgagattgcggatgcgacctgcttcacgttcttttatcaaaaagtcaagcattccattatccagatatcgtcctttaagggcgtccattccacccataccgatgccatgaagcagcatataatcgatatagtccacctgaaggtctgcaaaagatttatgatacattttgagggaagcttcgcgtgaccatgtatccggagagaagttggatagtttggtagcaatgaagtatttatcacgtggataacggcttagcgcaattcctgtggatttctcagaaaaaccttgtacgtaggccggagatgtatcgaaatagtttactccatgagcgatggcgtaatcgattaatccgttcactgcatcctgatcgatcacttcacccttaccgtcgggagccggtttgagaggccagcgcatacagccgtatcctaaaagtgacacgcggtcgcctgttgttggagacgtgcggtaagtcattttatcggtaggaatttccccttctgccgatgcactgcttgatgaagaagtgccttttgacgagcatccgtatagtattgctgtcgatgtagccgcactgatacctacgattttgataaaatctcttctgtttatgtctttcttatttttttcttccataatcttgttctgatttaaatcatacaattctgtgcatctgatgtccggtcacgtaaatggcactgaaaggacgggatggacaaagattctcgcaagcaccgcaaccaatacaccgttcgacattgattgccggaatcttcggtgagtccgctatttcgggatcggaagctaccatctgaatagcggctgccggacaatggcgggcacagttgccgcattccattccatcagtcagcggtacgcagttctccttgatccatacagcatgcccgatttggatagcggatttctctgccaggctggtcagatgaatggcatctgtagggcatacttccgcacatttggcacactccggacggcaataaccacgctcgtaggacatttccggctgcatgagagttgcgagattaccggatggacgtaatacctgagtaggacaaacagagacacatagctgacaggcagtacaatgttgggcaaagttgcgtgcatttaatgatccgggaggataaatcggattctcccggttgggaatcttcttgtcttcaatggctgccaatcctccgtctacctttttctcctgtgctttcagtatggtagaagtagcgaaaatagtcgatgccgaaagaaaactacgacgggcattgtcaatctgttccgaggtcacggattttattttaaccgtttccgtattacccccttctttcttttgaatacgtctggtatatttaatagctccttgcttacattttcccaggcaatccatacaagcgacacaacggctataatcaatttcatgggctttggcattaatacaggatgctttacaattacgtgcgcacaatccgcagctattacatttggaagtatcgatcacaggcttgaagatggagtatcgtgatatgaatcccaatacggtgccaacaggacaaatggtattgcaataagtacgtccgttacgccatgccaaaacaaaaagcacaataagggtaatcacagcaatgatcagtgttgaaagacttttcatccagacatccacttcatagaaagcatagctttctgcccgttcggcaaaatatgccaagagattatttccccattgccataccggagccagcagactggaaaccatccggccgtatgcactgtaaggtgccagtagaacgacaaaagcattcagtccggcaaccaaggcaaggatgaatacagccaatacaccatatctcagccattttaaagccggagaataacggaagcggttctttttctgtttgccggagaaccatgaaacagcatcctgaaatactcctaacgggcaaatgaccgaacaataaatacgcccgaatagtaatgtgagcacaataaggaatagcacgacacctatgttcaaggctaatactgccggcagaaactgaattttcgccagccatccgaaccatgtgtgcaatgtccctgtgaaatcaaggaacagcagagtaataagtgtgaaacacacgattgcggctgtaagtctgatagtacgcaacataaatttattagattttcaatttatagtagttatatcttaattattttcaatttcatcagaatcgaatcttatgctttttaaccgatgcaaatttaagcagagtgattgatttttgcagtatataaattacagaaagttataccaatattactgattaggattttttttaattctggattgttatatcataattaccgaaagtcattgtacataagagtttctgtcattcagaacatttcccttggtaacgggaggtctgaatgacagagcataatgattactttaagacatttaggattttagtttgtctagaaataaatcttataacttatattgggaattaaccctgttccttctttttcttcaatttcaaaggtcttttcattgtattggtaaaagtgcattccggtgcgcatacctacattcagaatcttcaatgagaactcatgagatactcttttcttatttatccggaagctgacagaaacatcaccgtttatggaaggattgaatcttttgctgtatgctttcgtttcatcaaaaacgatgtcatgctctgtctgacttctttcttcgtttacgggggtgtagcgttcccctccctgaaagaataaacgtccgttgagactcagtacgttttgtttaagtttgccgaccatccattcttttccggcaagtaagttcagcagatagttcttatccagtcttgtattacgccaaacgttatctcctcccctatatttcgatttaaacaaagaacctgtaatcatatagtagaagccatttttcatatattgttccagcgtgatgtctattccataatttctgccttgaccggtgttggtcaagattctgtccaaataaaattcctcatggttaatgaccgagaaggaggagttcttttcaaccggtatacgaaataaatattggaaataaggctctatctttaaatgcaggttttgattgatattccagtcgtatgtcatcccgacatgatgtgcccgggaaaaatccagatatcgatttgactggttcttgccgttgacgaccttttctacaaaataataatccagcttttccctgcgactatgtaatccataggccaacgccaaagaatgtttcggatttattttccattttagggcaacccgcggttcgatggataagttattgttcaaagtaaaatattgggctgttactcctaagctagtgtcccagttattattcagattgataaccgaactgctataggccgaaaagactgtgctttcaccatcaccttttgaaatctgttccataggtctgtttaatccgaaataacggctgacctgataatcaagatcatagtgaaggtttgtaatcgtaacccccgttctgttagtatgtctcggactgaacttcgtattcagataagaattaaaaacgaagtcccacctgctgttccggatatctcctactctgataagtttgtcatctgctagttgatctaccactgtatgatctttggaataagtagcagacagggaagagcggatatacgtgttttcattcatcacatacttgtgtgcaagtcctcccaccattttttcgagtctgttttctcccgcttgtcggtctcccagagtttcccatttggaacgctcttctattggagctttgtttctgtcaatcaatcctaatccccaaatagaaaaggtgccgactttggaggtcggaaagtttagcttgaatgctaaatcctgatatttaagattcaggtcattgccggtagccagtgatgtagtcgaaaaacgatagttaacgagataagaacttcctcgctttttactgattgggccctctgatgacagatcgatacccattagtccgacttgaaaagcgtgttcgtacttttgattatttccattgcgcaggtgcatatcgaaaacacccgataatacattgttatattctgcgggaaaagctccgttgtaaaaatccgaatttccgatcacctgtgtactcagagctgacaggaaacctccgcccaatcccgacaaatcggcaaaatgagtcggattgggtatctcaattccttccagcctccattgcgtgaattgcggggagtttccgcgaatggctatggcattggtgccgatgtctcccgctactcctgcgaaagcggcgcttaatcgtgcagggtcatcgaagccgttggcaaatctgccggcttcttccatgctgatcatacggccgcctgtgatagccataggattgatcgtccggtttttctttatttccggcttcacgaggacttctgccagatattggatattctcgtccatcggaatttctacatatacttctttggatgaagttacggatacctcactgattatgcttatgtgatatcccgtaaaagacgcttgaatattgtagcgtccaataggaacattgctgattctgaagtttcccagactatctgtggagctattcaaggaaggttcctctaagacatagacagaggcatactctattggagcattagttttggaatcaactacaattcctcttatggtttgcgttagtttttgtgtcttttcgccgattgtttctgtttttggtgtcggcagagagataataatatgatatctctttattttgtatatgtatccggtacctttcaatatttgtgttagtgccttctcaatgcttgcggactttagcgacaatacttgcctctttttcaggttcaggtttgactgttcgtaagctatgctatagtctgtttgtagttctatttgctcaaaggcttcttttaaagagatatttttattttgaattgtaattttcttttctgcattttgggaaattgccgtcaatgacagaatagaaaaaaacaaaagaatgatcatcttatctggctttttattcgcattaattcgattcattattttatatttgtacgttgatacttcgtttttacttcgcggtttaaatgaggatagacatttcagaactgggaagagggtctcaagctgcttcccggttctttttgttcataggctattttttttatttggttattattattttgtttccactctgccgatagctaaagccgattatatctcctaatatattcagcatttcatccagattctcatctttcaggaatttgacagtgtaccgtctagaggcagaaaaatcggtagaatgatcgataacagtatcataacgtcgttccagcgttctgaatatttcttcggcagtagcattggtgaagattattttcccttttacccaactgttcgtgtcaacagtgtctactgtcgatatctcaatatctgatgtcgatttatcataggtgagttgttcgttgggcttgagagtttgaggaggacgggattgcgtactcacttccacttttccactagtcaacgttgtggtaatattcgcatcattagcatatgcctttacattgaacttcgttccaagtaccttgacggatagttgcgatgtttctactatgaaaggttttgcatcatcttttctgactgagaaataggcttcaccatcaagggttacgacacgattctctttggtaaaagttttcggataggtaattgtacttccagcgttcagccatacttcggaactatccggcagaaccaagcgcttttgttcgccataggctgtggatatttctatctgctcgttttcggaagggatataataaagcaatcctcctgccaataagcatatgggaataacgacggctacaatgcggacaaacttatgatataaaacaatattttcaagatgttctttgttgtatccggttcttaaattgacccgctctaaagcactgtatgtttttgaatcggcttccgtatccagttcgttccaatactctaatgaggctttttctttctcctccgcgttttcttccttcataatccatcgctgtaccttttcctccgtttcaacagaaaaacgtccggaaaggaactttttgatgattctggtgataatattactcttttccatttttgctgtatttactatatatacagtctgatggcaaaaagctcaatgaaaaagtggatgtttttataaaaaagataataaaaagcacgagatagctttccgtatctcctttaatgcgaggcttaactgactttcgacatttcttttagtggtgttgagctgtattgctatctcagcattgctcaacccttcctgacggcttaatgtatagatcattttccgctgttccggcatttttccgacaatgtcatctattaataagcctaactctttagcaataagatcttcttcggaggtagaactatattcgatctcctgactactatttagataagtgtcatgtacatacttatgtttcaagaaatttatggccgaattacgggcaattgtatgcagataagaactaaaagacttggatgcatcaattgaatcatgattgatccaaaggttgacaaaaaggtcttctgtcaattcttcggcatccgattccgattttatatatccgtcgatgaaagtctttgttttattgtaataggctataaaaactgtttcaaaagccttgtgatttccatcctggaaggcttcaagcgtttttatgtcaatgttattactcatgttgtccgactttcatttttattagtgaggacaaaagaagtaattatttggcttaaaaacgcattcttttgaaaatatttaagatgtatccctgctaattattcttttttgtaatataaataatgccaaccacattcagcaaataaccgagtaaacaaataatgggtgcaaaacatatacgaagtctgctgaagatatcaggattatatgcggcaggggtactcccctcgccgctcattaatacatatcctgtaataatcaatatcgaaccaatcgatagaataatataatttattttactcaatgcatttctcatacttctgatagttttattgttttcaagtttatatttccggattttagtttctaagtcccacgatttgagagaataaagcatatttctcctcaaagcgctgattacttagcctgtattcctcttcatcaatctcttttacaagttcattatactgattccattgccagaacttatacaggcaatctctctgaaccatattgatcctgttgtctcctaatgagaatgcccagttgatgtaatcttccgattcggctgtcaggtactttaacagaggcattgctttcgtcttttctcctagggcagcataggctttggctatgtcgaatgacccgctttcatagatctcggggacattgtacgccggaacagcttgttctgcataggcaagtacctttctggctcgggtattgtcgccctgcctgatcagttcctttgccagttgggcgaaaagccttcgatgataatagcaggttcgcagggtggtttcatccagatagagtccgggagtgtccagtccgccatacttatatctgttcattacattttcatacaatctctctacatctatcgcatagttattatctcctttgacatttccccattttttataatcaaaaggcgtgaaacggaaagctaatccttcctgaacgaaataatgatcaaacttcagcttgctgacctcaccgacggatattgccatgtacaatgggcgttcccaattgcagttggcaagcatttccagcatcagcatatctaccttggttagaatacgcatatctttcagagaaatatagatcttatccggtatcgcatttttcagatcttcacctttcagatgacggatggagtcgggaagcataatgcctgatcggagtactgcatctttatcaatgctgatactgatcgtatcggtagggattacgtggaagtcctgtttctccgataatgcccagtacttcaagatgttttttacctcaaacggatcattgccgaaactatcacgggcttcttccggatgtttctgataaagctcttctatctgttttttcagttccggtcggatggctacatattcgttttttccttcctgatattggtctttactccaggtaatgggtaatccgggtgcatcatacaacgggcattgctgctgataaatataccaatctgtttgcgcataactcaaattgcagatgcgggcatccctgcgtactccttccgtgtcttgattataccacaagggaaaagtatcattatctccattactgaaaatgataggatttcctttgtcggggagtgtcatcagataattggctccaaaatcacggcaggtgaaacggttactccggtcatgatcatcccatgtctgactagccatctgaaccggaatcagcaggcagagaaacattaacaggccgacatgaagtactgatgacttcttttttcgaagtgcgtcacacaatccggcagctcccattcctatccaaatagcaaaagcatagaatgaacctgcgtatgcataatcccgttcacggggctgaccgggagtctggttcaaatatagcacaatagccagacctgtcatgaagaaaaggaaaaacacgacgctaaactgctgcattcccttctttccccgcatccactgccagtaaatcccgattaatcctaataatagcggcaaagcgtaaaatacgttatgccctttattctgacgcaaagattcgggcaaaagttgctggtcaccaagtcttagattatctaacagaggaatccccgtgatccagtttccatgctccggttcgccatgtccctggatatcattttgacgcccgacaaaattccagagaaaatagcgccaatacatatagttgagctgataagtgaagaaataggtaagattctctttttgagtgggagctccgtccgttcctcccgaccagcttttgtaggaggaagccatgcgatcattccacattcgtgaaaacagcatattttgagtataacatacttcctctttatttcgaatcactttatatttcccttcttccctattcggtctgtagacagcaccacccgttttcatttttaccttgtaataatctccttcgggcacatactccggttcggaggcatacgttttgccgtaaagtaaaggggcgctttcgtattgctcccggttcaaatagcttttgagtgcgaaaatattatccggagcattttcattgagcggtgtattggcattggcacgaatcaatatcactgcataggtggtataacctacggtaagcataagtatgcaccataaagctgtattgattaatcgttttttgaaacgatagataccagctatgagcaggaaaaatgtgatagccagaaagacaatcagtcctgtttggaaaggaaatcccaaggcgttgacaaagagtagttcgaaccatcctccaatatccgccattccgggaatgtagacaaaaagtatcaatacaataagcagaccggataaagcaatcgccgcaattgctcctttaagcgaaatcgttcgatatttctgataatagaaaaccagtacaatcgccggaatgcaaagcagattgagcagatgtactccgatggagagtccgattatataggcaatcagaataatccatcggtcaccataaacggtgtccgactcatcctgccagcgcagaatcatccaaaaaaccaaggcagtaagaaaagaagagaaagcatatacttctccctctactgcgctgaaccagaaagtatcactaaaagtatatgccaaagctcctaccaacccggaaccgagaatgataatcacgtcggttactgacagattctctttttcttctttcagaagagatctgaccaggcgagtgatactccaaaaaagaaagaggatacatcctgcacttagcagtgcattcagaaagttgactgtacgtgagacctgggagggatcggaggcaaactgtgtaaacagattacctaccatcatataaaaaggtgcaccaggcggatgtccgacctgtaacttttcggcgcatgaaataaactcaggacaatcccaaaaactggcagtaggttcgattgtcattccgtatacgaaagctgctatcaggaagacaagccaaccactgaaatcattccatcttttaaataataagtagttcatagttctgtaacttttttgtttgcaaagttatagaacagtgatataaaacaggcatttttagccggacggatacggacatcccatttctataaggtgttgaaaagcaaagctttttgtcaggtaattccggacaaatgcggactacaatgatttgatgtagtcttccagtgattctttggaacttacaagcataagtttctccgtttttattctggatattcttcgggtaagagtttctacagtcagtttcattagatctgcaaagcaagcaggctggataccttcgcgcaggaaagcacatactctcaaatcttcttctgtaagtttaggacttatctctttcaatttggaaacaagtccatatactccttcctgtagtcttaataattcactccagtctttctctgaaaaagaaacaaccttggaaggggaaacagaccgttcttttatttgccggactttcgatactaccggagaactttcataaatatgctgttgaagcgactgatatttttcttccagatagttacattgcaacatcagtttatccgactctgcctcttttcgcaacatttcatctttaaaagtagtcagttgagaatatacaaacttattcttcttccagagcagcccgagtaacaaggacatcacaccaaagactcccaatgcagaagaaagaataatcttcgtatcgcctgtctgatcgttcagcattagctggctggcataggcttttctttccatttccaatgcttcgtcgaaatgaccatatttctgataataaaggctgcaacgtctgcacaccttggctacataatcgtacttctctgtaagagcagcaagctttattgcttccttgaagtgggtctccgcttcctttttctggtcaagatcactctctacgcatgccagataaaaataagcctttgatttctgaagttcattgccgtgttggtcaaagtatgaaactgcctgacggatttgcttatcagacgtatgggcgatatttttatcttcattcagctgggtacacaacagattatattctgccagctgtgcttcgttcatctggttgatctggatattttcgagaataatagatgctgtatccgggtcctgccccattagctgtgcggctttgtctaatccctgttttacattagtcccttccggatggcatgcagccagtgaaaggacaaccacgtataataagattcgaagattattcataactctgcttttatctttgtatacaaacgattggatttgcaaatataaaaaataatatgatacatacacctctataaaccatacaaaaaatggtgtcactatcctcctctcatagtgacactatactgtgatcatagttacaccatcacggcaggatagtgtaactatattatttatgctcctattattatgcatatcgcagattgccctcatgttttttttgacaaagatcaagcgatgacgggctgtttattaagaagattagccgtatctttgtaacaaataaaaattgtatatatcatgattaaaaacattgtatttgattttggcggagtgattgtagacattgatcgcgataaagctgttcaggcgtttatcaaactgggattggcggatgccgatactcgtttggacaaataccatcagaccggaatcttccaagaactggaagaaggaaagttgagtgccgatgaatttcggaagcaattgggagatctgtgcggtcgcgaactgacgatggaagaaaccaaacaggcgtggttaggctttttcaatgaagtggacttgcgaaagctcgattatatattgggacttcgtaaatcatatcatgtgtatctcttgagtaataccaatccttttgttatgtcatgggcatgcagtccggagttttcatccgaagggaaaccgctgaacgattattgcgacaaactatatttatcttaccagttgggacataccaaaccggctcccgaaatattcgactttatgataaaagacagtcatgtcataccttccgaaacgctcttcgttgacgatggaagttcgaatatccacataggcaaagaacttggcttcgaaaccttccaaccagaaaacggtgctgattggcggcaagagttgaccgttatactaaatagttgagaagaggtatctttatgctcctcccacctacaggaggggaccccggaaggaaaggtgccaggtaagcaatttctaaaaccttttcagctctttcttttcaaatgtccactccggtgtatacaatctgccactgtctgtatctgtcagttcataccaaggtgacagatttcggttggcaggattgacgaggatatgtatttgctgggcgggcatataactttgcgccaataaaaaaactttcttttttgttttcgggtgaattgccacatctactactatcacggcatggcccggtgaacctcctttgataaacacatctcctgcttgcagtgaagtataaggaaccgtacgaagctcttttgaaagagaagcagtgccggcatacataaataccatattcaagtatttacgaaaagtcttatatgaatagtctttgcctcctgcagcataccattctaccttatttccagttactttgatacggtttccttccgcccattttttatattctgccggaaagccattggtaaagttaaatttgatttctccgtatcttttctgtgcccataggtattctgcccgcaagcgcatgactgcatccgcacattgctgtaaatcgcgattgcctatttccatatctactacggcgaatgcggctgcctgattccttttctcctgtccgttgtaaagtaaaaccttactccctttgggcaataatgggagttgacgcagataggcggcaaatgaatgttcatcgcatacttcacgagtgtagcccgtaggaggaagaatggtgctttccactgactgtcccagcgacactataattgaagtcagacatactatgctgaatataagtattcttttcatatcgttatttttcccgaagataggatatcttttgcagaaaaccaagttttgcaggaggaagcttctgaaaccgtctaatcagaatactattcggcaaaaacagaattttcggatattctctttatctttgctgcaaataaaaaaatatgcaaccacaaatcatactcattaccggagcttcttccggatttggaaagatcactgcgcaaatgttatcagaacaaggtcatatcgtttacggtacgagccggaaaccttcggagaatataggtaaggttcgaatgcttgtcgttgatgtaacgaatagtatttctgttcgtcaggctgtagaacaaataatatccgagcagggacggatggatgtattgattaataatgccggtatgggaattggcggagcattggagctggctaccgaagaagaagtgagcatgcagatgaatacaaatttctttggcgtggtcaatatgtgcaaagcagtgctcccttatatgcgcaaggcacgtcggggaaagattatcaatatcagctctattggtggagtgatgggcatcccctatcagggattttattcagcatccaagtttgcagtagaaggatatagcgaggccttggcgctggaagttcatccgtttcatattaaagtctgcctggtgcagccgggagattttaataccgggtttaccgacaaccggaatatctctgaactgaccggacaaaatgaagattatgcagacagttttctgagatcattaaagattattgaaaaagaagagcgtaacggatgccatccccgcaagctgggtgctgcaatctgtaaaatagtagcgcgtaaaaatcctcctttccggactaaagtaggtccgttggtgcaagttctgtttgctaaaagcaagagctggctgccggataatatgatgcaatatgctctccgaatattttatgctatcagataaaaaaaagtttcatgccttgaaactgttggtttcaacggttgaaactttttgtttcaagcaatgaaactaatcgtttcaaggcgtgaaactaatagcgtgtaatagtacggcaatcagttcttcggaactaattccagaaacatagtagtcgtcaataatatagccagcccgatgcagactgttattaataaccagttgatatatttagctttgggcttggtatctgcgtgcagattattcaggaagtattctctgaagaagagataaagtcccggaatagtcgcacttgccaaaaggaagtcttccggaatctgaaagaagtaagtcttggataatccgatcaatgaccagtggcaaaggaacaataccagaaacatatttaccttgtgtgcaaacagcaacagcagtccgatggtaaataccactacagaacaaggcatcactggagaagtcatttccgggaaagatagcccgcgtgccaacgacaccataggataaatgaaaggcatggccagcaacacataagatagcagatcatatttgtgtgtacgttcgaaagtcgtatatccggtaatcgcatcccatatccagataatagccatcactccccaaaacatcgccatcaccccgttatagctgcgttcttcgcagtagataaagtaatagacaatggaaatccacgaataaagacctatcatataaatcttcattcccatcttcacccacggacgtggtttgctgatcagcaatgcggtcagcacaataccgatcagaacgacaataatctgcaaaagccaggtggctgaattataatacgcaattgttctccaaaaaatctccataaaagtagtttaattaatgtcttgttaaagaaaaggctctgtgcgggaacaggaacatcgggaatgtagctccgactgcaagcatgaaaattactgtacttgccaccaaagtgttggagaagaacatctcctgcatctttatatacttatcatgcagttccggtttattcgctgtctgcaaacacataataagagagaataccatgttgtacgcaaactttcccggaatcatcgggagcaacgcaggaatatacagcaccgtcatcgggcaatatacccgctttccaagccataaactgccgaacccgattactaatccaccgaataaagaagccgtagcaatatctacacccaagtaagtcatcagacagaaacggcacgcatgtcccaatgccgccaatattgcaatcattttaaatgcacgcaacggaggatcggaaattgcgccaaatccgatacctgctatcgctgcaaagaaaccatcagaaagaatgtcaagtgctaccatatcaaattaaactgttttttaccattaataatgtaaaggaaaggccgatggcaatgctgacaatcaacaaagaggcttccgtcaaacgggcaaatcctgtcaaaacgtatccttcgacaacatcaatcactccattaatcaaaggaacaccgggtacaagatatagaacgctggttgccagtgcgatttcggaagttgtgtcgaaaatcaaggcggtagaagcacagagcgacgcaacgaaggccgaaacaatgaatataatataatgattcattttcttcttttgcatctgctgtttcaggtataatcctgtaatagtggcggagaaaacgattcccattgagattaagtcaccgccaaacagtttgcagaatgacgcattggcaaagcctaccaatatcaaaacgaacagaggatgtatcatcggagcagagactatctttttgtatttctctttcagttcttccaacgataactgtttgtctactgcttcccaactcaaagcgcttagttcggagttatgctcaaaactgatgggatgtgcaggaatatctataacctcgttgcaggcttcgtttgtctccttatcgatgatagtaagaatgatgtttttatgaaatacgcccagtttgacatctaagccaaaagcttctccgatacgtttggaattgcgtacaacacgagaggtatgtacccccgctcccattagatgggctgaatattcggctatgaatttacctatagataataaagattcgcttgtcttcatgtatgtgatatttttaaatcggctgcaaaagtacaaaaaagagtaatagcaggaaaggtaaaacacaaaaaataaatacctttgcctgcataaaaagaatgactcatgaacaaccaatttacatatccgaaagagaaaatacgttttgccatcctgactttcttctttgcccaaggactctgtatggcaagctgggcaagccgtatcccagatttcaaagatgtatttgctgccaattatgcattttattggggtctgattttatttatgataccagtcggcaagtttgtagcaattcctttggcgggttatcttgtatctaaattagggagtcgcacaatggtacaggtcagcattttgggatatgccatgtccttactttgtgtcggattggctcatgaagtctatttgctgggattcctgcttttttgtttcggagtgttctggaacttgtgcgatatatcgttcaatacgcaagggatcgaagtggagcgtttgtatggtaagacaatcatggcaacttttcatggaggatggagcttgggagcctgtaccggagcacttatcggcttcgtgatgattctgacgggcacctctcctgtctggcattatatgctaatagccgctattatccttatcatagtattggcaggacgaaaatatctgcaagaaacaacgcttcctatatgcgaacatccgaagccgagccttgagacaacagacaaagcggctgataaagctccgaatggattccgtctgttatttcaaaagccggaaatactccttttacaattaggtttagtcggattattcgcgctcatcgtagagagtgctatgttcgactggagtgctgtttattttgaatcggttgtccatgtgcctaaatcattgcaaatcggcttccttgtatttatggtcatgatggctacgggacgattcctgacgaattatgcataccagctttggggaaagaaaaaagtactgcaactggcaggcagccttatttgtatcggcttcttcatttccgcattgttgggcaatgcgtttgactcactgggaatgaaagtgatcatcaattccttaggctttatgctggtcggactaggtatctcatgtatcgtacctactttatatagctttgtaggggccaagtcaaagacgcccgtcagcattgcgctcactatcctgtcgagtatcagttttattggttcgctgatcgctcctttgctaataggcgctattacacaggcatttgatattcgtattgcttacatgattacaggtatattgggaggttgtatcgtacttatcgtcagtttctgcaaagcattcgatattcaggaagaaaacaaattgtagatatataaaacgcagtctctcacagtacttgatcattcaagtgtctgtgaaagactgcatcaatctttttactaaccttaactaacctaacttctatctaatctaactacaaaatgttcgaaaaatcttttatactactaacaattctatcctttaaattctgcttctcaaccagtgaaaagtcgcaggtagcatctgccggagccaataatacggccttagcttcttctgcatctgctatctgttccgggtgctctctgaaataagtttcccattgggaagctgcttccggagttacacccagtgcataattgatgaaatcatcatccgtcaaaaaatcctttaccttagagcacatatcgcatcctttttaagcgtttacatagataggacgctgttactctgtgtatgtactcaactaaatatcctttttactaaaattaacttgccagactgcgcaattttgtcaaaccacggtgcatcaggttgcgtacagactgatagttcatgttcataatctcacaaatatcctcgtatttcttttcttctatataatataatgtaagtgcttcacgctgccggggagaaagctggtccagtagacgcttcaccagtgagaactcatttttgcgttgctcttcttccatatagtcatcttctacgtctgtgggagctactgcatttacatcttctatggctgtatcagacatatacatacgtttgcggagttcatcgcagagtttgttcttcaatgagatgaacaaataagacttcaaattatcaatagttcctaattcttcctttttagtatagagcttaacgaaaatatcgtggatgcaatctttcagtaactctttatcaatggtcaacttcaatccgtaattaaaaagaatgttgatgtgcaaatcatatagctgcgaaaaagctgccatatttcccgcttgaaaagaagcgagtaaagtgtcggttgaattattagtctgttccatcatagcattaattcgattgatttgatgttgcaaagctaagcagaactgacctcaaccacaggtaaaatctggtttgtaggttgaaaaaacaagtatcatgttttataacactcttttgttagaaattacctataaaatggaaaaatcccgctgatgactggtcagcgggattttttgtttcagagtttatggaaccaataaataccttctttcttatccggtacctttaatttatatactccattaattttcaatgatttatccatgatgaccatcttccctgaaccaggatggatgtactttaagatatactttccgggcgataattgaacaggaatttctgttccggacttggaataaatgatactgccgatatcagattttaccattttcttatagttgtcggtatcggtttcttccacttccatagccgctgcatccttcaggaatgctttatctgtgcacggaattacaggacatgaaccgccggccatgaatacagcccatcccatagccggataattctgtgcgtagaaggttacggctttctccgggaacttctgacgatattcgtggacagccttgtaggcttcggtgaaagtaacctttccgactttcatcttacgcatgtgttggcggggagccatattcttccctccttccggtgcaaagactccatctgttttatagtgccagtagcggatatcaataatatccaccacagctgcacgtttcggatcggcaaggatggcgtcctgtacatcttttgtggtacttaatgctactttggccttctttccggtttcagtttcccattcggcaatcacatccagccaaaactgtacaaaatgtagtggacctgtaaattcggcacttgtcagctgaatgacattcgggttatctgcaaagttgttcagacactggcggatgtattgtctgtgtaactcacggcgaaccggatgagtgatatcataaaacatatctgcaacaaagattcgtttgtctcctgcaaacggagcaggttccggaaatccggtctggttgatattgttggtgcttctccacggacaatctacccagtgcgcacctgcttccaggatattgtgctggaaatagttctcatggaatagcaatagtccgtctttatttcctttttcggcaaactctttcaatcgcgaccaataccatgcattagggcgattcagatcatatttgctcagtccttcccaggcagtaccctgaccgctacgtccgaaaggttgttcgtagaaaggcccccatacatctccgtcacgacggcgcactcgttcatgatcatcccggcggcgatcataccaaagtccgtagttttggtcaaataccaatatgttcttttgtttcatatagccgattacggaatcgatgcgatctgtcagtcccaatccttcacgtccgggaacaaagcgggtgatggcagggcttgcttttttcagaaagttggttttaagttttccattccaccaaggggtggtatggctacttcctaccaacaaagtactgttcatctggatacgtccgtttgcaatagttacttccggttttgccgatgtcttgttcggagttatcttcttttctttaatatcatcgattgattttactccggacatagctattgaaggagcaaaggctccttgttcaatccagtgttccaatgtcaggcggggattgtaagcctctttggccagttccatagcaacttcaacggtcggactgctggtggcgcttgtatttcttggcaggatacgggcacgttctgcacatttcttctgcaaacgatcttctaattgagcatagaaaatgcttcggggctgcacatgattgtttgattgtgcccattcgccgtcaccggagaactgtgcccagcatccgtacgcacggttcatggcatcctttgccggagcataacactctatttcggcagcggtacattgccagaacagactatttgccgtattccatcccgctccgttcttgtcctgtcccagattcttgaaactcagattatgcccgtctatattaaccacgtcaaacaataggccacatgcccatgcatcaatagatccgctgaaacctaaagattcatacgaatcacattgtacgaaagcattcggtccggcagcacaatatccggctgcaaagtcatgaataccctgttccgaatagcagcgctggaaaagtgtctgttgtcctaaggtatagaaagtacagcggcgcattcctccgatttcagaaacaggttcccgtgagatacagtcctcaactgtgatttgggaaccggtacgctgaacaaggattgcacttcctgcaaagtgtttaaagctcaccctgcgtacccagcaatcttccgcatcttcgatagaaatacctgtccagcaatgatcttcatctttagggtatcgtttgtcatagtcggaaatcagagtcatattttctactccgcactcccggatgcgcccgttccactgataagtaatcacggaagaagtaccgtatttggcatccagcgccactgtcagcggagcgtccaacgttatctgattaccgtttacttctgtcacggttctatcccaggtaagatccatatctccttctttccagcccagtgcactaattcctcctccaaagatatcacatcctaacgaagcaatccattctttgccggacggacggttcaccagtatccgatctccctttctcaacgaagtacctgaagcaacttccaatgtcctcgcatttaccggaacatatttcgagagtacctgcaatgtatcctgtatcttcagatcgtctgtcccttccatgtagataagggcacctctgtctactcctttttttagaagtatcgttttctctttatccactccgcgcagtacgatgccggaggcatttatacgaaggcttccggataaagaaaattctccctgatccaataacacggctcccctgaaaccggaagcatcaggtactaatgaggcgacatagtcaatggcgcgttgaatacgtgatgtattatctcctgctgtccaaggtacaaacacggcattgcggacagaaggaatatcctgttcggagcccttgtagccacagtacgagaaatcaagaatccggtttccctgttcgtcattcaagtaagtgatccggtcatccttaacctgtaaagcaaaggtttgcgcatatccctgcgcaaaccctatgctcaataatcctaaaaggatagttcttaattgtatattcattacaataaacgttgttttctaattattcaatcctgaaagatcatttgaccataagcaaatcatacgattaaaacagacttttccgtttggacaaggtatcgtagttgttcttcagatctgtccagtctactttcttctttgtatccagcccattgatatatttctcgatattggtatagccatctccattacagtcctcctttgcatcagtcggatcgttcggattcagtccgttggcaatttcccatgcgtccggcataccgtcaccatccgaatcaagatatgcttctcctttgtattcaggaagtccgcccacctgacggatatcggtgatgataccttgtttgtaggagtctgccggcaagcgtcttttcacgtaaggagagacaaattccggagcgtctttcgcataaatcgcttttcctgtttgtacagtcttgatgacgcgagcgtctaccgcatcccgtttcgggagagtagcacctacattatccaatacaaagttataagctttttgggtatccataatcgttacaggcgacattttgaatgctttgtccactctgatttgcggtaagaactttccctcatccacttcactggcaagctgaactccgccattccagttatcttttgtcactttagcatttccgtgaacgatgttaccgtttacataagcctttccgaaggacatcggtttgcttttatcgcgtccggcttccggtttcaatatacgataggaaataggtttatccagcggggtgataggaccgggcttaaaatagttattgattatattataaaaactcttgttgtctcctccatcgatagaacggttccaccagttgaaaacaacattgtttacgaagttaaagtctccgtccatacccaccgaactgttacgactgatattggaagcgaaaagattacggcagaacatactattatgtcctccgatagtggcgccaaacgcatgattataagtatccaatgcttccgagaatatcgaattctgaatggtaatgttcacagtaggcaacttcagtccgtgcccggtttcatccctgttgtagacgtggcgatagatagacatattttcatccagtccccagcttgccgaacagtggtctattataatattgccgactgcatttcctcctactgcatcatcccggaaagcaacatcctgtgccccccgacggaaacgcatatgacgaatcactacatcatgagtatcgatcagaaaagaatgcccggtcacgcagataccgtctcccggtgctgtctgtcccgcaatcgttacataaggggcacgtacactgatcgggcttttcaggcgaataatacctgacacattaaatacaataacacgtgcgccaccggtttcacaggcttcgcggaatgtgccggggccggaatcttccagggaagtaaccacaatcactttgcctccacgaccaccgggagtgtacataccaccgccttccgcaccggggaaggccggaatattacttttgatcaaatcctccggtttggaagcccaaggtttgtaaggtcttcctaactttgcttcttccaaaactgttggcaaggctttttcccatgccgcattggatttctgttcgaactctgcttcttgttttgctcctctttcttttaccgagtcggggatcaccggatattgggctgccacaggtagtacacaggcaaccaacatccatactgataatactttcttaatcttgttcattcttccgaatcttaataggtttttaaaaaagacgattaagaaagtattttgtaatcggtctttctatcctttccgccattcattcatatattcacggggagtctgattatatttcttgcggaaacacttgctatagtagcctgaatctttgaatccgacagcaaacgccacttccgaaacactcaaatccgtatttttaatcagttcgatcgatttattcaggcgaatctcctttaccagatcgacaggtgccagtccggtaaggcttttcagctttttgaagaatgccgaacggctcagtccgatgccggatgcgatcgtatcaatattgaaatcactgtcgtccatgttttcctcgatcacctgatgtatcttttcaagaaactgcacatctttctttaccagatattgttcgtagctgtcttcttccgttgtcgtctggttctccatctgctggcggatacgttcgcggaacagtttccgttcgccaagcaactgatcgattcgtgccaacagatactctttgctgaatggcttggttatatatgcattcgcccccagagtgatcgctttggtcttggcaccttcgtcgttcttggctgtcagaataatgacagggatatggctgatctgaaaatccttccggatagattgcagcatttccagtccatccatttccggcatcatctgatcggtcactacgatgtccgggtgatacagatgcactttcttcagaccttctacgccgttattggctatatggatgttgaatttatcttccaattgcagttttattaactggcaaaggtctttattatcctctaccagcagaagagtcggtaatgaagcgtcaatttccagttcctcctccggttccttttcggaatcgataaccatctccttgtctgtagcggcaggagcagtttccgtatcgctgacatagaaatctacttccgacggacgataatgatccttgcccaataatagctctacaataaacacggccccctgcccttccggactttcggcacggatgataccgtgatgcagatttactatttctttggaaagtgccaacccgatgcctgtaccctgataatgtggattattcgcattctctccttgtgagaaacgctcgaaaatctcactcagcttattttgcggaatgccgacaccgttgtcttctactcgtacatagcaggattttccgtcatccgtcaatccggtagttacataaatacttccaccggaaggggtaaatttgaacgcattcgatatgacgttgcggataacaatgctcaatttatccttatctgcccataccataatcggttcgtccggtagctggaaggtgaaactgatttcattttcctccgaaagtacacggaattctttttggaaggaggctatcatttcattgaaatcgatcaatgatacatgcaggcgcatcttgccattctgaatctttcggaaatcaagaatctgattgaccagttgtaacatttgatttgtatttttttccatcaggtccacatattgcaatcctttcggagacagctcttccctttccttcagttcttgtatcggcccttttatcagtgtcagaggagtacgaagctcatgggaaatattggtgaagaacttgattttcatttccgagactttctgttcgatataaatatcgttcttcatcttaatcatgaagaaggccaggcgcagaccgaaatagagggccgcaatgccaaggattacatagataagagtagcccaccagctcagccaccatggcgggagaatggtgacagccaatgtacgtgtggatacaagttccggattagcttcatccatcgtttctacacggaatacgtagtctccgggaggaacattggtataagaagcaatacggtttttgccgttatagtgccattccttctcatacccttcgagtatgtaacgataagatacgcgattctgattgtagaaatttaatgcggcaaattcgattgtgaacatagactgattatacttcaattgaagtgcatcggtgtatgtgatagacttttgaatcggacagtcgttcaaacttcgcagattacgattggatactttaaagtctacgatacgggtgtcatagttggtatgttgtgtctccagtttatcaggagagaatgtcagaatcccctgtcgcgaaccaagccataagtctccgttcaatgcacgcaacgcactgccttcttccagttcaacattcaggaaaccatcgtatttgtcgtagttacggaactgctctgtcgccttattaaagcaggacaggccaatctcggtagtaaaccacaaatttccgtttttatcttccacgatggacttgaccacatcgttattcattccttcacgtatgccatatgacttgaatatcggttcacgtttttctttgtcatagcggaccagtttattcagacctccaccgaatacactcacccaaatttgtgaattactgtctttatataatacataaatatcattgtccgccacattggaacgatcgctgatttgtcggtacgtctcaaactgaatctgttcgggagtcgtaaaatgtccgtcaaaagacatcagaccatccatcgttcctacccagatacgcccatcttcatcttccgtcattgtgcggacttccatatacagaccataagcgggatactgtttcagtccgttgtacttatgcttgaatacaagcgttccattttcttcggaaattaagttcagcccgccgcccaacagaccgacccagatacgctcctgactatcctgatatgtgaaatatacatcattgttactgatagtattcggattcttagaatcatttttataacgggtaaagcgcagaccgtgcggtgagttcatatccggttcggctttgacaagtccgtttcccttagtggaaaaccataagtttccttctttatcttccatgatatgatatacggcgcctatcagataattctgatccgtaaaaacctgctttatctgtccgttgctatccagacgataaagtgcctgccaacgggtacctacccagatatccccgttctttgcctgataaagcgcacgtatcccctgattccaggaggtcgctttttcagccccgacagggacaggagaaacttctgtcagcagttgaaattgcttctttggaaagttgactttgtatactccgctgcctgtagatgccagccaaagaataccgtctttatccagcagcagatgaaagaagagctgatcgggaaggtcgtcggaaaaaggtttcagttgattgatacgggtcatttccagtttctccctgtcgaagagcagaatttctccaccgggggtgaggaaaaacataccctgttcaccggcatcctgcttttcaaagttaccgatggcattttgtttggggaaaggaaagcgatgattgcttttgttcagaggatcatagtacgtcaatgcctcattaccttcctgaaaccaaattttgtcatacttgtcattgaatatcattcctacttttttccctgcgatggagaacggtagtttggtcagttgtttgtagccgatgttatattcatacgcaccatcaacggtggtgatatacattaatcctgattcagtgaccagtatattggaaatcggttgatcaatttccggtatttcgtaacggttgactactccattttgcggatcgacgctataaatatgtccgttcttatctcccagccataagaatttggaactgtaggaagcacaagtgaactggtccggattggcagaaactttcttttgaataaagtcgacaggcttatctttcagagcctctccttttcttaatgaaagaatctgatagtccataccgatccaattgataaactcggcagtttcgcaaaacacattatgcttgaggcgtaagtcgtagacgttgacattgggacgcgaatcgtgcaactgcttcatggtgattttaccgttctggtctgtatttgcacgcagcaggcttttatctttggtcagcagcagtacgtctccgtcatctgtcgtctgtatcttgataatctgaatattttcagagtactcttttacatcgtcatacactgcgtggaaactttcatgtttcttatcaaatagatagagtttgcggtcgatagtcttgatccaaaggtatccgttccggtcttctacaatacgctgaatcttacggggaggaatatctgctgagtaaaatccgtcatgattatcataggaacggaatttggtaccgtcgaaactgcatagtccgtaccaggtgccgaaccatacaaatccgtcctgccctttcagtgtacaattgacaatgttattgggtaagcctcgttcagccgtataatgttcaacgatcatgttagggtaggcaaaagcacagattctcgttatcaagagaaacataaatatcaaaaagaagtgtttcttcattgtatattatattagtggaaatgaatcttgcatcaaagatactatttttcgggtaaaattcaaattagcagataataaatccagattggtaaccttgttttgccatgcacaaatctgcggtcaagtttttcaaatttacttttctattccaaattcagtctgttgccgttccacttcatccaacacccgttgccgttcttcttccgtcagttgcactttgccttcagttgcactctcggacgaaccggcttttacagttaatgaggatgttttctgaccaatacagtacttctcgtcataacagaaaggaagtcccgcaggaacactttcaaattccatttcagttgcagtcggagcctgagttccttcaaattgcacgtgggctttcactctaatcttcccggcttttcgtgtggaacggatcagtagaggagccgatccgaattctacggcacggggattggcgccaatccttgcatcgccaatgatttctccttcaccttctaccgtgaatacgatattttcctttgccagacgacgtacatttccgctatcatccgttacttcggcaactaccactatgaaatccgaaccatccgctaccagatttactttttgagtatctgcatacaagcgaagtttggtagaccgccgggaaggcattttcttttgtgtacatacaactttcccatcgataataccttcggcaaccatatttaccttctgccagttcttttgagtataactgtatccgcgtgcttcccaaaaatcccatacattttcaaagacaacaggtgcgttcggcaggtgacctttggcatgtaccacaggtttggtccatgtttttgtcccatcatagatagaaaggcggatggagtcacagttgctgaatatcacgacatccttatcggagaactgtgacatttcatgagcaaggaatatcatcggtccgcattctgccaacggatgttggaggcttgccggagattggctgcggaacatttcatacgcatactttttctgacggaaagcgtcataaatacctccccagtatggatcggggtgataaccacgctggtgatcgaacggatgccactgtgtgccaccgataaactgaccggtagtgcggtacatctcatcataacttgtagccagagaaagtgcctgtatcagcaacggacgttcaccccaactgcggcttgcacgattattgttgttgtgggcataccagtcatctacgttttctccgaattcacgggtgaagatgcattgttccggtttgtcctccttttcgtcatcacccggccagccgtagactacatcgtaatgttcctttacaccggcagaatgcacatcggcagcggctatcggacgtcccggatatggatattcttccttcgttatttcaagtgccttcagtgcaaagtcgagtggataacgggtctcattcagaataggctcccacatcagcacggaaggatgattgcgatcacgacgaatcatttcacgggtattctgatgaaccagttctccgaatttcgggtctttgttccagtattgccagcccggagtagcgacgatgacaaacatgccgagttcgtcacaggcatccataaaggatgggtcctgtggataatgcgctacacggatgatggtacatcctgcatcacgcaggcgttttgcgtcacgccattgctgtgaattgggaagagcattgcctacgtatgcgaaatcctgatgacgattggctccaactaattgtccgaaaggttttccattcagccaaaagccctctttgccacgaaattccgccaggcggataccgatacgggtagttcctccgtcgatggaacggtttcctttctttatacgggattgtactctgtatagatatggtgcatccggtgaccaaagtttcggattcctcacatccatctgctggcggattgatttcttttctccggagttcagagagagtttgctagacgtacgtttgataaccttgccttcggcatctgtaagggtcgtttctactgtgacggattccgaacgagtattattgttctgaatctctgtttctacgtatacttgtgcgctcttttcgctgatcttgtcgaagtgaacaaatacaccgccaccgccaactgtccgggagtcgatggcatcggtaatggcgaccggagacttggcaatcatccatacatcacgatagatacctccatgataagcaaaatccaatgtgtattgtggctttccgggagggtatgatttatcgttgctgttgtcggtatagacggcaaggaggcaggagtctccggcttgtacgccgtttgccgtcaagtccagtgtgaaaggcagataacctccgagatgttcctgaacacgtttgccgttcaggtaaagtacttgctttcccattgccgcttcaaaatgaaggagtacacgctgtcctttcgt

SEQ ID NO: 4563 - DNA, 29166 bp, Unknown
  gut microbiota DNA sequence
gaggcatcgacatttaatatttccgtagattgcaggcatgccgagaatatctcataagccagtacacggtcgcaagtcggcatcatagatgcgcaaaattcttgtccttgatggcgaaaactgttttccggcgagatactaggacctgttaccaaatagttatttcgtgggtctattaccatataatctaatagaaattcagcattactttttaataatggatatgcggtattctttaaaaaatctttatcttgtgtgtaatcatattgtgtccataaatgagaggcaagccaagaagatgcagtcgggaataatccccaaagaatactacctgatacagctgtatatccccatggattggctgtagtatgtgcagtccatcctttacaaccatataaatcttttgctgtttttgcaccatgaattgatagatctttaatatagtcaaaaagagggagatgacattctgctaaattacctacattagcaatccaataattttgttcagtattgatatccaaatgataatcgttagtccatcccatatggcaagcgaggttatcgttaaaaaaaccttgtaaagctacaggtagaggagaattaggacgtgaagaagcgatcaacagatagcgggcatattggaaaaataatgcatctaatccaggatcagattctcctttctttacccgtgcccaacgttcatcgtttggtaggtgatcaaactttgcgtgatgctcaaacgaaagtcctacccgggagaaaagtggagaatagtcttctatatgttttttcttcagagtcttaaaatctttctttgatgctaattcaattgttttctcacattttattttgtagttgtaaccagagaacgtattgtttttaaaattggtacgtacatcagataataaagtgacttcagtagctttctcaatataaagttttttcccttcagcttttattgttcctccttttatttgtacagcaatacgtccttcaaaatgtactcctcctttaccatgtttttcaaattctgcattaccggtataaataagttggttaccggatgctactacatttgcctgtctgagtaatttcaattcaagttccatcgttattgcttttggacgactagcttttatatgcatggcaactacgtcatctggattagaagcgatacattggcgtatatattcagtattacctactttatagctaactgtgtttatagcagtatgtaaatccagttcatggcgataatctgatatttctccttgaggatatgaaaaatttattttcaagtcacctatgggaagatgtgttcctactgaatgtgggctacctgccatcatatttcctgcgacgtgattaccttctgacaagttattttcaaaaaatagctttcttacttgattgagtttttctcttccgaatggacgttgctgatgttcatcatattcccctgaccacattgttgattcgtttagagcgagtgtttctgtttctatgccaccatagatcattacaccaagacgaccgttccccaaaggaagagacttcatccattcatctgcaggtttatcataccataatttcattttattctcggttgccttcagtgacagactaccactaactagaagtgcggcccctattatcaggcctaatgttacgtttctcatgttataaaatagtttatttcaaaatgatattgcaaaggtataggagaagggaaaagtaaaaatgaacaaatgcggctattactgaaacaaatgcgtcaactcctttttatatactgttttttagtgtatatttgcgcgcacagccaaatataaccgctatataatttatgaagaaacacctactacgattagctttcataaatggattgctattcttatctatttgtatttttgctcaggaatattctgatttttatttcacccgtgttaatggagaaaatggtttatcagagagtaatgtaaaagcaatcttgcaggatagctatggatttatgtggtttgggacaaaaaatgggctcaaccgctatgatggaacttctattctccaattcgattgcgatgatttggaggagggtacaggtaatcataatattggtgctctttttgaggataaagaaaggaatttatgggttggaacagacaggggtgtttatatatataatccggcggttgatgtatttaaacgtttcaaaatagcttcatcagaaggaataactcttgataactgggtagcggaaattctgtctgattcactagataatatttgggtgttgattcctgatcagggactttttcgttataaagacggaaaggtacatcattattcattgatagataaagacaatttaaaaaataataatccggaatgtatttgtatcaatgagcagggcgaagtatgggtaggtacatcaggaataggtttattcaagtacaattatcgggatgataattttgaacaatatttgacagaccgaatgggacgttcgttaattgacaaaacaattataagtatttgttttcagaaagaaaatgctattttgggaatacatgaaggagatttgctgaaatataatactcgaacagatgagttgagtgaagtttcgttccttggtgagaaaaaaacatttttgcgagatgtaatgtgttttggagatgaaatttgggtaggttctcttcatggaattttcattattaatgagaaagaaaataatgttattcatttgaaagaagacctgatgcgttcatttagtttatcggataatagtatttattctatttataaagattatgaaggaggaatttggattggaacaatgtttggaggtgtcaactatctgcctaatcgtatcttgacttttgctaaatatgtaccgggaagcgatccatattctttaaataccaaacgtatccgtggattggcagaagataataatgggtgtatttggataggtactgaagataatggtgttaatgtattggatcctcgaacaggtaaagtacatcagatatatgataatgttccaggtcgtctcattacactatcagtaaaacattatgaaaatcatatatatgttggattatttaaacaaggaatgaatgatattagtatacctggtgaacatcttaaatacgtcagtgataaggatttgggtattgaagaaggaagtgtatatagttttttaaaagatagtaaaggtcgtacttggataggacctgggtggggattatatgtatcacaacctaaggaaaggaaatttcaccgtgtggaagaagtaggatataactgggttttcgatataatggaggctagagatggtacaatttggcttgctactatgggaaatggtgtttggaaatgtgatcctaagaataattcttataagaattattcttataaggaaggagttgacaactctctaagctccaactccgtcagctccatcatgcaggacagtaaagggaatatatggttctctaccgaccgtggcggtatatgcagatataatgaagcgcaggacaactttaccactttcagcatcgaagacgggctgccggacgatgtagcttacaacatattggaagatgatgctggaaatctgtggtttggcaccaataaaggattggtcaagttcaatcccgagaatggagatgtacgtgtctttaccaataaggatggattgctgggtaatcagttcaattatcaatcggcattgaaagctcaggatggaaggttctatttcggcggggtggacggattgatcgcgttcgatcctactgttcaggaggaggaaaggccgcttcctcctgtctacatttccaagtttagtatatataataaggaagtgacagtgcatactcctgactcacccctgaaacaatgtatcgtacatacggatgaaatcgtcctgccttatgatcaggccaatatcagttttgacgtggccttgctcagttactctactgccgagtccaaccaatactattatcgtatggaaccgctggacagggattgggtacgggcagccagcaaccagaacatctcgtatgccaaacttccgccgggaaaatacaccttccgtgtgcaggctactcacggcagtaagtccgagtcgtccacacgttctctgtctattatcattcttcctccgtggtggcagtctatcatcgcttacattgtatataccgtatgcattatcctgatcgtggttggcaccatcttatggtacaaacgccgcaaggagaaacaactggaagaacggcaaaaactgttcgagatcgaaaaagagaaggaactgtacgaatccaaagtagacttcttcacagagatagcgcacgaagtgcgtacccctttgacactgatcaacggtcctctcgaagccattgaggaaatggagatacaggagcccaagatgaagaagtatatcagtgtgatggtccagaacaccaaacgcctgctggaacttaccggacaactgctggacttccagaagatcggtgccaacaagctgaccatgaaatttgagagcgtggacattaccgaacttcttgccggaatcgtggcacgctttgaagtgacgttcagcctgaaccggaaagaattgcagttaaaatcgacagaagagcaggtgtgggcagctgtagataaagaagcaatcaccaagatactgagcaacctgctcaataatgcgctgaagtacgccagccagaatgtactggtagaactggaaaagggagaagacagctttacgattcgtgttaccagtgacggaaacaagattccggcggaagtcagccaatatatattcgaaccgttctatcaggtggacagaaaggagaagccccgtaatggagtaggcatcggcttgtctctggcacgttcgctggcatccctgcataaaggcacgatctatctggatacccgtcaggaaaacaatatgtttgtactgaccattcctttgaatatggagggcattaaacaggagaacaacaaagccatacagaaagacattgtcgagctggacgaacatacgcccgtcacggctgatatgtatggatatacccttctgttggtagaagacaacgaaagtatgctgacctttattctcgaacgcttgcaggaaaacttcaccgtagagacagcgatgaacgggatagaagcactggaaatattgagaagcggccatatcgacttgatcatcagtgatatcatgatgcctgtaatggacggataccaactctgcaaggaagtaaaatcggatatggagctttctcatattcctattatcttcctgacagccaagaatgacatcgacagcaaaatcaacggtctgaaatatggtgcggaagcatacgttgagaaacctttctctttcaattatctgaaagaacaagtcctgtccttgcttgacaacaggcgcagggaaagagaagcctttgcgaaacgccccttcttctctgtcaacaatatgcagatgaacaaggcggacgaggaatttatgaataaagtgatcaaggtcattgaagataacataaccgatgataatttcggtgtagaacggatggcggatatactctgcatgagtcgttctagtttgttaaggaaaatcaagacactgttcaacttgtctccgctcgattttatccggttgatcaagttgaaaaaggcagccgagtttatccaggaaggtaaataccggatcggagatatctgctatatggtcggcatcaattcgccgtcttatttcagcaagttattcctgaaacaattcggcatgacacccaaagattttgagaaacaatatcaatccggcaagcagatcattatcacgcaggagataaagaatgtcgaggcaggagagggcacaaaatagataaaatacctctcttagcccgcattggagcttatttgccgtatttttatcattttttgaatcgtttgtatatagtaaaggagatgccaatccttacctttgtggcatacctcaataagagaaaaaggtttcttattcgggtatgctttatttttttacataagaacattgtaccatatgaaaaaccaaaagctactactaaaaaaaatgtcgggagtatccctgatgcttcttctgtttcttttcatttccaactgtgccagtggagacaagattttttctaccgatgtatggaatataacttacgatgatcagcaagggggaatagcactcacttataagtcaaaaaatatttgtaacggaatgtatgcttcctatcaatgggaagggaaggagatcaagacaagtgactatgcccgtcataaaatcagtacgggcaaagtttccgattctttcgggaaaggacatatatataaggtggagtatacggataaggagcttccgaagctgactcagtatttctatctttatccgggtaaggaatatatactgaccgattttacggtcgaagcgaaagaggaaatccgttccggcagaatggctcctgttaatgtcgattctatatccggattcttgcaggcaggtgataaccgtgctctttttgttccgttcgacaatgacaaatggatcagatatcagtctcacccgcttggtttcgatacattggtgagttatgaagtgacagccatattcaataatgaaagccggaacggtctggtgatcggctccgtagaacatgataactggaaaacaggtatttcaataggtaagggggatcgtgataacattggttcgctggtatgttatgggggcatagcagatgagcagactcgtgacgtaaaggctcacggtgcattagcaggtaaaaagattaaatcccctaaagtctttttgggtttctttgaagattggtgcgatggacttgaagcgtatgcaaaagccaacgctgtaattgcccctcccaaagcatgggagaaagctgttccatttggttggaacagctggggggcattacaattcaatctgacttatgagaaagcgatggaagtctccgattatttcaaggagaatctgcagaataatcattttgtaaaccttgatcagactgtctatatcggtctggactccggttgggactgtatgaatgaggaacaactgaaatcatttatagaaaagtgtaagtcgaacggacagatcggtggtatctactggactccgttcaccgactgggcacgcgatccggaacggacggtagatgccgcaccggaatataaatacaaagatatctatctctatgccaacggaaagccgcaggaactggacggtgcttatgcagtcgatccaacgcatccggcagtggaagctatgatgaagaagacttccggtttgttccaccgtgcaggattcgagtatgtgaagatggacttcatgacacacggtgcgatggaagcggacaaatggtataatcctgagattaccacaggtatacagggatataattatggcatgaaacttctcaatcaatattttggagatatgtatatcaatctctccatttctcctgttttccctgcccagtatgcgcagtcacgcagaatagcctgtgatgcgtggaatcagatcaaggataccgaatatacattgaatgctctttcatacggctggtggcagaagtatatctatcaatataatgatgccgatcatattgtactgagagatgctaccgacggagaaaaccgtgcccgtattacttcgggtgtcattacgggtatttacattacaggagacgatttcagtgcgggaggaggaaaagacgccaaagagaaatcacagaaatatctgaccaatgcggcagtgaatgcagtagcgacaggagaagtgttccgtcccgtggaaggaaacggagagaagtcggaacatatctttgtaaggaagacacccgatggtcgtttccattgtgcggtattcaactactcggaccaggaacagacaactgtgctttcgttagaaagaataggattggacaaggcacgcaactatcaggtgaaggagttgtggagcggcaatgagacttttgccacaggacagcttgaagtgaccgtaccctccaaagacgtgcaattacttgaatttaaataaccgaagaaatgaaaaaatatcaattaacactcttatcgttatgtgtggcagcctttgcgcaagcgaaggtcacattgccgtcattctttaccgataatatggttattcagcaaaacagtcagctgacgttaccgggaaaagcgaaagccggtaaacaagtgactgtgaaggtgagctggaatcatgagaaatatacggttaaagcgtcagctgatggtcattttagtatagaagtcccgactccgcctgccggaggaccttttcagatcactgtttcggatggtgagaagctggtgctgaacaacgtcctatcgggagaagtctggatatgttccggtcagtcgaatatggaaatgcccgttgccggatggggaaaagtgatgaattacgaacaggaggttgccgatgccaattatccttccatccgtctgttgcaggtaaagaagaccgtcgctttctctccgcaggataatgtagaaatgaatatgaacggctggcaggaatgtagttccgctactgtaccggagttttcttccgttgcttatttctatgcccgtaagttgtggaaagaactgaatgtgcccgttggggtaattgactgtacttggggcggcacacctgccgaatcgtggacaagccatcagacattgaagcaagtcatgggattccagaaaaagatggccgaaatggaaagtgcaggcttccaaagagagaaacttgtcgaactttaccatcgggaaatggacgagtggcttcagcagtttgatgccaaggatcccggattcaaagacggagttccccaatggatatcagctcttcagacagggaatgaatggaaaccgatggaactgcccgcctactgggaaactcgcggactgaattttgacggtactgtctggttccaaaaagaagtggaaatacctgctgactggagcggcaaggaaatctccttccatctggctatgatcgacgacgacgacgtcacttactttaacggaaaagagataggaagaacttcgggatgtaatacgatgcgtacctataagattcccgcaaccttggcaaaggcaggtaaaggggttatcaccattcgtgccatagattatggaggtgaaggtggtatccatggagaacctcagcagatgtatatggaagcgaacggcaagaagatttccttggcgggcaactggaactatcacactggagtatcgatgaccgatgcaccttccagaccattgtctcccgaaggaaccggctggccgacatcctgttacccgaccgtactttacaatgcaatgatacatccttttactgtttttcctatcaagggtgctatctggtatcagggagaaaataatgtaggattcgacgagcagtacagagtacttttccaatcaatgattacagattggagaagggcatggaaacaggattttcctttctactttgtgcagttggccaattatctgaagcccgaagaagtgcagccggactccaaatgggcggctctccgtgatgcacaggcacatgcgctgcatctgcctaatacaggtatggcatgtgccatcgacctcggcgaagcttatgatatccacccgaaaaacaaacaggaagtaggaaagcggctggcgcaagcggcattgacgaagacctataacaaaggtacatacgaagtgcccgcattccttggataccgcatttcgggacgtacgctgattcttactttcgatcaggaagtagtagccaaagaaggggctccgaaaggctttatactggcaggaccggacgggaaatacgttccggcacaggctaccatccggggaaaagaagtcattctgcaatccgaccggatagaaataccgacggcggcttgctatgcgtgggcagacaatcctgtttgtaatctatatggcaagagcgggcttcccgtacccccgttccgcaccagagaataaatatcaaccataacaatgtaaaccatgaaattaaaagcattcttacttttttttctattgagttctttttctcttttgcaggctgccgacaagcctctgatcaaaatagaaaccgaacggaccagccttatctatcaagtagctgacaacggacgtctgtatcagaaatacttgggcaaaaagcttaaccatgattccgatatccagtatctgccacaagggactgaagcttatctgactcacggtatggaggactactttgaaccggctattcacatacgtcataacgataataaatcttcattgctgctgaaatacgtagatcattcgagcaatgccatcggtaacggggtcaacgaaaccgtaattacccttaaggatgataaataccctgtgaccgtgaagctgcattatgtggcttacggcaaagagaacattatccgtacgtttactgaaatcagccatgaagagaagaaacctgtgatactttgcaagtatgcttcatcaatgcttcacctgaacagcagcaagtatttcctgactgaattttccggtgactgggcacacgaagccaacgtgaccgaaagagaactggctttcggtaaaaaggtgatcgatacgaagttgggtgcacgtgccaatatgtttgtatctcctttcttccagctggctcttgacaatccttcgcaggagaatgcaggcgaagtgctggtaggaaccatcggatggacgggtaactttcgctttactttcgaagtggacaacaaaaacgaactgcgtattatcagcggtatcaacccgtacgactccgaatacagcctgcccgccagagaagtgttccgtactccggacttctatttcacttacagcacgcaggggaaaggtgaggccagccgtaacttccatgactgggcgcgcaatcatcaggtgaaaaacggtaatgatacccgcatgactttgctcaacaactgggaatctacctattttgactttgatgaaaataaactgatcggcttgatggatgaggctaccaagctgggcgtagatatgttcctgctggacgatggttggtttgccaacaaatatccccgtagcagtgaccatcaggggttgggcgactgggaagagactgccgacaaacttccgaacggagtagggcgtcttgttgaagaagcacaaaagaaaggtatcaagttcggtatatggatagagccggaaatggtaaatcccaaaagcgagctttacgaaaagcataaggactgggtgattcatctgcctaaccgtgatgaatactacttccgcaaccagatggtgctcgaccttagcaatccgaaagtacaggatcatgtattcggcgtggtggacaacctgatgaccaaatatcccggcatcgctttcttcaaatgggactgcaacagcccgattacgaatatctattcggtgtatctgaaagataaacagtctcatctgtacgttgattatgtgcgcggactttacaaggtgctggacagaatcaaggctaaatatcctaatcttccgatgatgctgtgtgccggtggcggcggacgctccgactatgaagcattgaagtacttcacagagttctggccaagcgacaataccgatcctatcgaacgcctgtttatccaatggggctattcgcagatcttcccaagtaagacactgtgtgcccacgtcactacttggaatcgtggaaccagtatcaagttccgtaccgatgtagccatgatgtgcaaattaggattcgacatcaaactggaagacatgaatcagaatgagcacctttactgtgatcaggcagtcaagaactacaaccgtctgaaacctgtcatccttgaaggtgatttgtatcgcctcgtttctccttacggaagcaaccatacttcttccatgtttgtaggcaaggacaagaaaacggctgcggtatttgccttcgatatccatccgcgctatgcggaaaagacattgcctgtccgcctgcaagggttgaatgccgacaagaagtaccgtgtgaaggaaatcaatatgatgcccggtagcggttcctcattgaagggtaacaaccaggttttctccggagaatatctaatgaacgtcggactggatcttttcacaacacagcagctcaacagccgtctcattgaaataacagaagaataaaaagccatagacataagaaacatatcttataaaaacaccatgaaccatgaagaaattacttttaagtgtatgtgcattttcattgactctcgctacgttgcaggcaggggaaatcactaaatatgtaaatccgtttattggaacgggggccatcgatgggggactttcgggtaataattacccgggggcgacctcgccgttcggtatgatacagctttctccggacaccagcgaagctcccaattggggggacgcttccggctacgactataaccggaatacgatcttcggtttcagccatacccgcctgagtgggacaggagcctcggacctgatcgacattacattgatgccgaccagtagcggacgcacttcttccgcattcacgcatgacgaagagaaggcccgtcccggctattatcaggtaatgctgaaagatgagaatattaatgcagagcttaccactactcagagaaacggtatccaccgctatcaatatcccgccggcaaagatgcggagattatattggatatggaccactcggcagataagggcagttggggacgccggatcattaactctcagatccgcattctgaatgatcatgcagtggaaggttaccgtatcatcaccggatgggcgaaactgcgcaagatttatttctacatggagttttccagtcctatccttacttctacgctgagagacggcgggcgtgttcatgaaaacacagccgtgatcaacggtacgaatcttcatggctgtttccgtttcggccaactgaatggcaaaccactgacgtgtaaggtagccctttcatccgtctctatggagaatgcccgtcagaacatggaacaggaagcaccgcactgggatttcgaccgctatgtggctgctgcggacgctgattgggaaaaacaactgggaaagatcgaagtgaaaggtacggaagtgcagaaagagatattctatacggctctttaccacaccatgatacagcctaacaccatgtccgacgtgaacggcgaatacatggctgccgactatacgacccgcaaagtagcgaacaatgaaactcattacaccacattctccctgtgggatactttccgcgcttctcatcctctctacacattgctggaacccgaacgggtgactgacttcgtgaagagcatgatacgccagtatgaatattacggctacctgcctatctggcaattatggggacaggacaattactgtatgatcggtaaccactccatccctgtgatcactgatgccatcctgaaaggtattcccggaattgatatggagaaggcctatgaagcagtctataacagttcggtaacctcacaccccaactctccttttgaggtatgggagaaatacggctttatgcccgaaaacattcagactcaatctgtctccatcactctggagcaggcttttgatgactggtgtgttgcccaactggctgcaaaattgaacaaggatgccgattatcagcgattccacaaacgctccgaatattaccggaaccttttccatccgaaaacgaagttcttccagtccaagaatgacaagggagaatggatcgaacctttcgacccgtatcaatacggtggaaacggcgggcatccgtttaccgaaggaaatgcatggcaatacttttggtatgttccgcataacatccaggccttgatggaactgacaggaggaacgaaagcctttgaacaaaagctggataccttttttacctctacctataagagtgagcagatgaatcataacgcttcgggatttgtgggacagtatgcacatggtaatgaacccagccatcacgtagcttatctctataattttgcaggtcagccgtggaagacgcaaaagtatgtcagtcatattctgaacacgctgtataacaacacttcttcgggatatgccggaaatgatgactgcggtcagatgtctgcctggtatgtattcagtgcgatgggattctatccggtcaatcctgccgacggccggtatatcatcggttccccgcttttggatgagtgtactttgaaactggcaggtaataaggagttccgtatccggaccatccgcaagtctcccgaagatatctacattcagtcggtgactttgaacgggaagaaacacaaagatttcttcatcactcatcaggacatcatgaacggtggtacgatggtattcaagatgggtaagaaaccatccggatggggaaagtaaacagtatgaattcagatattgtatctaatagaaacatggatgagttatatcatatagggcaataaatattatagccttgtttctatataataagagactgtctacctcctgacagtctcttattattattttcttatttaacctcttcggaagtctgtaacatctggaacaacttgtccagctttggagccatgataatctccgtacggcggttcttgcttctgccttccgctgtttcattgtcgtcaacaggcatatattcgccgcgaccgctgggctgtatctgcaaaggatttacaccgtagttcttaatcaggatacgtacgacggaggtagcacgaatcacgctcaaatcccagttgtctttgaactgtacggtgttgatcggtttattgtcggtgtgaccttcgataaatacgtcgatgtcggtctgcttgttcaagacttccgccaatttgccgagagcttcctctccgcgtttatccagacgggcgcttcctgactggaacagcaatttgtccgacattgccacatacacctttccatccttttcacgaaccgtcagttcgtctgtgctaaagcccagtaacgcgtctttcacactgttcagcagttgtttcactttctcgttctgagcgttgatcatgtcctgcaactcgttgatggtgcgttctctttcgctaagttcgtttttcttctgactcaacaaggcattcagtttttcctgttccgtcatgttagtactaagcatgctctgatactgacggatactgtttcccatctgggtggtatcacgcaggagcttcttgatttgtgctgacagctggtcgcccgtgttgcggcaatcagtcaataaactttgcaagctgtcgatacttgcaatacgtgcggcttctgtcatcatgaacttctttttcgttacacatgaagtacataataacaatgtaaggaaagtaaataatgcaattttcttcattacgctttattttttttgcaaagaaataattttcttctgaagattacaaaaattcttttattaaactctgtgtcatatagttaagaaatgacctgagagaattttactgctggcacttcgttgatgtcaagacaggctgttgtgcggaatatgctaaagaatcagcgttgcagaaactcgcaaagtttctgtacagccagtgcacggtgactgatcttgttctttgtttcgtttcccagttcggcaaaagtctgttcgtacccttcgggcttgaatatcgggtcataaccgaagccggaatctccgcgcttctctttgatgatttcccctttgatcacaccttcaaagagatattcctttccgtcgagaatcagcgaaatggcagtgcggaattgcgctttccgattctcttttccttccagttcgtggagcagcttgcgcatattcgcctgagcgtcgtgtccttcgccttcggcatagcgggcggagtacactccgggcgctccgttcagagcttccacttccagtccggtgtcatcggcaaagcagtccagctgatagttccggtagataaaagaagatttcagcaaggcatttccttccagcgtttcggctgtttcgggaatgtccgtgtggcagtcaatgtcattcagactgagcagttctaccttatccccgaggatggcagctatttcttcgagtttatgagcattgttggtggcaaatacaagtttgcgtttcattgtcttattcttgttttttagcggaattatccggattcattcacctgtttatttcactttcaactgatcgaacccttcgccatacaccccgatgacggaactttgcgagatgaaagcgttcggatcgatacgttttaccagtcggaagatatccagcgactgacgccttttggccagtacgaccaatacttttacatcgtttttgctgtaccatccggtaccgttgagcacggtcaccccacggtctgtatctttaatgatgcggtcggctatctcatcatacttcttggagaagatgaagaactgtacggactgacgggcgctgttgataatccagtcgagcacgacaccaatgatgaacagagtgacgaaaccgaagattacccgacgccagtcgtgaaacacaaagtaacaggaaccgatgatgaacacatcacaaatcatgatcatccttccaagggatacgtctttgtatttgttaacaatagcggcgatgatatccgttcctccggtgctgccgttataattgaaagtaatgcccagacctacaccgcacatagccgcaccgatgatacaagccataaagtcctgtccgctgccgagcagtagaggttttccgtcggccgacatatcgggcgtttgtatgtagttgtttaccaacacctggaatatccatagcaggaaagtcagcatgaaaattgcataagtagtctttatgctgaatcgcggacctaatatcttgatggcaaatgtcatcagaaccgcattgatgatgaagtacgaccactggataggaaatcccgttgcgtaataaatgatagccccgataccggtagtaccccctgtcgttatctggtaaggcagcagaaatgccgcccatcccaaagcataactgatcaatccgagagtgatgtagatataatccttcacttctctcattatttccgcttttgctggtttgcgcatttaattaataggtaataagtattaagtaataggtaataagtcgtagtcgataggtacaggtaataagtattaagtattaggtattaaccttgcggatatgctcggaaagcagctgcggttattacctattacttattacctgttacttattttaaactaccacatttacaatcttcttcggcaccacgatgatcttcttcggtgttttgccttcgatccacttctgcgaacgttcgtcggctaatacggcagcctggatggcatccgaagcggcatcagcgtcaaactccatgttgaagcgtgcttttccgttgaaggagatggtatagttgatcgtatcttctttcagatattcttcgttgtatgcgggccatgcggcgtcacatacggaagtttcgtgtcccagtgtatcccacagttcttcgcaaacgtgcggagcgaaaggagcgagggtgataacgagctgttccagtatctctttcttgttgcatttcaagttggaaagttcgttgacacagatcatgaatgcgctgacagacgtattgtaagagaactgttcgatatctcccgttactttcttgatcagtttgtgcaggctcttcaactcttccttcgttgcaggctcgtctttcaccagatattcgtcggtacggctgtaaaacaatgaccagaacttacggataaagcggtgtacaccgtcaataccgttcgtatcccaaggcttggactgctcaaccggaccgaggaacatttcgtacatacgaagggtgtctgcaccgtatttgtccacaatcatatccggattgactacgttgaacattgatttactcatcttctcaaccgcccatccgcagatgtattttccgtcttcgaggataaactctgcttccgcatattcgggacgccatgccttgaatgcttccaggtcgaggatatcattggatacgatgtttacatccacatgaagtggagtcacttcgtattggtctttcaggttcagtgaaacgaaggtgtgagtatctttgatgcgatatacaaagttgctgcggccttgaatcatgccttggtttactaacttctggaacggttcttctactaccgatgcacctacatcgtgcaggaacttattccagaaacgggagtagatcaagtgtccggtagcgtgttccgttcctcctacataaaggtctacgtttttccagtattcgtccactttcgggtccaccaatgctttgttgttgtgcgggtccatgtagcgcagatagtatgcggaagaaccggcgaatcccggcatggtgttcagttccagcgggaagatggtaacgttgtcgatcttttcgttttctactgtgcacttgtttaccgtgtcccacgcccattccttggcgtgtcccaatggaggttcgcctgtttcggtggggaggaacttgtctacttccggaagttccagcggcagacagtcttcgtcgatcatgtacggcattccgtctttgtagtatacagggaacggttccccccagtagcgctggcgtgagaaaatggcgtcgcgaagacggtagttcactttcacacgtcccagattatgttctttcacatattgcttggtcttttcaatggcttccttgatggtcagtccgttcagagacaggtcacagtacggagttacatccggacgcggagagttgcagacgataccttccttggcatcgaagctttcttcgcttacgtcacaaccttctaccaacgggcggatttcgagtccgaaatgcttggcgaaagcatagtcgcggctatcgtgggcgggtacggccatgatagctcctgttccgtatcctgccaatacgtaatcgctgatccagatgggcactgcttcacctgtaaacggattgatagcatacgaaccgctgaaaacaccggtcacgctgcggtcggcgatgcgttcgcgttccgtacgtttcttggtgcggtcaaggtaggcgtctacttctgctttctgggcgggagtggtcagctgggctaccaaatcactttccggagccagaaccatgaaggtcacaccgaacatggtatctgcacgggtagtaaagatggtaaattcgagatcgctgtcttttaccttgaactgtacttcggcaccttcggagcgtccgatccagttcttttgagtttctttcagtgattcggtccagtcgatggtatccagtccgtcgagcagacgctgagcataagcggatacacgcagacaccactggcgcatcttcttctggactacggggaagccgccgcgttcgctgacgccgtctatgacttcgtcatttgccaatacggttcccagtgcctggcaccagttcaccatcgtttcgccgaggtaggcgatgcggtagttcatcaggatttcctgctgttccttttcgcttttggctttccattcttcggcggtaaagctgatttcttcgctgcaggcagcgttgagtccttcgtttccgtagattgcgaatgcatcgatcagttcctggatagggcgtgcctgctgttcgtcgttgcagtagtagctgttgaacatcttttggaaagcccattgggtccagtgataatattcgggttcgcacgtacggatttcgcggctccagtcgaaagagaagcctattttgtcgagttgctcgcgatagcggtcgatattagctttagtagtaattgcgggatgctgtccggtctgaatagcgtattgttccgctggcaaaccatatgcgtcatatcccatcggattgagtacattgaagccacgcagtcgtttgtaacgggcgtaaatgtccgaagcgatgtatcccagcggatgccctacgtgcagtccggcccctgacgggtaagggaacatattcaatacatagaatttctgcttcgattcgtcttccgtaacctggtaggttttctcttccacccacctttgctgccacttcttttcaatctccctgaaattgtactccatagtgataaagtttttatttatagtgatttatactgttatttcaatttgagccagcaaatttacgtgtttattttcagataaccacgtagtgagtgaaaaaaacctttcttttataataaggtattgcccgaataacaaggtaatacctgataaatgaagaaatatcacggcaaataccgtccggctattgactttcttgtttttatttcgtatatttggaggaatataaaacggaatagtaatgataggatatataaaaattataacataagttcaataggtggatgtgcagaattgcatagccaggataacgaatgggcaagaaactgcgaaggttcttgcccatttttgttataataattctattgaggccgttggaaacgcctaaaaatagtttataataaacttggggaccgtttataataaactctctcgttatttattaaaaacgatgaaggagtttattcgattccgggggtgtagtgtaagaaagggagaaaacttttttttgagtaaagttctcttcctttctttatgcggtaaaaatgtgatatattaataggactgttttgatagtggtgatttgtttacaaacgggcgcttctatctgtaagactctctttttcgttagacttttggataatatgtttctttcatttggtattattatatacgtattaatgtgagtatatttggggaggattgtttgatcgtttataatacaaagaatatggataaaatgtgagtgtatactggttatagttgaagtcctgtcgggataatctttttagagtgttagctgaaaaagcctttaaataaacgttaaactagcctggataccgactaaaaagtattttttccaacctatatcctttattttctcctcgaattaattgcaaattaattactaaattaactagcgggacttacatttgtgtcagttatcataaaattctaataaatgaaaaagttgctggtactattaacaatgcttcttacatccttctttgctgaaacgcaaaaaaggagagactattggaataacaagctaaagcttatctcattccgactacctcttccggtaggatatattccgaagattggccaatcctgttgtaactaaccgaataaataaattaaatatatatgaaatatcttatcagctttttattcttagctcttgcattttcaatgaaaagtgaggctaaagtgacattaccttccatacttggagataatatggtattacagcagcaagcagaagtcaaactatggggaaaagcccgtcccaatgctactgtaacggtgaagacttcgtggaacgggcagacatataaatcctcatcggatggcaagggaggctggtcgttaacagtatctacccctgttgcgggaggcccttacaagatcatcttcaatgacggcgaattactgacgttgcagaatgtactgatcggtgaagtctggttctgttcgggacaatcgaatatggagatgccgatgggcggtttcgaccggcaaccggtcagagggacgaacgacattattgccaaagccaaaccatccacgcctatccgaatgtatactacagattcaaaggatgggagatgggtacgccagtttagtaaaacgcctgtggaggactgccagggcgaatggctggaaaatacgccggtaaacgtttcccatatcagcgccgtgtcttattattttgcgcgttatatacaggaagtgctggaagttccggtcggcatcgtcgtttctacgtggggaggatcaaaagtagaggcatggatgagcagagaatccataaagccttttagtagcatcgatctttccatcctcgataacgatgctgaagtgaagaatcctaccgccactccgtgtgtactctacaatggcaagatagctcctttgactaattttgcagtgagaggcttcttgtggtatcagggcgaaagcaaccgtgacaataccgatctttacctgaaccttatgcccgcctttgtggctgacttgcgtgcgaaatggggcaggggcgaacttcctttctactttgtgcagatagcgcctttcaattacgaaggagccgacggtacatcggctgcccgcctgcgcgaggtccagttgcagaatatgaaggatataccgaatagcggcatggttacgacgatggatgtcggccaccctgttttcatccatcccgtagacaaggagacggtagggaaccgactggcgtattgggcattggcgcagacctacggcatgaaaggattcggatacgctcctcctgtttataaatcgatggagatacaggagaataaaatctatataaacttcgacaatgcccaacgcggcctaagtccgatgtggacatctcttaaaggatttgagattgcgggcgaggataaagtattctatccggcttttgccgaaatagaaaccacgactgcccgactggcggtttcgagtgacaaagtccctcatcccgttgccgtgcggtatgcgtataagaattatgtggaagcaagtattttcagtattcatggcatccctgcggcgcctttccggacggataactggtaaaagcagatgattacctgaatagatacggctattttatcagacatccggatattcgctttcttgttatatccggatgtataaccggttctctttcggcgaaattttgttgaaaatatatctatcaaagtcagtgggtatatccatgaatccctgtatctttgcattctcattaaaaccataattatggaactaaagcatgggtactatcatctgattgccatactaacagtagctatctggggactgacattcatttcgactaaagtattgataaaccacgggctgacacctcaggaaatcttcttttaccgttttctgattgcataccttggcatctgggtaatttctcccaaacgtctgttcaccaataactggcaagatgaactgtggctggtagcaggcggtatattcggtggctccctttatttctttacagagaataccgctttaggcatcacccaggcgtcgaatgtatcgtttatcatctgcacggctcccttgctgactactatcctttccctgcttttctataaaagtgaaaaggcatcgaaaggactgatatacggttccctgctggcattgatgggggtagggctgattgtctttaacggcagttttgtgctcaaaatatctccgataggcgatctgctgactttgcttgccgcattatcatgggcattctatagtctgattattaaaaagatggccgggcgttatcctaccatatttatcacccgcaagattttcttttacggagtactgacgattctgcctgccttcctcctgcatcccctacagcccgataccgccgtacttcttcaacctgccgtactgttcaaccttctgtttctggccgtattggcttcgctgatctgctatgtgctctggaatttggtgttaaaacagctgggaacggtacgggcatccaattatatttatctcaatcctctggtcacgatgattgcatcgttccttattctggatgagaagattacgttagtcgctttaggcggcgcagcttgtattgtctgcggggtgtattgggctgaaaagaaataaagtagattatgagaaaaatgatgaatgagcagcttcctatatcgaagtcgtctcctctgaaagctcgtttttatgattatccttattttacttacccgtggcatttccatacggagtatgagattatctatgtcaaggagggcacgggaatgcgttttgtaggaaataacgcggagaaatatgccgatggtgatattcttctgctaggctccgacctgcctcattatatgaagagcgatgaggtgtatcagcaagaaggcagtacgcttcggacaacggggactatcattcagtttgaaaaggacttcatgcaccacgctttcaattattatccccattttgtgaagataaagaacctgcttgaagaggcgcaacggggaatttactttcccgcaggatgctccctgcggctggttgatttacttgaatcgattccggtggagacaggagtcgatcagatcacttctttcctgcaacttctgaaagaaatggcaaacgtcgcttcacggtctgtgctatcgacttccgacttcgaaaatgatattatctacgacggctcgagaatagacaaaatcatagcttacctgaataagaactatacacggcagattgatctgaatgaaatatcttctctggcagctatgaatcctgctgcattctgccgcttctttaagagcaaaacggggaaatcattcaagaattacatattggagatgcggataggatatgcgtgtaaactcttgctcatgggcgatatgaatatttcgcagatcagtgtggagtgtggatttgatacgatttctcattttaataagtcgttcaagaagcataccggattcactccgtcttactataaaaagatgatgctggctgaatagaaatgaatgaaagaaagaggcaaacgggacgtatggacataaaaaaagggtcaacgccttgacccaacctttgttaaccttaaatctaatactatgaaaaacacattgcaaagatacggactattgggaaattagcaaattatccaagtaaaatagtatgttttataacatgttttaatagttttcctttacttgttaagaaatatacccttcttttttaaaaggatgcaacactaattgtgaaaattgaaacgggaaattccgttgattctctgccggaaaactgttatctttgcaaggttaatctcattattcactcaacaaaaaagaaaaggagcgaaccgtgaacgaggaagaaatcgtgcttacccccatgatgaaacagtttctggatttgaaagccaaacatccggatgcagtgatgctgtttcgttgcggtgacttttatgaaacatattctaccgatgccattgttgcatccgaaatcttaggaatcacactgacaaaacgcgccaatggaaaaggaaagactattgagatggcaggatttccccatcatgcgcttgatacatatcttccgaaactgattcgtgccggaaagcgtgtagctatctgtgaccagctggaagacccgaaactgacgaagaaactggtgaaaagaggtattaccgagttggttacccccggtgtatctatcaatgataatgttctgaattataaggagaataacttcctggctgccgtccatttcggaaaggcttcctgtggagttgcctttcttgatatatctaccggtgagttcctcaccgccgaaggtccctttgactatgtagacaaattgctgaataacttcggaccgaaagagattcttttcgaacggggcaaacgcctgatgtttgaaggtaacttcggcagcaagttcttcacattcgaactggacgattgggtatttaccgaatccaccgcccgtgagaaactactgaaacactttgagacaaagaatctgaaaggattcggggtggagcacctgaagaatggtatcattgcttccggtgctatcctgcaatacctgacgatgacacagcatacgcagatcggtcacattacttcccttgcccgtatcgaggaggataagtatgtgcgtctggataagtttacagtccgtagcctggagctgatcggcagcatgaatgacggtggcagcagtttgctgaacgtgatcgaccggaccatcagtccgatgggagcccgcctgctgaaacgctggatggttttcccgttgaaagatgagaagccgatcaacgaccgactgaatgtggtggaatacttcttccgccagccggattttaaagagctgatcgaggagcagttgcatctgataggagacttggaacgtatcatttctaaagtagccgtaggacgtgtgtcgccacgtgaggtggtgcagctgaaagttgccttgcaggccattgaaccgatcaagcaggcttgtcttgaagcggataacgcaagtttgaaccggataggtgaacagctgaatctttgtatttctattcgcgaccggattgccaaagaaatcaataatgaccctcctttattgatcaacaaagggggcgtgattaaagatggtgtgaatgaggaactggacgaattacgccgtatttcatactccggcaaagactatctgttgcagatacagcagcgtgaaagtgagcagacaggcattccgagtctgaaggtagcttacaataatgtattcggttattatattgaagtccgcaatatacataaggataaagttccgcaggaatggattcgcaagcagacactggtcaatgcggaacgttatattacgcaggaactgaaggtttacgaagaaaagattctgggagccgaagataagattctcgtgttggagactcagttatataccgatttggtgcaggcattgacggagtttattccgcagatacagattaatgcgaatcagattgcccgtctggactgtctattgtctttcgctaatgtggcgcgtgagaataattatatccgtccggttattgaggacaatgatgtactggatatccgtcagggacgtcaccctgtgattgaaaagcagcttccgattggtgagaagtatattgccaatgacgtgatgctggacagcgcgtcacagcagatcatcatcatcaccggtcccaatatggccggtaagtccgcgctcttgcgtcagacggcactgattacgctgttggcgcagatcggttcgtttgttcctgcggagagtgcccacatcggtctggtggataagattttcacccgtgtaggtgccagcgataatatctcggtgggcgaatctacttttatggtggaaatgaatgaggctgcggatattctgaataatgtctcttccagaagtctggtgttatttgatgagttgggacgtggtacgtctacctatgacggtatttccatagcctgggcaatcgtcgagtatatccacgaacatccgaaagcgaaagcccgcacactgtttgctacgcactaccatgaactgaatgagatggagaaatccttcaaacgcatcaagaactataacgtgtctgtgaaggaagtggacaataaagtgatttttctccgtaagctggagcgcgggggaagcgaacactccttcggtatccatgtagcaaagatggcaggtatgccgaagagtattgtgaagcgtgcaaatactatattgaagcaactggaatcagacaaccgccagcaaggtatttccggcaaaccattgacggaagtcagtgaaaacagaagcggtatgcagctcagcttcttccagttggacgacccgatcctttgccagattcgggatgagatactgaatctggatgtgaataaccttactccgattgaggcgttgaataagctgaacgatataaagaagatagtcagaggcaaataaaaactgatataacttatgcgggggctgactaaaaagtcgttagtatctccattctcctccttccggaagctaccctttatacacaagtcttagctgattaactcatacagttcaaactgtgtattaaatctatccagtccattcttaaaggttatatatcctggaatggactggctcttgtatgcactccatgctcctaaccttgcaataatccatgctgcccatgccattgattcttttttatatggattttgctgtattttggtatttccctcactcttttttcctactatatgtaataatgctatttctttgcttgtaaagtagatttctgaagagagtttttcatcttctttatcaaaagaaagtttgagtaccatcacctgcagggctgcctgcaaggaaattaagattagtttttgtaatgccgaaactgtttccaactgtgcgtcctcaatcatgaatccctttcttttgagcactctgaacaactcttcaatcagccatctacaacgataccaaccgatacattcaattgcttgttctacagtctccaccacatgtgtagttagcagtctccattcaatagggctctcatttaccggtgtactggaagatttttctttaacatgtatgcaataaagactaacagggggactgccctttgccggaccgttaacaggagcgcacaaggtgactctttcaaagcgaagttccatgcacgctacccgtttcttacgtccgcttcccgggagcacttcaaagctatactctgcccgtagaacagcctgctccattaatgtattcagatggacagaacagtctggatcatccaaccggcaattcctttcatgaacagaacgtatcagcaagtgaacattatcagtagggatacggctgaaaagctcgaaaatgtccgcttcacggtcaccgatgatcgttttaactgcatcccggggcatttgctcactggcagccattccactttctatccaacgatatgactctttttcttctataggctgatatctgtaattacgttcttcacgacttaaagcagccggtgagcgattccactgcttaaccgaagaaaagcctataggaatatgactggaggcatccactaccaagacaggatgcaaaaaagtaccacattgcttttgaccgacaatgccgggactggctgtttttttcttcattcgctcaacatgagcctcatagtttatctccgaggtatcttgaatacacagtaaatgcttacgaccggaagcattcttacagcaagtgtgtatcagacctgataagatagcatcagagctgactgaggaattgttcaaaaatctataagcacccatcttttctttatgttccttactaaattgattcactatagcactttgatggacaaccatctgagagcaaattaagtttaaacgccgcaaaagccgaggatcacgaatttgatctgtctctaataacatcaagcaaagataaaaaaaataatatatacttgtgtataaagggtagcttc
